United States Patent Application Publication US 2013/0332133 A1 - sequence listing, part 18

SEQ ID NO: 183096 - protein, 323 aa, Unknown
  Bacterial polypetide isolated from the Sargasso Sea
SGKKAKNAQEAHEAIRPTEIVRKPEEIKKYLSNDQYKLYNLIWSRSLSSQMQSAKFDRKTITINSDDNKNIFKASGSTLKFDGFLKLYKIDENDSDNENILPDVEIGEVKFDDYIDEQHYTQPPPRFSEASLVKKLEELGIGRPSTYASIISVIANRGYADINNKRFFPTDRGKLLSAFLEKLFTKYVDYDFTAKLEDQLDDITSGKENWIKVLENFWKDFNINVSGVKEKRTREVLDLLNESLGSLIFEVDKNGNINRKCQLCKTGQLSLKNSFRGGAFIGCSNYPDCKFTRPLSKSKAAQQLTLAEPKLIGKNDKDKDIYL

SEQ ID NO: 183097 - protein, 297 aa, Unknown
  Bacterial polypetide isolated from the Sargasso Sea
MATDPDREGEAIAWHVREILESRKLLKGKKVERVVFNEITKKAVTNGINNPREIESLLVDAYMARRALDYLVGFNISPILWTKLPGSKSAGRVQSVALRLVTEREHEIELFKPQEFWTISCDFKNGENKIIKSKLSLFNKEKIEKFSFKKKVESENALKEINSKSYEITDVSSKVYKRNPLAPFTTSTLQQTASGKFGFGASRTMQIAQRLYQGIDIDGDTVGLITYMRTDGTQISKDAIDDFRKFINNTHGREYLPENPNSYTGKKAKNAQEAHEAIRPTDVSKKPSDMKKYLSTD

SEQ ID NO: 183098 - protein, 225 aa, Unknown
  Bacterial polypetide isolated from the Sargasso Sea
MNLVIVESPAKAKTINKYLGDNYKVLASYGHIRDLPSKNGSVDPEQDFKMEWEIDSFSKKYLKEITDAAKESSKIILATDPDREGEAIAWHVKEYLNEKKLLKDKEIERVVFNEITKKAVIHGIENPRQIEPLLVDAYMARRALDYLVGFNISPILWTKLPGSKSAGRVQSVALKLITEREHEIESFKPEEFWTLSIKFVDQKNQNITASISQLDNNKIEKFSFR

SEQ ID NO: 183099 - protein, 315 aa, Unknown
  Bacterial polypetide isolated from the Sargasso Sea
TLKDMESDAQKLYQLIWRQFVACQMTPAQYDSTTLTVKAGDFKLKARGRTLRFDGWTKVMPALRKGDEDRTLPMVNKGDSLSLVELTPAQHFTKPPARFSEASLVKELEKRGIGRPSTYASIISTIQDRGYVRVENRRFYAEKMGEIVTDRLEENFRDLMNYDFTAQMEDRLDQVANHQAEWKQVLDSFFGDFTSQLQTAEKDPEEGGMQPNPMVLTTIDCPTCGRKMGIRTASTGVFLGCSGYALSPKERCKTTINLVPENEVLNVLEGDDAETNALRAKRRCKKCGTAMDSYLIDPKRKLHVCGNNPTCDGYE

SEQ ID NO: 183100 - protein, 240 aa, Unknown
  Bacterial polypetide isolated from the Sargasso Sea
MNLVIVESPAKAKTINKYLGDNYKVLASYGHIRDLPSKNGSVDPEQDFKMEWEVDSFSKKYLKEITDAVKDSSKIILATDPDREGEAIAWHVKEYLNEKKLLKDKEIQRVVFNEITKKAVIHGIENPRQIEPLLVDAYMARRALDYLVGFNISPILWTKLPGSKSAGRVQSVALKLITEREHEIESFKPEEFWTLSVKFVDEKNQNITASISQLDNNKIEKFSFRTKDEINKAVLNINKK

SEQ ID NO: 183101 - protein, 171 aa, Unknown
  Bacterial polypetide isolated from the Sargasso Sea
MNLVIVESPAKAKTINKYLGDNYTVLASYGHIRDLPSKNGSVDPDQNFKMEWEVDSFSKKYLKEITDAAKDSSKIILATDPDREGEAIAWHVKEYLDEKKLLKDKEIERVVFNEITKKAVTHGIENPRQIEPLLVDAYMARRALDYLVGFNISPILWTKLPGSKSAGRVQS

SEQ ID NO: 183102 - protein, 298 aa, Unknown
  Bacterial polypetide isolated from the Sargasso Sea
MSNSLVIVESPSKSKTLESYLGKDFKVLASYGHVRDLLPKKGAVDPDNNFAMIYEAIERNEKAVNAIKKALKKADTLYLATDPDREGEAISWHLYELLKEKGCLENKEVHRVAFYEVTKSAVKDAIKNPRELSPNLIDAQQARRALDYLVGFNLSPLLWKKIQKGLSAGRVQSPALRMIVEREKEIDDFKAIEYWTIESDLEFDNSNFLGRLTEYNNEKIKKFSIENTAKASDIKSSLEQASTGELLVKTVTKKQRKRQPTAPFITSTLQQEAIRKLGFTAQWTMRVAQQLYEGIDVG

SEQ ID NO: 183103 - protein, 292 aa, Unknown
  Bacterial polypetide isolated from the Sargasso Sea
KNQNILASISQLDNTKVEKFSFKNKDEINKAISSINQKKFNITDISSKVVNRNPSGPFTTSTLQQTASSRLGFGASRTMQIAQKLYQGVEIEGETIGLITYMRTDGTNLSKDAVMAFRDYIKKEIGNEYLPESALNYSGKKAKNAQEAHEAIRPTDIIRTPQSVKKYLSTDQNKLYDLIWSRALSSQMQSAKFDRNTITITSNNNDTICKASGSVLKFDGFLKIYNNQGKDDDENILPSVSKGLVNIESLVDEQHFTQPPPRYSEASLVKKLEELGIGRPSTYASIISTIAK

SEQ ID NO: 183104 - protein, 242 aa, Unknown
  Bacterial polypetide isolated from the Sargasso Sea
LASYGHIRDLPSKNGSVDPDQNFKMEWEVDSFSKKYLKEITDAAKESSKIILATDPDREGEAIAWHVKEYLNEKKLLKDKEIERVVFNEITKKAVTHGIENPRQIEPLLVDAYMARRALDYLVGFNISPILWTKLPGSKSAGRVQSVALKLITEREHAIESFQPDEFWTLTVNFQNDKNDKISASISQLNGVKIEKFSFKNKNDIDAAISEIKNKKFKITDISSKVVSRNPSGPFTTSTLQQ

SEQ ID NO: 183105 - protein, 267 aa, Unknown
  Bacterial polypetide isolated from the Sargasso Sea
TLQQTASGKFGFGASRTMQIAQRLYQGIEVDGDTVGLITYMRTDGTQISNEAISDFRNFINKEHGKEYLPDTPNSYTGKKAKNAQEAHEAIRPTDVSRKPSDMKKYLSTDQSKLYELIWNRAVSSQMNPAEFDRKSITIESDNKKINFKANGSTVKFEGYLKVYKFEEKDEDLKNILPEVKVGDKVSIKELIDDQHFTDPPPRFSEASLVKKMEELGIGRPSTYASIISVLSTRNYVELLNKRFHPTDRGKLLSAFLEKLFTKYVDY

SEQ ID NO: 183106 - protein, 128 aa, Unknown
  Bacterial polypetide isolated from the Sargasso Sea
MNLVIVESPAKAKTINKYLGNDYTVLASYGHIRDLPSKNGSVDPENEFKMIWEIDSFSKKYLKEISDVAKDSKKIILATDPDREGEAIAWHVKEFLNEKKLLKDKKIERVVFNEITKKAVTNGIENPR

SEQ ID NO: 183107 - protein, 119 aa, Unknown
  Bacterial polypetide isolated from the Sargasso Sea
MNLVIVESPAKAKTINKYLGDNYTVLASYGHIRDLPSKNGSVDPDQNFKMEWEVDNFSKKYLKDITDAAKESSKIILATDPDREGEAIAWHVKEYLNEKKLLKDKEVERVVFNEITKKA

SEQ ID NO: 183108 - protein, 285 aa, Unknown
  Bacterial polypetide isolated from the Sargasso Sea
PSLEVNQQLILKDIDNKEKYTKPPARFSEAALVKELEKKGIGRPSTYANIISTIQDRGYVEIQNRRFFVKKIGMIVTDRLVSSFDDIMDYSFTANFEDQLDRIASGELNWKEVLNSYYSAFQDDLSSAMDEENGMSPNLPTMTNINCPECKINKLTIRNASNGVFLGCAGYSLPAEMQCKKTLNLISGDEAVSIDDQEEAEHLVTKRRCPKCDTSMDNYLLDENHKLHVCSNNPDCDGFEVEEGAFKIKGYDGPTLSCHKCGSEMQLKTGRFGKYFGCMNDNCGA

SEQ ID NO: 183109 - protein, 304 aa, Unknown
  Bacterial polypetide isolated from the Sargasso Sea
MILKINFKWEWGNLDSFSKKYLKEITNAAEDSDKIILATDPDREGEAIAWHVKEVLEKKKLLKDKNLERVVFNEITKKAILDAIKNPREIHLPLVEAYLARRALDYLVGFNISPILWTKLPGSKSAGRVQSVALKLITEREKEIELFKPEEYWTLTSDFTNKDNKNIFSKLSLFNSEKIERFSFKTKDEIQKAIDVINKTKFKVDDVNTKLYRRNPLAPFTTSTLQQTASGRFGFGASRTMQIAQRLYQGIDIEGETTGLITYMRTDGTNISKEAIEDFRKYISEDYGEKYLPKEANSYTGKKQ

SEQ ID NO: 183110 - protein, 284 aa, Unknown
  Bacterial polypetide isolated from the Sargasso Sea
WEVDSFSKKYLKEITEVAKKSNKIILATDPDREGEAIAWHVKEYLSEKKILKDKIIERVVFNEITKKAVTNGIDNPRNIETNLVDAYMARRALDYLVGFNISPILWTKLPGSKSAGRVQSVALKLLTAREHEIEQFNPEEFWTLNVNFKTLSEDILNCNLILLNGEKVEKFSFRNKEDIIKAIELIKKSKFNISDVTSKIFSRNPLGPFTTSTLQQAASSKLGFGASRTMQIAQRLYQGIDVEGETVGLITYMRTDGTNISKDAVSEFRDFIKNSYGNDYLPKG

SEQ ID NO: 183111 - protein, 285 aa, Unknown
  Bacterial polypetide isolated from the Sargasso Sea
YTVLASYGHIRDLPSKNGSVDPENKFKMIWEIDSFSKKYLKEIVNVAKDSEKVILATDPDREGEAIAWHVKEYLDEKKLLKDKKIERVVFNEITKKAVTNGIENPRNIETQLVDAYMARRALDYLVGFNISPILWTKLPGSKSAGRVQSVALRLLTEREHEIEIFIPEEFWTLNVIFKTKSNDLIRANIIQLNGNKIEKFSFKNKEEINIAVEKIKNNKYEITDITSKIFSRNPLGPFTTSTLQQTASSKLGFGASRTMQIAQKLYQGIDIDGDTVGLITYMRTD

SEQ ID NO: 183112 - protein, 263 aa, Unknown
  Bacterial polypetide isolated from the Sargasso Sea
MNLVIVESPAKAKTINKYLGKDYKVLASYGHVRDLPSKNGSVDPQNNFKMEWELDTFSKKYVKEITDAAAESNRIILATDPDREGEAIAWHVREILESKKLLKGKKVERVVFNEITKKAVTNGINNPREIESLLVNAYMARRALDYLVGFNISPILWTKLPGSKSAGRVQSVALRLITEREHEIELFKPEEFWTIESNFQYDDKLIKSKLSIYSSEKVQKFTFKKKVDSEKALNEIKNQSYKIADVSSKVFRRNPLAPFTTST

SEQ ID NO: 183113 - protein, 255 aa, Unknown
  Bacterial polypetide isolated from the Sargasso Sea
ETVGLITYMRTDGTNISRDAVYSFRDFITKNYGDKYLPEKALNYSGKKAKNAQEAHEAIRPTEIIRKPEEIKKYLSNDQYKLYNLIWSRSLSSQMESAKFDRKTITINSDDNKNIFKASGSTLKFDGFLKLYKIDENDSDNENILPEVEKGEVKFDDYNDEQHYTQPPPRYSEASLVKKLEELGIGRPSTYASIISVIANRGYADINNKRFFPTDRGKLLSAFLEKLFTKYVDYDFTAKLEDQLDDITSGKENWI

SEQ ID NO: 183114 - protein, 309 aa, Unknown
  Bacterial polypetide isolated from the Sargasso Sea
PSKNGSVDPDQNFKMEWEVDSFSKKYLKEITDAAKDSSKIILATDPDREGEAIAWHVKEYLDEKKLLKDKEIERVVFNEITKKAVTHGIENPRQIEPLLVDAYMARRALDYLVGFNISPILWTKLPGSKSAGRVQSVALKLITEREHEIELFKPEEFWTLSINFQDKNKSNITASISQLDGEKIEKFSFKNKEQIEKAIANINNKKFNINDISSKIVSRNPSGPFTTSTLQQVASSRLGFGASRTMQIAQKLYQGIEIEGDTVGLITYMRTDGTNLSADAVSDFRNFIKKEYGNEYLPENPNNYSGKKA

SEQ ID NO: 183115 - protein, 244 aa, Unknown
  Bacterial polypetide isolated from the Sargasso Sea
SWKPSAPPARYGSSSWKPSAPPARYGSSSWKPSAPPARYGSSSWKPSAPPARYGSSSWKPSTPPARYGSSSWKPSTPPARYGSSSWKPSTPPARYGSSSWKPSAPPARYGSSSWKPSAPPARYGSSSWKPSAPPARYGSSSWKPSAPPARYGSSSWKPSAPPARYGSSSWKPSTPPARYGSSSWKPSTPPARYGSSSWKPSAPPARYGSSRSSLFLLPRAFSIDASHCSSSLFAGKKQEVGSKQ

SEQ ID NO: 183116 - protein, 312 aa, Unknown
  Bacterial polypetide isolated from the Sargasso Sea
LATDPDREGEAIAWHVKEVLEKKKLLKDKNLERVVFNEITKKAILDAIKNPRQIHLPLVEAYLARRALDYLVGFNISPILWTKLPGSKSAGRVQSVALKLITEREKEIELFKPEEYWTLTSDFADKNNKNIFSKLSLFDGKKIERFSFKNKEEIQKAIDVINKTKFKIADVNTKLYRRNPLAPFTTSTLQQTASGRFGFGASRTMQIAQRLYQGVDIEGETTGLITYMRTDGTNISKEAVEDFRKHIKDDYGEKYLPDVPNSFAGKKAKNAQEAHEAIRPTNIKRKPAEIKKYVNADQFKLYELIWSRALSS

SEQ ID NO: 183117 - protein, 275 aa, Unknown
  Bacterial polypetide isolated from the Sargasso Sea
MVDRMGIDPAHGWKARYEILPGKEKVVKELKTLAEKADTVYLATDLDREGEAIAWHLQQIIGGDEQRFKRVVFNEITKNAIQNAFEEPGELNVDRVNAQQARRFLDRVVGFMVSPLLWKKVARGLSAGRVQSVAVRLVVEREREIKAFVPEEYWTVAADTQTAAQQMLQLDVTKQQGKAFKPVNKAEADAALTLLNKAVYKVLEREDKPSSSKPQAPFITSTLQQAASTRLGYGVKKTMMLAQRLYEAGHITYMRTDSTNLSAEAVSACRDYISQ

SEQ ID NO: 183118 - protein, 267 aa, Unknown
  Bacterial polypetide isolated from the Sargasso Sea
IEENYGDDYLPEQANNYSGKKAKNAQEAHEAIRPTEIKNSPESIKKYLSTDQYKLYDLIWSRALSSQMQPAKFDRKTILITSEDGKNILKSSGSTIKFDGFLKLQKIDENDDEKILPEVSKGPIDIKEFNDEQHFTQPPPRFSEASLVKKLEELGIGRPSTYASIISVISNRGYADIVNKRFFPTDRGKLLSAFLEKLFSRYVDYDFTAKLEDQLDDITSGKENWIKVLDQFWKDFNENVSNVKEKRTREVLDLLNDSLGSLIFDKK

SEQ ID NO: 183119 - protein, 175 aa, Unknown
  Bacterial polypetide isolated from the Sargasso Sea
MNLVIVESPAKAKTINKYLGSDYTVLASYGHIRDLPSKNGSVDPENDFKMIWEIDSFSKKYLKEITDSAKNSSKIILATDPDREGEAIAWHVREFLEEKKLLKDKKVERVVFNEITKKAVTSGIDNPRQIESQLVDAYMARRALDYLVGFNISPILWTKLPGSKSAGRVQSVALR

SEQ ID NO: 183120 - protein, 278 aa, Unknown
  Bacterial polypetide isolated from the Sargasso Sea
NKDEINKAISSINQKKFNITDISSKVVNRNPSGPFTTSTLQQTASSRLGFGASRTMQIAQKLYQGVEIEGETIGLITYMRTDGTNLSKDAVVAFRDYIKKEIGNEYLPESALNYSGKKAKNAQEAHEAIRPTDVIRTPQSVKKYLSTDQNKLYDLIWSRALSSQMQSAKFDRNTITITSNNNDTVCKASGSVLKFDGFLKIYNNQGKDDDENILPSVSKGLVNIESLIDEQHFTQPPPRYSEASLVKKLEELGIGRPSTYASIISTITNRGYAEILNK

SEQ ID NO: 183121 - protein, 264 aa, Unknown
  Bacterial polypetide isolated from the Sargasso Sea
FNITDISSKVVSRNPSGPFTTSTLQQVASSRLGFGASRTMQIAQKLYQGIEIEGDTVGLITYMRTDGTNLSADAVSDFRNFIKREYGNEYLPENPNNYSGKKAKNAQEAHEAIRPTDINRNPDSVKKYLSSDQQKLYSLIWSRALSSQMETAKFDRNTITIESEDGKTICKSSGSVLKFDGFLKVYSNQSKDDDEQILPEMSKGPINIETLIDEQHFTQPPPRYSEASLVKKLEELGIGRPSTYASIISTIANRGYAEIVSKRF

SEQ ID NO: 183122 - protein, 272 aa, Unknown
  Bacterial polypetide isolated from the Sargasso Sea
FSFRNKEDINKAISSINIKKFSITDISSKIVNRNPSGPFTTSTLQQTSSSRLGFGASRTMQIAQKLYQGIEIEGETIGLITYMRTDGTNLSKDAVSAFRDYIQKEIGSEYLPKDVLNYSGKKAKNAQEAHEAIRPTDIIRTPQSIKKYLSTDQNKLYELIWSRALSSQMESAKFDRNTITITSDKNDTICKASGSVLKFDGFLKIYNNQSKDDDENILPTVSKGPINIEALIDEQHYTLPPPRYSEASIVKKLEELGIGRPSTYASIISTIA

SEQ ID NO: 183123 - protein, 254 aa, Unknown
  Bacterial polypetide isolated from the Sargasso Sea
TRKTMSVAQRLYEGFNVGGESVGLITYMRTDSVQVSDIAVSEARSHVKNVYGDSYIPSSPRMYKSRSKNAQEAHEAIRPTSIKRTPQSLSAYLDADQMKLYTLIWSRMVASQMSDSVTESTRVEIDAVSTTTYELRSNGSKLIFDGFKKLYEESTDSEEDNKDSKLLPNLSEDMILDCKEITPIQHHTQAPPMYTEASLVKEMEENGIGRPSTYAPTINTILDRNYVEREQSRLKPTVLGMTVSDELIDYFGTT

SEQ ID NO: 183124 - protein, 304 aa, Unknown
  Bacterial polypetide isolated from the Sargasso Sea
REGEAIAWHLKEALGADKFNYSRVRFNQITKDAILESFEDPKDIDASLVEAQQARRFLDRVVGFELSPLLWAKIARNLSAGRVQSVALRLLVEREHSIQEFKPDEFWEISFNAENDKNTGIEFSLNRKKSDPLLQDEEAKKIEELVKSSDLLVSEVTQKPVKSKPKPPFITSTLQQAASTKLGFNVKRTMRTAQKLYENGLITYMRTDAPALSPESIADARMYIETNLGDKYLTNAPRIYSSNENAQEAHEAIRPTNASTKSEGLISSSDEEKRLYELIWQQFIGSQLPDAEYLATNAKIHLDE

SEQ ID NO: 183125 - protein, 298 aa, Unknown
  Bacterial polypetide isolated from the Sargasso Sea
MLNDVKVEKFSFKNKEDINKSIEIIKQSKYKISDISSKIYTRNPLGPFTTSTLQQTASSKLGFGASRTMQIAQRLYQGIDIDGDTVGLITYMRTDGTNISSDAIHDFRNYIQKSYGEDYLPKEPNNYSGKKAKNAQEAHEAIRPTDIKRKPNSMKKFLSTDQFKLYDLIWSRALSSQMEAAKFDRKSITIISDNNLNQFKCSGSTIKFDGYLKLTRIEDNEDEKILPDVNKEEVFTNDFLDEQHFTQPPPRYSEASLVKKLEELGIGRPSTYASIISVISNRGYADIVNKRFFPTDRG

SEQ ID NO: 183126 - protein, 264 aa, Unknown
  Bacterial polypetide isolated from the Sargasso Sea
SPLLWTKVARGLSAGRVQSVAVRLIVEREREIRAFVPEEYWEVHALLTAGDIEPVRFMVTHRGGEKFEPKNQAEAEAAVDAMRDASFSVTDLESRKTSSKPSAPFITSTLQQAASTRMGFSVKKTMTLAQRLYEAGYITYMRTDSTNLSDEAVSACRNLIKKDFPSEYLPAEPIRYGSREGAQEAHEAIRPSDVTLRSSLLSGMEPDAERLYDLIWRQFVACQMSPARYLSTTLVVIAADCRLTAKGRVIEFDGFTRVHPPAAR

SEQ ID NO: 183127 - protein, 294 aa, Unknown
  Bacterial polypetide isolated from the Sargasso Sea
KEITDAAKDSSKIILATDPDREGEAIAWHVKEYLNEKKLLKDKEIERVVFNEITKKAVIHGIENPRQIEPLLVDAYMARRALDYLVGFNISPILWTKLPGSKSAGRVQSVALKLITEREHEIESFKPEEFWTLSVKFKDEKNQNILASISQLDNNKVEKFSFRNKDEINKAVSSINQKKFNITEISSKVVNRNPSGPFTTSTLQQTASSRLGFGASRTMQIAQKLYQGVDIEGETIGLITYMRTDGTNLSKDAVVAFRDYIKKEIGNEYLPESALNYSGKKAKNAQEAHEAIRP

SEQ ID NO: 183128 - protein, 282 aa, Unknown
  Bacterial polypetide isolated from the Sargasso Sea
EKIKSKKYQITDITSKVFTRNPVGPFTTSTLQQTASSKLGFGASRTMQIAQRLYQGIDIDGDTKGLITYMRTDGTNISKEAVNEFRSYIDDNFGKDYLPEQPLNYSGKKAKNAQEAHEAIRPTNIENSPEKMKKYLSSDQNKLYNLIWSRALSSQMESAKFDRKTISIQSDDSKNFLRSSGSVIKFDGFLKLYKIDEDQNDEKILPDVNKGPINIESFIDEQHFTQPPPRYSEASLVKKLEELGIGRPSTYASIISVIANRGYADIVNKRFFPTDRGKLISA

SEQ ID NO: 183129 - protein, 307 aa, Unknown
  Bacterial polypetide isolated from the Sargasso Sea
DREGEAISWHLLEALGLKKSLVKRIVFHEITESAIINALENPRDVDQQLVNAQQARRILDRAVGYKLSPLLWKKIKPGLSAGRVQSVSVYILVEREREIRKFVPEEYWKIKAEFKDFSADLKKIGGKPAKVGNEKEALTIESSIKQGNFVVSEIKERMASRSPGAPFTTSTIQQEASLKLGFSVKRTMVVAQQLYEGNFDIPDYSGGLITYMRTDSVSVADQALKQAKEVINTEYGKKYILKEPRKYKSRAVNAQEAHEAIRPVDFSQKPAMVQTHLSHDQFRLYSLIWKSALASPNDCSGNSTYDD

SEQ ID NO: 183130 - protein, 159 aa, Unknown
  Bacterial polypetide isolated from the Sargasso Sea
MNLVIVESPAKAKTINKYLGSNYTVLASYGHIRDLPSKNGSVDPENKFKMIWEVDAFSKKYLKEITDTAKDSDKIILATDPDREGEAIAWHVKEFLDEKKLLKDKKVERVVFNEITKKAVTNGIDNPRSIETHLVDAYMARRALDYLVGFNISPILWTK

SEQ ID NO: 183131 - protein, 259 aa, Unknown
  Bacterial polypetide isolated from the Sargasso Sea
VIGFELSPLLWKKIARGLSAGRVQSVALRLLDERERSIQEFIPEEYWEISFSASTNNDETITFNLATKKTDPLLPKEKVETIKQQIESCNLSINEISKKPVKVKPKAPFITSTLQQSASTRLGFNVKRTMRVAQKLYEAGLITYMRTDAPSLSKESIKDARSYINENIGEKYLTNAPKIYSSTENAQEAHEAVRPTNAYLKPQDVMHLSDEESKLYTLIWERFIASQMPDAEYLSTSAKVFVEENVFVARGREIVFDGF

SEQ ID NO: 183132 - protein, 305 aa, Unknown
  Bacterial polypetide isolated from the Sargasso Sea
ARETMRCAQGLYERGFITYMRTDSVHLSEQAIRAARECVSSMYGKEYLSNSSRQFNSTARNVQEAHEAIRPAGEVFKTPKETNLTGRDLSLYDLIWKRTVASQMAEARLTMINAEISVGDGLFKSSGKSIDFAGFFRAYVEGSDDPSSSLEQQEIILPNLTTGTCLEVTDKESTFHETKPPARYTEAALVKVLEKEGIGRPSTYASIIGTIVDRGYANISSNTLAPTFTAFAVTALLEEHFPDLVDTTFTAKMESSLDEISSGNLDWLPYLETFYKGKNGLEVKVQKTEGDIDGKAYRQVDSTTS

SEQ ID NO: 183133 - protein, 280 aa, Unknown
  Bacterial polypetide isolated from the Sargasso Sea
LVQAQETRRILDRLFGYELSPLLWKKVAPRLSAGRVQSVSVRLLVNKERERRAFKKASYWGLKASLLKDNISFESKLFSLNAQKISNGSDFDEKTGNLKKGNKSLILTEDRAKSLLKTLSKEKWKVLKVEKKPTTRKPVPPFTTSTLQQEANRKLRLSARETMRCAQGLYEKGFITYMRTDSVHLSEQAIRAARECVNSKYGKEYLSSSARQFNSNARNAQEAHEAIRPAGEVFKTPNDTDLSGRDLSLYELIWKRTVASQMAEAKLTMINAEIEVGEGL

SEQ ID NO: 183134 - protein, 302 aa, Unknown
  Bacterial polypetide isolated from the Sargasso Sea
YMRTDSTNLSNDAVEMVRGFIGSEYGDKYLPGKPNLYSSKEGAQEAHEAIRPSDVNLRPTQLSGMERDAERLYDLIWRQFVACQMPPAEYLSTSVTVAAGDFELRAKGRILKFDGYTRVLPQQSKPGEDDVLPEMKEGEGLKLIQLDPSQHFTKPPARYSEASLVKELEKRGIGRPSTYAAIISTIQDRGYVTVHNRRFYAEKMGDIVTERLDESFANLMDYSFTATMEEHLDDVAQGEREWKHLLDEFYGDFKKKLEVAEAGEGGMRANQPTLTDIPCRECGRPMMIRTASTGVFLGCSGY

SEQ ID NO: 183135 - protein, 259 aa, Unknown
  Bacterial polypetide isolated from the Sargasso Sea
SSFSDPKEIDLNLFKAYRARRFLDKVIGFELSPLLWKKIARGLSAGRVQSVALRLLDEKERSIQEFVPEEFWEISFTGTSKNDELIKFKLNTKKTDPLLTEEKVKSIQKQIESCDLKINEITKKPVKVKPKAPFITSTLQQSASTRLGFNVKRTMRVAQKLYEAGLITYMRTDAPSLSKESINDARSFIKENLGDKYLTNAPKIYSSTENAQEAHEAVRPTNAFLKPQDVMQLSEEESKLYKLIWERFVASQLPDAEYL

SEQ ID NO: 183136 - protein, 206 aa, Unknown
  Bacterial polypetide isolated from the Sargasso Sea
MARSLVIVESPAKAKTINRYLGSDYVVKSSVGHVRDLPTRSKPVDPKARAEEAKKTKALDPEKRAAYKAKRSRDQLIRKMGINPDKDWQAYYEILPGKEKVIDELKKFADKADKVYLATDLDREGEAIAWHLKEIIGGDSDKFRRVVFNEITKKAIEEAFMEPGDIDMDMVQAQQARRFLDRVVGFELSPLLWAKVARGLSAGRVQ

SEQ ID NO: 183137 - protein, 315 aa, Unknown
  Bacterial polypetide isolated from the Sargasso Sea
ERGYITYMRTDSVHLSEHAITAARSCVSDKYGADHLSPQPRQYTTKSRNAQEAHEAIRPAGSSFRTPAESGLKGLDLSLYELIWKRTVASQMADARLTMVSAQIEVENARFRASGKRIDFAGFFRAYVEGSDDPDAALEGQEVLLPTLRSGDHPSCQSCEPHGHQTQPPARFSEAALVKMLEKEGIGRPSTYASIIGTICDRGYATLQNNSLTPSFTAFAVTALLEEHFPDLVDPSFTARMENTLDEISNGSAEWLPYLDHFFRGDKGLEQQVAKREGDIDPVASRTIELDGLPCVVRIGRFGAYLEAKRPGEDG

SEQ ID NO: 183138 - protein, 307 aa, Unknown
  Bacterial polypetide isolated from the Sargasso Sea
NGEKIEKFSFKIKEEIEKAINNIKTKKFNITDISSKVVSRNPSGPFTTSTLQQVASSRLGFGASRTMQIAQKLYQGIEIEGDTVGLITYMRTDGTNLSADAVSDFRNFIKKHYGNEYLPENPNNYSGKKAKNAQEAHEAIRPTDINRNPDSVKKYLSSDQQKLYNLIWSRALSSQMETAKFDRNTINIESEDSKTICKSSGSVLKFDGFLKVYSNQSKDDDEQILPEMSKGPINIEALIDEQHFTQPPPRYSEASLVKKLEELGIGRPSTYASIISTIANRGYAEIINKRFFPTDRGKLISAFLEKL

SEQ ID NO: 183139 - protein, 292 aa, Unknown
  Bacterial polypetide isolated from the Sargasso Sea
MDVVVVESPAKAKTINKYLGSEYTVLASYGHVRDLPPKNGSVDPEQDFNMLWQTGNDSEKHLKAIIDATRGADHLYLATDPDREGEAISWHVQEVLESRNALDGVNVQRIVFHEITRDAVLQALKEPRDLDHGLIEAYLARRALDYLVGFTLSPVLWRKLPGSRSAGRVQSVALRLISERENEIERFVPKEYWSLEADFKTLQGGVMTSRMTHFESEKLNRFSILNSETANRAAKAIKDGDFRVTSIERKSVFRNPQPPFTTSTLQQEASRKLGFGTARTMRIAQRLYEGVD

SEQ ID NO: 183140 - protein, 300 aa, Unknown
  Bacterial polypetide isolated from the Sargasso Sea
STPYWAVQAFASGIDFRVRFHEKDDPKVWKDEKGKIDIHRTNDSNLADKAYEYLNLESQITPKTVSLNNYKRRPKPPFTTDTLLQASGSKYSWRPSNTMRIAQGLYEAGHITYMRTDSTRTSNSSRQKAKDFITSKWGSNFVGKGAFGGKPKSGVQDAHEAIRPTNPLSDLPKGLDDSQKRLYRLIWARFIASQMCDSEWTSMKIQAKTETFDKFLDGDTKWRISPGWESAFEKIDKKPALTPPQPEIAEDKKVPLDKKEQNPKLIEDKTKPPARYTQHGLVAVMKSEGIGRPSTYAATI

SEQ ID NO: 183141 - protein, 152 aa, Unknown
  Bacterial polypetide isolated from the Sargasso Sea
MPKTLVIVESPAKAKTISKYLGSEYIVKSSVGHIRDLPKGKSKKPLQRNTIPKDLPEDEKRRLKQINERKRLIRRMGIDPDNDWAANYEIIPEKEKVIKELKKAAKTVESIFLATDLDREGEAIAWHLKEALGADKFNYYRVRFNQITKDAI

SEQ ID NO: 183142 - protein, 245 aa, Unknown
  Bacterial polypetide isolated from the Sargasso Sea
PFTTSTLQQVASSRLGFGASRTMQIAQKLYQGIEVEGDTVGLITYMRTDGTNLSADAVADFRNFIKKEYGNEYLPENSNNYSGKKAKNAQEAHEAIRPTDINRNPDSVKKYLSSDQQKLYSLIWSRALSSQMETAKYDRNTITIESDDSKTICKSSGSVLKFDGFLKVYSNQSKDDEEQILPETSEGPINIEALIDEQHFTQPPPRYSEASLVKKLEELGIGRPSTYASIKKTIANRGYAEIVNK

SEQ ID NO: 183143 - protein, 294 aa, Unknown
  Bacterial polypetide isolated from the Sargasso Sea
KFSFKNKQDINDALSQIKNKKYKITDISSKTYNRNPSGPFTTSTLQQTASGKLGFGASRTMQIAQRLYQGIDIEGETVGLITYMRTDGTNISKDAITSFRDFIMENYGDKYLPEQPLNYSGKKAKNAQEAHEAIRPTEIIRKPEDMKKYLSTDQYKLYNLIWSRSLSSQMQSAKFDRKTITISSDDDKNIFKASGSTLKFDGFLKLYKIDENDDDNENTLPDVEKGDVMFEDHIDEQHYTQPPPRYSEASLVKKLEELGIGRPSTYASIISVIANRGYADINNKRFSQLIEVNT

SEQ ID NO: 183144 - protein, 291 aa, Unknown
  Bacterial polypetide isolated from the Sargasso Sea
FKEVEKVYLATDLDREGEAIAWHLKEALGKNKFEYHRVRFNEITKSSILESFADPKEIDQDLVNAQQARRFLDRVVGFELSPLLWKKIARGLSAGRVQSVALKLLCEREKLISQFQPEEFWEVSATLKDYNNDEILFKLNRKKSDPLLKEDEAQKIEELVNSSSLEISEVTKKPTSVKPRAPFITSTLQQAASSKLGFGVSRTMRVAQKLYEAGRITYMRTDAPSLSNDSIDDARLFIKDTLADEYLTDKPRIYSGKENAQEAHEAIRPTSASLTSEKLTGHSEEEVNYMT

SEQ ID NO: 183145 - protein, 280 aa, Unknown
  Bacterial polypetide isolated from the Sargasso Sea
VIKDLRKASKEVEKVYLATDLDREGEAIAWHLKEALGKNKFEYHRVRFNEITKSSILESFSDPKEIDQDLVNAQQARRFLDRVVGFELSPLLWKKIARGLSAGRVQSVALRLLCEREKLISQFQPEEFWEISATLKDFNHEEILFKLNRKKSDPLLEKDEAKKIEELVNSSSLKISEITKKPTTVKPRAPFITSTLQQAASSKLGFGVSRTMRVAQKLYEAGRITYMRTDAPSLSNDSIEDARLFIKDTLAEEYLTEKPRIYSGKENAQEAHEAIRPTSA

SEQ ID NO: 183146 - protein, 192 aa, Unknown
  Bacterial polypetide isolated from the Sargasso Sea
MNLVIVESPAKAKTINKYLGRNYTVLASYGHIRDLPSKNGSVDPNDKFKMIWEVDSFSKKYLKEITDTAKKSEKIILATDPDREGEAIAWHVREYLEEKKILKDKKVERVVFNEITKKAVTNGIENPRKIEPHLVDAYMARRALDYLVGFNISPILWTKLPGSKSAGRVQSVALRLLTEREHEIESFNPEEY

SEQ ID NO: 183147 - protein, 271 aa, Unknown
  Bacterial polypetide isolated from the Sargasso Sea
EEKKLLKDKKIERVVFNEITKKAVSNGIDNPRNIESNLVDAYMARRALDYLVGFNISPILWTKLPGSKSAGRVQSVALRLLTEREHEIEQFKPEEFWTLNVNFKTSEGNILNSNIVLLDNSKVGKFFFKTKEDINIAINLIQKSKYKISDISSKVYTRNPLGPFTTSTLQQVASSKLGFGASRTMQIAQRLYQGIDMEGDTVGLITYMRTDGTNISNEAVSDFRNYIKKSYGDKYLPDIPNNYSGKKAKNAQEAHEAIRPTDITRNPEILK

SEQ ID NO: 183148 - protein, 308 aa, Unknown
  Bacterial polypetide isolated from the Sargasso Sea
QQEANRKLRLSARETMRCAQGLYERGFITYMRTDSVHLSEQATRAARECVSSMYGKEYLSKSPRQFNSTARNAQEAHEAIRPAGEVFKTPKETNLTGRDLSLYDLIWKRTVASQMAEARLTMINAEISVGDGLFKSSGKSIDFAGFFRAYVEGSDDPSSSLEQQEIILPNLTTGTLLEVTNKESTFHETKPPARYTEAALVKVLEKEGIGRPSTYASIIGTIVDRGYANISSNTLSPTFTAFAVTALLEEHFPDLVDTTFTAKMESSLDEISSGNLEWLPYLETFYKGKNGLEVKVQKTEGDIDGKAY

SEQ ID NO: 183149 - protein, 266 aa, Unknown
  Bacterial polypetide isolated from the Sargasso Sea
RFLDRVVGFELSPLLWKKIARGLSAGRVQSVALRLLDERERLIQEFIPKEYWEISMNLLNSKDEKINFSLSRKKSEPLLTAEEAKQIEQLIETSNLSITEIVKTPTRVKPKAPFITSTLQQAASTKLSFNVKRTMRVAQKLYEAGHITYMRTDAPSLSKESIDDARNYINSSIGQDYLYETPRIYSGTENAQEAHEAIRPTSASVTAKDLEKATEEEVRLYELIWQQYIACQMKDAEYLSTSAKIILDQYTFTAKGREVVLMDTQK

SEQ ID NO: 183150 - protein, 287 aa, Unknown
  Bacterial polypetide isolated from the Sargasso Sea
IEGYLGSDYKVIASLGHIRDLPSSEGSVKPDEDFKMIWELGDKGKKQAKTLNEAVKNSESLILATDPDREGEAIAWHVLEVLQEKGSLADKKISRVTFNAITKKEINEAINNPREIDTEMVQAYLARRALDYLVGFTLSPVLWRKLPGARSAGRVQSVALRLICEREIEIESFIPQEYWSINGHFSYEDNDPFEAKLTHFDSKKLEQFDINNEDRSEEIKIAIQETNFKITDIQEKNVSRKPSPPFITSTLQMEASRKLNMTAKVTMMTAQKLYEAGLITYMRTDGV

SEQ ID NO: 183151 - protein, 143 aa, Unknown
  Bacterial polypetide isolated from the Sargasso Sea
MNLVIVESPAKAKTINKYLGDNYTVLASYGHIRDLPSKNGSVDPEQNFKMEWEVDNFSKKYLKEITDAAKDSSKIILATDPDREGEAIAWHVKEYLNEKKLLKDKEVERVVFNEITKKAVIFGIENPGQIEPLLVDAYMARRA

SEQ ID NO: 183152 - protein, 180 aa, Unknown
  Bacterial polypetide isolated from the Sargasso Sea
MNLVIVESPAKAKTINKYLGGDYTVLASYGHIRDLPSKNGSVDPEDKFKMIWEVDSFSKKYLKEITDAAKKSEKIILATDPDREGEAIAWHVKEYLDEKKLLKDKIVERVVFNEITKKAVTNGIDNPRKIEPNLVDAYMARRALDYLVGFNISPILWTKLPGSKSAGRVQSVALRLLTER

SEQ ID NO: 183153 - protein, 293 aa, Unknown
  Bacterial polypetide isolated from the Sargasso Sea
RRQVNDLLKTFSSEDWLVSKIEKKPSTRKPVPPFTTSTLQQEANRKLRLSARETMRCAQGLYERGFITYMRTDSVHLSEQATRAARECVSYMYGKEYLSNSPRQFNSTARNAQEAHEAIRPAGEVFKTPKETNLIGRDLSLYDLIWKRTVASQMAEARLTMINAEISVGDGLFKSSGKSIDFAGFFRAYVEGSDDPSSSLEQQEIILPNLKTGTRLEVTNKESTFHETKPPARYTEAALVKVLEKEGIGRPSTYASIIGTIVDRGYANISSNTLAPTFTAFAVTALLEEHFPD

SEQ ID NO: 183154 - protein, 283 aa, Unknown
  Bacterial polypetide isolated from the Sargasso Sea
KGGTTRTRLVVPKDLSPEEKARQKEINARKSLVRRMGVDPDNGWDANWQIIPEKEKVLKALKKAAKNVDNIYLATDLDREGEAIAWHLKEALGPQKYNYSRVRFNQITKDAIIESFSDPKEIDLNLVKAYRARRFLDKVIGFELSPLLWKKIARGLSAGRVQSVALRLLDERERSIQEFIPEEYWEISFSATTNNNETITFNLATKKTDPLLSKEKVETIKQQIESCNLSINEISKKPVKVKPKAPFITSTLQQSASTRLGFNVKRTMRVAQKLYEAGLITYM

SEQ ID NO: 183155 - protein, 295 aa, Unknown
  Bacterial polypetide isolated from the Sargasso Sea
NKIILATDPDREGEAIAWHVKEVLDQKKLLKDKKVERVVFNEITKKAVMKGIENPRDIEPLLVDAYMARRALDYLVGFNISPILWTKLPGSKSAGRVQSVALKLITEREHEIELFNPEEFWTLKVVFKDKNSNIITSNISQLERKKIEKFSFKNKEDINDAAQQIKKMKFSISDISSKIVSRNPSGPFTTSTLQQVSSGRLGLGASRTMQIAQKLYQGIEIDGETIGLITYMRTDGTNISEEAVSNFRDFIKNEYGNDYLPKNPLNYSGKKAKNAQEAHEAIRPTDIAKSPEKVK

SEQ ID NO: 183156 - protein, 172 aa, Unknown
  Bacterial polypetide isolated from the Sargasso Sea
MNLVIVESPAKAKTINKYLGDNYTVLASYGHIRDLPSKNGSVDPDQNFKMEWEVDSFSKKYLKEITDAAKDSSKIILATDPDREGEAIAWHVKEYLDEKKLLKDKEIERVVFNEITKKAVTHGIENPRQIEPLLVDAYMARRALDYLVGFNISPILWTKLPGSKSAGRVQSV

SEQ ID NO: 183157 - protein, 242 aa, Unknown
  Bacterial polypetide isolated from the Sargasso Sea
SKGPRQYSTKARNAQEAHEAIRPAGESFRTPGDTGLDGRDLAVYELIWKRTVASQMAEARLTMLSVDLSASEAAFRASGKRIDFPGFFRAYVEGSDDPDAALEGQEVLLPTLAVGDAPTPKQVEPLGHQTQPPARFSEASLVKMLEKEGIGRPSTYASIIGTIVDRGYSTMQGNALTPSFTAFAVTALLEEHFPDLVDTSFTARMETTLDEISHGKVQWLPYLEGFFKGNEGLENQVQLKEG

SEQ ID NO: 183158 - protein, 180 aa, Unknown
  Bacterial polypetide isolated from the Sargasso Sea
MYLVVVESPAKAKTINKYLGKDYKVLASYGHIRDLPSKNGSVDPDNNFQMLWEIDSFSKKYLKDITEAAKNSSKIILATDPDREGEAIAWHVKEVLDEKKLLKDKAIERVVFNEITKKAVTHGIDNPRQIEPLLVDAYMARRALDYLVGFNISPILWTKLPGSKSAGRVQSVALKLITER

SEQ ID NO: 183159 - protein, 287 aa, Unknown
  Bacterial polypetide isolated from the Sargasso Sea
KAGDFKLKARGRTLRFDGWTKVMPALRKGDEDRTLPVVNQGESLSLVELTPAQHFTKPPARFSEASLVKELEKRGIGRPSTYASIISTIQDRGYVRVENRRFYAEKMGEIVTDRLEENFRDLMNYDFTAQMEDRLDQVANHQAEWRQVLDHFFGDFTTQLETAEKDPEEGGMQPNPMVLTSIDCPTCGRQMGIRTASTGVFLGCSGYALPPKERCKTTINLVPENEVLNVLEGDDAETNALRAKRRCQKCGTAMDSYLIDPKRKLHVCGNNPTCDGYEIEEGEFRIK

SEQ ID NO: 183160 - protein, 259 aa, Unknown
  Bacterial polypetide isolated from the Sargasso Sea
MNLVIVESPAKAKTINKYLGSDYTVLASYGHIRDLPSKNGSVDPENDFKMIWEIDSFSKKYLKEITDSAKDSKKIILATDPDREGEAIAWHVKEFLKEKKLLKDKEVQRVVFNEITKKAVINGIDNPRKIEPQLVDAYMARRALDYLVGFNISPILWTKLPGSKSAGRVQSVALRLLTEREHEIEIFKPKEFWTLNVIFTNRKNEKINTAISHLDGNKIEKFSFKNKEDINNALSQIKNKKYNITDIKSKTYSRNPSGP

SEQ ID NO: 183161 - protein, 187 aa, Unknown
  Bacterial polypetide isolated from the Sargasso Sea
MNLVIVESPAKAKTINKYLGSNYTVLASYGHIRDLPSKNGSVDPENKFKMIWEIDSFSKKYLKDIVDVAKDSEKVILATDPDREGEAIAWHVKEYLDEKKLLKDKKIERVVFNEITKKAVTTGIENPRSIEPQLVNAYMARRALDYLVGFNISPILWTKLPGSKSAGRVQSVALRLLTEREHEIEIF

SEQ ID NO: 183162 - protein, 273 aa, Unknown
  Bacterial polypetide isolated from the Sargasso Sea
LLWKKIARGLSAGRVQSVALRLLDERERSIQEFVPEEFWEVNIDVLSTENEKVKFELNRKKSDPLLKKDDAELIKNQLNTHELKINEISKKPVKVKPKPPFITSTLQQSASTRLGFNVKRTMRVAQKLYEAGYITYMRTDAPSLSKDSINDARNYISEQLGENYLTNAPRIYSGNENAQEAHEAVRPTNTFLKSSDLLNLSEEEVKLYKLIWDRFVASQMPDAEYLSTSAKIKVNENIFVARGRELVFDGFTKVQKTSTKDEEMLPTLNEGET

SEQ ID NO: 183163 - protein, 266 aa, Unknown
  Bacterial polypetide isolated from the Sargasso Sea
VSDLRERPFTQNPPAPFITSTLQQEAGRKLRYSTQRTMQIAQRLYENGYITYMRTDSTNLSEQAINAARAQIKQMYGNEYLPASARRHKISAKAAQEAHEAIRPSGEIFRTPENIKNNLDQDAFQLYELIWKRTIASQMQNANGMRTQVRLNYTSPEYGELSFQSSGKVILFSGFLRAYVEGSDDPEAALDDQERILPTLQLEQELPVDASSPTSHETQAPNRWTEASLVRELEERGIGRPSTYASIIQNIQDRGYVWKKRIYIDP

SEQ ID NO: 183164 - protein, 304 aa, Unknown
  Bacterial polypetide isolated from the Sargasso Sea
KLEEFWTLSINFQDKNKSNITASISQFDGEKIEKFSFKNKEQIEKAIANIKNKKFNITDISSKIVSRNPSGPFTTSTLQQVASSRLGFGASRTMQIAQKLYQGIEIEGDTVGLITYMRTDGTNLSADAVSDFRNFIKKEYGNEYLPENPNNYSGKKAKNAQEAHEAIRPTDINRNPDSVKKYLSSDQQKLYSLIWSRALSSQMETAKFDRNTITIESEDNKTICKSSGSVLKFDGFLKVYSNQSKDDDEQILPEMSKGRINIEALIDEQHFTQPPPRYSEASLVKKLEELGIGRPSTYASIIQQ

SEQ ID NO: 183165 - protein, 295 aa, Unknown
  Bacterial polypetide isolated from the Sargasso Sea
AWHIIESTKLPESKIKRIIFNEISEKAIKAAISDSQNINKNLVNAQQARRILDRLIGYKLSPILSRKIQKGLSAGRVQSVAVKIICDREREIESFIPEEYWLIDASVTESNKNNTFSARLFAKDTVDNKYEVKSEKDAKAAQQSIESSPIIVEDIIKSRIKRNSPFPFITSTLQQEASRKLNWSAKKTMMIAQRLYEGLDINGESTGLITYMRTDSTRVSDSAIKEARAFITKKYHSDYLGFTKNPKNKAKSSIQDAHEAIRPVSTQFPPQSIQNILDTDYLKLYTLIGTDLSHL

SEQ ID NO: 183166 - protein, 293 aa, Unknown
  Bacterial polypetide isolated from the Sargasso Sea
LASYGHIRDLPSKNGSVDPEQDFKMEWEVDSFSKKYLKEITDAAKDSTKIILATDPDREGEAIAWHVKEYLNEKKLLKDKEIQRVVFNEITKKAVIHGIENPRQIEPLLVDAYMARRALDYLVGFNISPILWTKLPGSKSAGRVQSVALKLITEREHEIESFKPEEFWTLSVKFVDEKNQNITASISQLDNNKIEKFSFRTKDEINKAISNINKKKFSITDISSKVINRNPSGPFTTSTLQQTASSRLGFGASRTMQIAQKLYQGIEIEGETIGLITYMRTDGTNLSKDAVSF

SEQ ID NO: 183167 - protein, 295 aa, Unknown
  Bacterial polypetide isolated from the Sargasso Sea
IDVEGDTVGLITYMRTDGTQISKEAISDFRSFITKRHGKEYLPESANNYTGKKAKNAQEAHEAIRPTDVSREPSQMKKYLSTDQSKLYELIWNRAISSQMNPAEFDRKSITIESEDKKIGFKANGSTIKFDGYLKVYKFEEKDDDLKNILPEVKIGDKVSIKELMDDQHFTDPPPRYSEASLVKKMEELGIGRPSTYASIISVLSTRNYVELLNKRFHPTDRGKLLSAFLEKLFTKYVDYNFTADLENQLDEITSGKVDWVKVLDGFWKDFYSNVGKVKEKRTREVLDLLNESLG

SEQ ID NO: 183168 - protein, 296 aa, Unknown
  Bacterial polypetide isolated from the Sargasso Sea
MQIAQRLYQGVDIEGETTGLITYMRTDGTNISKEAIDDFRKFITDDFGDKYLPEAPNSYTGKKAKNAQEAHEAIRPTNISRKPSDIKKYVNADQFKLYELIWSRALSSQMTPAEFDRNTIIISSNDNKINFRASGSVVKFDGFLKVYQVQETDEDAKNILPEVKVGEEISILKLNDEQHFTDPPPRYSEASLVKKMEELGIGRPSTYASIISVLSTRNYVELINKRFNPTDRGKLISAFLEKLFSKYVDYNFTAELENQLDEITSGKIEWVQVLDNFWRDFYENVEKLKKRELEKY

SEQ ID NO: 183169 - protein, 270 aa, Unknown
  Bacterial polypetide isolated from the Sargasso Sea
MGETTGLITYMRTDGTNISKEAIDVFRKFIADDYGDKYLPEAPNNYTGKKAKNAQEAHEAIRPTNISRKPSDIKKYVNADQFKLYELIWSRALSSQMTPAEFDRNTIIISSKDNKINFRASGSVVKFDGFLKVYQVQENDEDAKRILPEVKVGEEINILKLNDEQHFTDPPPRYSEASLVKKMEELGIGRPSTYASIISVLSTRNYVELINKRFNPTDRGKLISAFLEKLFSKYVDYNFTADLENQLDEITSGKIEWVQVLENFWKDFYE

SEQ ID NO: 183170 - protein, 362 aa, Unknown
  Bacterial polypetide isolated from the Sargasso Sea
DFLVGFTLSPVLWRKLPGSKSAGRVQSVALRIISERELEIEKFVPQEYWSLQGEFRNKEDKVINSRLTFYNGNKVDKLDIKNENEATKIFNDIKNSTFTVGSITKKEAKRNPYPAFTTSTMQIESSRKLGLSASQTMRTAQRLYEGTEINGETTGLITYMRTDSVIMSNEAINQVRNFVTDNYGANYLPDSPRVYKSKAKNAQEAHECIRPTNINLTPKDIKQYITLEEFKLYEIIWQRAVSSQMASAILDQVAVDITNEEKKIVLRANGSTIKFPGMYRVYQEAKDDDKDEEKETILPIMSEGEILNLKEVEKTQHFTSPPPRYTEASLVKKLEELGIGRPSTYASIIKVLQDRDYVVLDK

SEQ ID NO: 183171 - protein, 400 aa, Unknown
  Bacterial polypetide isolated from the Sargasso Sea
MNLVIVESPAKAKTINKYLGTEYTVLASYGHIRDLPSKNGSVDPNDKFKMIWEVDSFSKKYLKEITDVAKESKKIILATDPDREGEAIAWHVKEFLEEKKILKDKKVERVVFNEITKKAVTNGIENPRDIQTHLVDAYMARRALDYLVGFNISPILWTKLPGSKSAGRVQSVALKLLTEREHEIEIFKPKEFWTLNVDFFTKDKTKIKSTPSQLDNKKIEKFSFKNKNEIINAINKFQDKKFKITDLTSKIFTRNPVGPFTTSTLQQSASSKLGFGASRTMQIAQRLYQGIDIDGETVGLITYMRTDGTNISKDAIEEFRKYIDKEFGKDYLPEVPLNYSGKKAKNAQEAHEAIRPTDIDKSPAFLKKYLSTDQLKLYNLIWARALSSQMESAKYLIVKQ

SEQ ID NO: 183172 - protein, 145 aa, Unknown
  Bacterial polypetide isolated from the Sargasso Sea
MNLVIVESPAKAKTINKYLGDNYKVLASYGHIRDLPSKNGSVDPDHNFRMEWEVDSFSKKYLKEITDAAKDSSKIILATDPDREGEAIAWHVKEYLNEKKLLKDKEIERVVFNEITKKAVIHGIENPRQIEPLLVDAYMARRALD

SEQ ID NO: 183173 - protein, 718 aa, Unknown
  Bacterial polypetide isolated from the Sargasso Sea
YLARRALDYLVGFNISPILWTKLPGSKSAGRVQSVALKLITEREKEIELFKPDEYWTLTSDFTNKNNKNIFSKLSLFNGEKIEKFSFKNKEEIQKAVDAINKTKFKITDVNTKVFRRNPLAPFTTSTLQQTASGRFGFGASRTMQIAQRLYQGVDIEGETTGLITYMRTDGTNISKEAIEDFRKFITDDYGDKYLPEAPNSYTGKKAKNAQEAHEAIRPTNISRKPSDIKKYVNADQYKLYELIWSRALSSQMTPAEFDRNTIIISSNDNQINFRASGSVVKFDGFLKVYQVQETDEDAKNILPEVKVGEEISILKLYDEQHFTDPPPRYSEASLVKKMEELGIGRPSTYASIISVLSTRNYVELINKRFNPTDRGKLISAFLEKLFSKYVDYNFTADLENQLDEITSGKIEWVQVLDNFWKDFYENVGKVKEKRTREVLDLLNESLGALIFERDDKDAIDRKCKLCSNGELSLKNSFRGGAFIGCSNYPECKFTRPLSKVKAAAQYNLAEPKLLGQNEKGKDIYLKNGRFGPYLQYEKEKDELETKKKKGRKKKNENEHLQNVSIPKGIDVDSVDLDKAKYLCSLPRVLGQHPENGQDITLNSGRFGPYLKCENKSARLENIEDLFSIGINRAITLIAEAKPGRISSSLIKDLGEHPEDKKPVRIMKGQYGPYIKYKSLNATIPEEKDPNDLTMEEALILIEKRKEYDKNKKKGRKK

SEQ ID NO: 183174 - protein, 701 aa, Unknown
  Bacterial polypetide isolated from the Sargasso Sea
KFCKESELLYLATDPDREGEAIAWHLMSDFNDKKLINDVDVKRVTFTEITSSAIKKAIESPREIDQDLVDAYLTRRILDHLIGFKVSPLLWRHISRAKSAGRVQSPTLRILCEKEDERDLHIAEEYWPFESSFDFLGTTFEAKLTKILERSINKEPLRDELEVNNLISELESASFKLKEVESKAQSSSPKPPFRTSTLQMSAASGLGFTADRTMQAAQKLYEGGLITYLRTDGISISTSPNTGEPFSEENPGPPPLQEIRNFISSNYESSFLSKEPRVYKSKVQNSQEAHEAIRPTDISKIPIDTSLSGDEEKLYTLIWNRTVASQMEVSKYERKTLVISSKDNKYEFRASSRKNIFKGFEILMGTEDEKVTLFPEGLEKGSELSLVSNKYEQKFTSPPNRYSEASLIKKMEEEGIGRPSTYATIVKGLRTKKYAYGAKSIIPSDLGRVLTSYLKKVFEEFFIETEFTARMEADLDKIASGNKNYEEVLDGFWAELQNYLNRKINDIEIGNKDEFKTRQVLDLLNEELGSVIFPKDDSGKNRNECPKCSSPISLKSGAWGYFVGCSECKWTKKPFEFNTTWETYRELPKDLGPHPDLGKPIYADLSVNGPCVWTLNEEDKKLFGTPDEDEFILDIGLNRAIELIDTSNAENILFIEVNSNLPIVLKNGRFGEYTEFDGFNKATKLKPEDKDPSPKVSYYEP

SEQ ID NO: 183175 - protein, 482 aa, Unknown
  Bacterial polypetide isolated from the Sargasso Sea
IKNSKYKISDISSKIYTRNPLGPFTTSTLQQTASSKLGFGASRTMQIAQRLYQGIDIEGDTVGLITYMRTDGTNISNDALTDFRDFIKKNYGDNYLPKEPNNYSGKKAKNAQEAHEAIRPTDISRSPDSMKKFLSTDQIKLYDLIWSRALSSQMEAAKFDRKTITIISTDNLNQFKCSGSTIKFDGFLKITRTDEDENDKILPDVNKDEVTADNFIDEQHFTQPPPRYSEASLVKKLEELGIGRPSTYASIISVISNRGYADIVNKRFFPTDRGKLLSAFLEKLFSKYVDYGFTAGLEEQLDDITSGKEEWIKVLNNFWKDFNINVSNVKEKRTREVLDLLNESLGELIFESDEKGKINRNCKLCNTGQLSLKNSFRGGAFIGCSNYPECKFTRPLSKSKANDQIALAEPKLIGQNDTGKDIFLKNGRFGPYLQYEMTEDETISKKKKKKKENENLRNVSIPKGIDINHIDLDKAKYLCHSQ

SEQ ID NO: 183176 - protein, 826 aa, Unknown
  Bacterial polypetide isolated from the Sargasso Sea
MDHTLVIVESPTKAKTIRKFLPSNYEVLASMGHVRDLPKGAAEIPAAVKKEKWSRIGVNTREDFGPLYIVPKDKKKVVKELKDALKGATKLLLATDEDREGESISWHLLQILKPKIPTKRMVFHEITKKAINKALDQTRELDMELVQAQETRRILDRLFGYELSPLLWKKVAPRLSAGRVQSVSVRLLVRRERERRSFKKASYWGIKASLVKDNVTFETKLFSLNGQRISNGSDFDEQTGKLKQGNKSLIIGKEKVNDLLKIFSSEDWLVSKIEKKPSTRKPVPPFTTSTLQQEANRKLRLSARETMRCAQGLYERGFITYMRTDSVHLSEQATKAARECVSSMYGKEYLSNSPRQFNSTARNAQEAHEAIRPAGELFKTPKETNLTGRDLSLYDLIWKRTVASQMAEARLTMINAEISVGDGLFKSSGKSIDFPGFFRAYVEGSDDPSSSLEQQEIILPNLTTGTFLEVTNKESTFHETKPPARYTEAALVKVLEKEGIGRPSTYASIIGTIVDRGYANISSNTLAPTFTAFAVTALLEEHFLDLVDTTFTAKMESSLDEISSGNLEWLPYLETFYKGKNGLEVKVQKTEGDIDGKAYRQVDFEDLPCVVRIGSNGPWLEGTKIDESGNEIQAKGNLPMDITPGDLDIKQVDQILSGPSDLGTDPKTGEKVFLRFGPYGPYVQLGNNDQDQAKPRRASLPKELKTDDLTLEDALVLLSLPRLLGVHPEGGVVEADRGRFGPYIKWIKNENESENRSLKKEDDVFTVDIKRALEILAMPKMGRGGQEVLKDFGKPKEFKEKIQILNGRYGVYLKCGKTNVSIAKDT

SEQ ID NO: 183177 - protein, 503 aa, Unknown
  Bacterial polypetide isolated from the Sargasso Sea
MNLVIVESPAKAKTINKYLGKDYLVLASYGHIRDLPSKNGSVDPENKFQMEWEIDSFSKKYLKEITNAAEESDKIILATDPDREGEAIAWHVKEVLDKKKLLKDKHLERVVFNEITKKAILDAIKNPREIHLPLVEAYLARRALDYLVGFNISPILWTKLPGSKSAGRVQSVALKLITEREKEIELFKPEEYWTLTSDFTNKDNKNIFSKLSLYNEEKIEKFSFKSKEEIQKAVDVINKTKFKIADVNTKVFRRNPLAPFTTSTLQQTASGRFGFGASRTMQIAQRLYQGIDIEGETTGLITYMRTDGTNISKEAIDDFRKFIIDDYGDKYLPEAPNSYTGKKAKNAQEAHEAIRPTNIKRKPTDIKKYVNADQFKLYELIWSRALSSQMTPAEFDRNTIIISSNDNKINFRASGSVVKFDGFLKVYQVQETDEDAKNILPEVKVGEEINILKLNDEQHFTDPPPRYSEASLVKKMEELGIGRPSTYASIISVLSTRNYVELI

SEQ ID NO: 183178 - protein, 550 aa, Unknown
  Bacterial polypetide isolated from the Sargasso Sea
WKVSNNKKSVIDDIKKYTKDADVIYFATDPDREGEAISKHLYDILEKAKFLKGKETHRVVFNEITKNAVIDALKNPRTISISQWDAYLARRTLDYLMGYDISEFLWKKVSRDARAGRVQSPALRLIVEREIKINEFDPQEYWNLSASVSNNDRNIEIELIEINGEKIKKDNITSINDSQSAGEIKSKIEKYKNVKVSNIKNGQRKTKPKAPFTTASLQQTSYTSLGLSVKQTSAIAQRLYQGMDIGSGQPVGLISYMRTDSTNLSKDALSDISSYRKENHPTLAEDQVRIYKGKSKNAQEAHEAIRPTSMSNTPSAVKKYLEENDYKLYDLIWKRTLASQMKDSISKTVSIDLSMENDFTFKYSGSYLEFPGFKEVYSFSDNDEKEKENKKILESLKINDELNLDSVNAEQKFTQPPSRYNQASLIQALEELGIGRPSTYVTIINKIMESNYVDPEKSNFQPTALAKVVYETLISHFRDDLVDYDFTARLEEDLDKIANGEKEYMECVEKTYKPFKENLDEKIKTVDISEQRELKDLGKHPETKRPVTVR

SEQ ID NO: 183179 - protein, 150 aa, Unknown
  Bacterial polypetide isolated from the Sargasso Sea
MNLVIVESPAKAKTINKYLGSNYTVLASYGHIRDLPSKNGSVDPENKFKMIWEVDAFSKKYLKEITDTAKDSEKIILATDPDREGEAIAWHVKEFLDEKKLLKDKKVERVVFNEITKKAVTNGIDNPRSIETHLVDAYMARRALDYLVGF

SEQ ID NO: 183180 - protein, 205 aa, Unknown
  Bacterial polypetide isolated from the Sargasso Sea
MAKSLVIVESPAKAKTINKYLGKNFIVKSSIGHVRDLPTKALGKVEPKKPAKELKTLSEEARQEYLRRHEYLKLVDRMGVDPEKDWKAHYQVLQGKEKVVNELKKLAKDADTIYLATDLDREGEAIAWHLQELLGKKDKTYQRVVFNEITKNAIQDAFSDPGELNISRVNAQQARRFLDRVVGFMVSPLLWKKLREASQQGAYHR

SEQ ID NO: 183181 - protein, 683 aa, Unknown
  Bacterial polypetide isolated from the Sargasso Sea
TEREHEIELFKPEEFWTLSINFQDKNKSKITASIFQLDGEKIEKFTFENKEEIEKAISNIKTKKFNITDISSKVVSRNPSGPFTTSTLQQAASSRLGFGASRTMQIAQKLYQGIEIEGDTVGLITYMRTDGTNLSADAITDFRNFIKKQYGNEYLPENPNNYSGKKAKNAQEAHEAIRPTDINRNPDSIKKYLSSDQQKLYSLIWSRALSSQMETAKFDRNTITIESEDGKTICKSSGSVLKFDGFLKVYSNQSKDDDEQILPEMSKGPINIEALIDEQHFTQPPPRYSEASLVKKLEELGIGRPSTYASIISTIANRGYAEIVNKRFFPTDRGKLISAFLEKLFSKYVDYNFTAGLEDQLDEITSGKESWLKVLEMFWKDFNSNVSEVKEKRTREVLDLLNESLGALIFDTDKEGNIVRKCQLCETGSLSLKNSFRGGAFIGCSNYPECKFTRPLSKAKAAAQSQLAEPKFLGKHENGNDIFLKNGRFGPYLQYEKVLEENIEEEKPKKRKKTKKKKPEVNELLKNVSIPKGIELESIDLDKAKFLCSLPKSLGINPENQKEITLNTGRFGPYLKCENKSARIENVEEIFSIGLNRAITLIAEAKPGRMSSSIIKDLGEHPEDKKPVRIMKGQYGPYIKYKSLNATIPEEKDPVELTMEEALILIEKRREYDKNKKVKKKKK

SEQ ID NO: 183182 - protein, 618 aa, Unknown
  Bacterial polypetide isolated from the Sargasso Sea
MDHTLVIVESPTKAKTIRKFLPSNYEVLASMGHVRDLPKGASEIPAAVKKEKWSRIGVNTGEDFEPLYIVPKDKKKVVRELREALKGATQLLLATDEDREGESISWHLMQILKPKIPTKRMVFHEITKKAINKALDQTREIDMELVQAQETRRILDRLFGYELSPLLWKKVAPRLSAGRVQSVSVRLLVRRERERRSFKKASYWGIKASLLKDNVTFETKLFSLNGQRISNGSDFDEQTGKLKHGNKSLIIGEDKVNDLLKAFSSEDWLVSKIEKKPSTRKPVPPFTTSTLQQEANRKLRLSARETMRCAQGLYERGFITYMRTDSVHLSEQATKAARECVSSMYGTEYLSSSPRQFNSTARNAQEAHEAIRPAGEVFRTPKETNLTGRDLSLYDLIWKRTVASQMAEARLTMINAEITVGNGLFKSSGKSIDFAGFFRAYVEGSDDPSSSLEQQEIILPNLTNGTCLEVTNKESTFHETKPPARYTEAALVKVLEKEGIGRPSTYASIIGTIVDRGYANISSNTLAPTFTAFAVTALLEEHFPDLVDTTFTAKMESSLDEISSGNLEWLPYLETFYKGKNGLEVKVQKTEGDIDGKAYRQVDFEDLPCVVRIGSNGP

SEQ ID NO: 183183 - protein, 392 aa, Unknown
  Bacterial polypetide isolated from the Sargasso Sea
MNLVIVESPAKAKTINKYLGDNYTVLASYGHIRDLPSKNGSVDPDQNFKMEWEVDSFSKKYLKEITDAAKDSSKIILATDPDREGEAIAWHVKEYLDEKKLLKDKEIERVVFNEITKKAVTHGIENPRQIEPLLVDAYMARRALDYLVGFNISPILWTKLPGSKSAGRVQSVALKLITEREHEIELFKPEEFWTLSINFQDKNKSNITASISQLDGEKIEKFSFKNKEEIEKAIDNIKNKKFNITDISSKVISRNPSGPFTTSTLQQVASSRLGFGASRTMQIAQKLYQGIEIEGDTVGLITYMRTDGTNLSADAVTDFRNFIKKQYGNEYLPENPNNYSGKKAKNAQEAHEAIRPTDINRNPDSIKKYLSSDQQKLYSLIWSRALSSQMET

SEQ ID NO: 183184 - protein, 528 aa, Unknown
  Bacterial polypetide isolated from the Sargasso Sea
KTILDKPVERVVFNEITKNAVLDAMKKPRKINSELVEAYLARRALDHLIGFSISPILWRKLPGSKSAGRVQSVALKLICEREIEIEKFNIEEYWSISSIFLNNNNENFLARLFILDSKKLAKMDIKNEDEANNALDKVRKSSFNITKIVSKRVKRNPLAPFTTSTLQQEASNKLGFGASRTMRIAQKLYEGINIGSDTTGLITYMRTDGVQLSSQAIEELREEIINRHGNNYIPQIPRVYKSKAANAQEAHEAIRPTSISRDPEDMSQYLDTEQLKLYELIWKRTISSQMQSAKLDETSADISNKDMSIVFRANGSQVSFPGFFIYRDREDDKILPKLLENDKVDLQKADGEQHFTQPPPRYTDASLIKKMEELGIGRPSTYASILQVLINRNYVEKEKGKHLPQERGRILTAFLNNFFGQYIEYDFTADLEKKLDKVSDGKLNYKNLLKEFWDGFKPHLNKMSDLERDKILEALENELSDLFFPNEDLNNDGQPNKICPTCSNGKLGLELGKYGAFIGCSNYPECKF

SEQ ID NO: 183185 - protein, 534 aa, Unknown
  Bacterial polypetide isolated from the Sargasso Sea
SKDEIQKAVDVINKTKFKIADVNTKLFRRNPLAPFTTSTLQQTASGRFGFGASRTMQIAQRLYQGIDIEGETTGLITYMRTDGTNISKEAIEDFRKHISDDFGDKYLPSAPNNYTGKKAKNAQEAHEAIRPTNIKRKPADIKKYVNADQFKLYELIWSRALSSQMTPAEFDRNTIIISSENKNINFRASGSIIKFDGFLKVYQVQETDEDAKNILPEVKVGEEISILKLNDEQHFTDPPPRYSEASLVKKMEELGIGRPSTYASIISVLSTRNYVELMNKRFHPTDRGKLISAFLEKLFSKYVDYNFTADLENQLDEITSGKIEWVKVLDNFWKDFYANVGKVKEKRTREVLDLLNESLGALIFERDEKDAIDRKCKLCTNGELSLKNSFRGGAFIGCSNYPECKFTRPLSKAKAAAQYNLAEPKLLGQNNNGKDIYLKNGRFGPYLQYEKEKDELELKKKKGRKKKNENDHLKNVSIPKGIDIDSVDLDKAKYLCSLPKVLGQHPENGHDITLNSGRFGPYLKCENKSARLEN

SEQ ID NO: 183186 - protein, 376 aa, Unknown
  Bacterial polypetide isolated from the Sargasso Sea
MNLVIVESPAKAKTINKYLGKDYLVLASYGHIRDLPSRNGSVDPENKFEMQWEIDSFSKKYLKEITNAAEDSDKIILATDPDREGEAIAWHVKKVLESKKLLKGKNLERVVFNEITKNAILEAIKNPREIHLPLVEAYLARRALDYLVGFNISPILWTKLPGSKSAGRVQSVALKLITEREKEIELFKPEEYWTLTSDFTNKDNKNILSKLSLFNGQKIERFTFKNKNEIDQAISIINKTKFTVNDVNTKVFRRNPLAPFTTSTLQQTASGKFGFGASRTMQIAQRLYQGIDIEGETTGLITYMRTDGTNISKEAIGEFRNLIKNDFGNEFLPAQPNSYTGKKAKNAQEAHEAIRPTDIKRKPLDIKKYVNTDQYK

SEQ ID NO: 183187 - protein, 878 aa, Unknown
  Bacterial polypetide isolated from the Sargasso Sea
MGKSLVIVESPAKAKTINKYLGKEFIVKSSVGHIRDLPTSSISDGTDKVKPAAEVKKMSPEEKARYKKMKDHQALVSRMGVNPEKGWAAKYQILPGKEKVVKELQALADSADQIYLATDLDREGEAIAWHLQEVIGGDPSRYQRVVFNEITKSAIQEAFSKPSSLDTNMVNAQQARRFLDRVVGFMVSPLLWKKVARGLSAGRVQSVAVRLVVERESEIKAFVPEEFWDVHAELNTPASEALRMEVVKYLDSAFEPTNEQQALAAVQALSSASFKVIAREDKATQSKPSAPFITSTLQQAASTRLGFGVKKTMMMAQRLYEAGHITYMRTDSTNLSQEALGSVREMIGKEYGAKYLPAEPIRYGSKEGAQEAHEAIRPSNVNVEAAALTDMERDAQRLYELIWRQFVSCQMTPAQYDATKLTVKAGDYELKATGRILRFDGWTRVQTAIKKKNEEDNTLPAVNEGDVLSLVELEPKQHFTKPPARYSEASLVKELEKRGIGRPSTYATIISTIQERGYVKVENRRFYAEKMGEIVSERLVNSFAELMSYDFTASMEQTLDDVAKGELDWKKVLDGFYADFTKQLEKAELAPEEGGMRLNQMVMTNIKCPTCGRPMGIRTGTTGVFLGCSGYELPPKERCKTTMNLTPGIEAISDSEDAETDALRAKHRCGICGTAMDSYLIDEKRKLHVCGNNPVCEGYEVEEGQFKIKGYEGPLIECDRCGHDMELKNGRFGKYFGCTNAECKNTRKLLKNGEAAPPKEDPIYLPELKCSKSDAHFVLRDGAAGIFLAASTFPKSRETRAPLVEELVKYRELLWPKYQYLADAPIADDDGNKAAVKFSRKTKEQYVATEVDGKATGWSAHYVSGKWVSESSAKKAKK

SEQ ID NO: 183188 - protein, 638 aa, Unknown
  Bacterial polypetide isolated from the Sargasso Sea
MNVLIVESPSKAKSINKYLGSDFKVLASVGHVRDLSAKNDAIDTENDFQMKWETSDRGKKVIKEITDAAKKSENLYLATDPDREGEAIAWHVEKLLRDNSSLSKLNIHRVTFNEITKNAVLDSLKEPREIDENLVNAYLARRALDFLVGFTLSPVLWRKLPGSKSAGRVQSVALRIISERELEIEKFIPQEYWSLQGEFRNKEDKIINSRLTVYDGNKVDKLDIKNESEATKIFNDIKNSTFTVGNITKKEARRNPYPAFTTSTMQIESSRKLGLSASQTMRTAQRLYEGTDIKGETTGLITYMRTDSVVMSKEAINQVRGFVTDNYGANYLPEVPRVYKSKAKNAQEAHECIRPTNIYLTPKDIKQYITLEEYKLYEIIWQRAVSSQMASAVLDQVAVDITNEDKKIVLRANGSTIKFPGMYKVYQEAKDDDKDEEKETILPAISEGESLNFKEVEKTQHFTSPPPRYTEASLVKKLEELGIGRPSTYASIIKVLQDRDYVILDKKRFNPHDRGRIVSIFLEKYFNQYVEYDFTADLENQLDEISDGKLDWKEVLRKFWETFKQLCDETVGKSNREVIDVLDEALGPHFFPPNGSDEKRKCPTCDNGRLGIKVGKFGGFIGCSNYPDCKYTVQFNQL

SEQ ID NO: 183189 - protein, 731 aa, Unknown
  Bacterial polypetide isolated from the Sargasso Sea
MPKNLVIVESATKAKTIEKILGQDFKVVSCVGHISDLPVKELGVDVKNDFKPKYVIPTEKKPIIRDLKKYVKDSDKVWLASDEDREGEAIAWHLYENLDLVNKDYERIVFHEITKNAILNALETPRDINFNLVNAQQARRVLDRLVGYELSPVLWRKVKAGLSAGRVQSVSVRLIVEKEREIKNFTSKSSYKLIGVFENEQGVKLKAELNEKYYSVKEVKNFLEKNYNSIFNISFVDKKPAKKSPTPPFTTSTLQQEASRKLGFGVTRTMSTAQKLYEAGLITYMRTDSVTISNEAKSSIVQKIESKYGEDYVNLRDYKNKNKSAQEAHEAVRPTDINLEEITSDYDQQRLYHLIWKRTISSQMSDAQIERTVVNIKSDSYNEFFVARGEVIKFDGFLRVYNEGTDDEIEEEKGVLPALSINENLNLLSISSRESFSRPPSRFTEASLVKKLEELGIGRPATYATTISTIQNRGYIAKGVNEGLDRNYNLIEFSKNGIKESQLKEKTGSNKGKLVPTDIGMIVNDFLVNNFNNILDYGFTAEVEKNFDKIATGDQDWTDIIKQFYSDFHENVNEVKDNAERQSGEKILGSDPNSGRVVKVRLGKFGPIAQIGTIDEEEKPLFASLTKDQQLDTISLEEALELFKFPKEIGNYKGETVTVNNGRYGPYIKFSTKSISISNGIDPHSVDLNLAIELIDEKLKSEEPIHTYNDKPVTKGKGRFGPFIKWNEMVY

SEQ ID NO: 183190 - protein, 856 aa, Unknown
  Bacterial polypetide isolated from the Sargasso Sea
MNLVIVESPAKAKTINKYLGSEFNVLASFGHVRDLPSKNGSVDPENNFAFEWEVSSTSKKHMKEIYDASADASTLYLATDPDREGEAIAWHIVELLNKKKLLKDKTVKRVVFSEITKNAVKNGIANPRDIDTDLVDAYLARRALDYLFGFNLSPVLWRKLPGAKSAGRVQSVALRLICERELAIESFEPEEYWKIKGNVKFEDGFNIEANLLSVEGKKVEKFSFKSEDDAKKIVNLFSDNKFEIIDITKKPASRNPEPPFSTSTLQQTASSIYGFGASRTMQIAQKLFQGIEINGETVGLITYMRTDSTDISKEAIETYRNYLKKNFENGYCPNEVRTYKSKKAKNAQEAHEGIRPTDIELTPDQVSKYLDTDSLKLYSLIWKRALASQMSSAVFERTAIDISSEKNELKLRANGSVVKFDGFLNIYSEFKVKSDEQIKKDENEEDEDEVTLPAISKGMKIESVSPTETQHFTLPPPRYSEASLVKKLEELGIGRPSTYASIISVLKTRNYVELDKNRFVPVDRAILITAFLKGFFSKYIDYEFTAGMEESLDEITSGKIKWTEFLENFWKNFSTNVGDVTDLRITNILDNLNEILKSHIFEQKEESNGEKAISRSCPSENCEGELSLKVSRFGAFVGCSNYPDCKFTRPISHKKIKEAFEDTILGKDAESEQDIKLLNGRFGPYVQLGDVVEKEKPKRASVPKGISPSSIDLEKAQYLLSLPREIGGHPETGEIITVNYGRYGGYINCGDKNASLEDNSEIFDIGINRAVSLLANAKPGRLKSSSEIKTLGEHPDDKKPIKVMKGKFGPYIKYKSTNATIPDNIDPEEILIEEAIDLIEKKLEKTGKKKKKSSKK

SEQ ID NO: 183191 - protein, 513 aa, Unknown
  Bacterial polypetide isolated from the Sargasso Sea
MNLVIVESPAKAKTINKYLGDNYKVLASYGHIRDLPSKNGSVDPEQDFKMEWEVDSFSKKYLKEITDAAKDSSKIILATDPDREGEAIAWHVKEYLNEKKLLKDKEIQRVVFNEITKKAVIHGIENPRQIEPLLVDAYMARRALDYLVGFNISPILWTKLPGSKSAGRVQSVALKLITEREHQIESFKPEEFWTLSVKFVDEKNQNITASISQLDNNKIEKFSFRTKDEINKAISNINKKKFSITDISSKVVNRNPSGPFTTSTLQQTASSRLGFGASRTMQIAQKLYQGIEIEGETIGLITYMRTDGTNLSKDAVSDFRSYIKKEIGNEYLPENALNYSGKKAKNAQEAHEAIRPTDIIRTPQSVKKYLGTDQNKLYELIWSRALSSQMETAKFDRNTITIISDNNDTVCKASGSVLKFDGFLKIYNNHSKDDDENILPVMSKGPINIGALIDEQHFTQPPPRYSEASLVKKLEELGIGRPSTYASIISTIANRGYAEILNKRFFPTDRGKL

SEQ ID NO: 183192 - protein, 888 aa, Unknown
  Bacterial polypetide isolated from the Sargasso Sea
MSKPLVIVESPTKVKTISKILGDGYIVKSSVGHIRDLPRNTKSIPSAFKKEDILWGAVKPENYENIYVIPEDRKKIVNELKGLADKAPEVYLATDDDREGEAIAYHLKEALELKKEPKRIKFNEITNTAVLNAIKNPETIDIGKFKSYEARRTLDRMIGYEISPKLRDLGGAFISTGRVQGPAIRLIVEREEERLSFVKSKYFEINASCKSQGFEFAANLKTIGGTKIASSKDFDKDGKKISKDRKYLDEDQSRDIVNILRNSLAKVSNIKESQRSGKPPKPFKTTSLQTSSKNNLGFQPRKTMSIAQRLYQEGLITYMRTDSIRLSDVAIKASREYISSNFSSEHLPSEPNFYGDSKNAQAAHEAIRPSGESFTTPQELLKKYKEDSDEFKLYELIFNVTIASQMSEARGITKTIDLEVIDNIFGSIVLGISGTTWTFGGYRDIAKNLTEQSQELPDLQKGDKVEITKSDYEKKYTNPPNRYSSTSLINKLEELGIGRPSTYVSIIESITSVFINSESSLKPRIIALAMINKFMKPYFDPYINYKFSKEMEDKLDEILESNSPEEAKVNFLNESYKKIQDHVRKYGEPDPVNLTSYPLPFDTRYVVKTGRVQDKIAYPYLQRDDNFYIGLPPDITIEEINENYIYELEKLQEANLLKERKVCDCAECGTAIYIKLGPSGGYYFQHGLKEKGVRQPKCIYRNMIGPIFEDEDPDSLNCDDAIKRFNLSTKNPRFVCEEDGWSYMTAVGPYGGFAIKQKNREVFDFDELAKMKKNEILELINSEKYQSVLNLITFNPVKIPKSLTKELLLEKIKESFFIDEKIIKKLSKDELVNLAKLLEIVFYRGRFRMKVDDATKNNLINKITIEKKNKPLDTPQKALTIQSDEILD

SEQ ID NO: 183193 - protein, 337 aa, Unknown
  Bacterial polypetide isolated from the Sargasso Sea
MNLVIVESPAKAKTINKYLGNDYTVLASYGHIRDLPSKNGSVDPENEFKMIWEIDSFSKKYLKEISDVAKDSKKIILATDPDREGEAIAWHVKEFLNEKKLLKDKKIERVVFNEITKKAVTNGIENPREIESDLVNAYMARRALDYLVGFNISPILWTKLPGSKSAGRVQSVALRLLTEREHEIEIFKPEEFWSLKVNFKTNDGNLITSNIFQIDKKKIEKFSFRNKNDINQAIEKIKNTKYKITDITSKIYSRNPSGPFTTSTLQQSASSKLGFGASRTMQIAQRLYQGIEIEGETKGLITYMRTDGTNISKEALPIFRNFITDNFGNDYLPDEPN

SEQ ID NO: 183194 - protein, 394 aa, Unknown
  Bacterial polypetide isolated from the Sargasso Sea
LREIIGGDDSRYKRVVFNEITKTAIQEAFAQPSELNIHRVNAQQARRFLDRVVGYMVSPLLWKKLARGLSAGRVQSVAVRLIVDKEREIKAFVPVEFWDLNADLLTADKSDLRMEVVSRNGVDFKPVTQAETFAAVAALEGVDYKVVNREDKPTGSKPSAPFITSTLQQAASTRLSFGVKKTMMMAQRLYEAGYITYMRTDSTNLSKEAVEAVREYIGEQYGAAYLPSDPNLYGAKANAQEAHEAIRPSSVLVTAEMLEGMEPDAMRLYDLIWRQFVACQMTPAQYDSSTLTVKAGEFELKARGRTLRFAGWTKALPPMGRKGEDSQLPAVTVGEILKLVKLDPRQHFTKPPARFTEAALVRELEKRGIGRPSTYASIISTIVDRGYVRVESRG

SEQ ID NO: 183195 - protein, 125 aa, Unknown
  Bacterial polypetide isolated from the Sargasso Sea
MNLVIVESPAKAKTINKYLGKDFTVLASYGHIRDLPSKNGSVDPDNQFKMIWEIDSFSKKYLKEITDVAKESDKIILATDPDREGEAIAWHVKEFLDEKKLLKGKKIERVVFNEITKKAVTNGIE

SEQ ID NO: 183196 - protein, 374 aa, Unknown
  Bacterial polypetide isolated from the Sargasso Sea
MSQKSLIVVESPSKAKTIEQYLESKYEVIACVGHVKDLPSNKIGIDIENDFEMTLDVLPNRKDFIKELKKKSQSAERVYIASDPDREGEAIAAHLASEIPKEKVERVEFTEITKAGIKQGMRESHSLNDNLVNAQKTRRIIDRLVGYKVSPVLWATLQKNMNFVSTTLSAGRVQSACVKILIERDRKRQKYLKTEYYDLKANLNDDQSETSFAANLNKVGNKNIISSNDFDSDTGKQTNPNALILSKKEAENLASKLEKGSWIVSSVNKKPRTSNPKPPFTTSTLQQEAARKLRFSAKNTMRVAQQLYENGFITYMRTDSTNLSEEAINGSRNIISELFGDEYLPQTSNSYDTKVKNAQEAHEAIRPAHKIFLS

SEQ ID NO: 183197 - protein, 451 aa, Unknown
  Bacterial polypetide isolated from the Sargasso Sea
MSKLVIVESPAKAKTIQKYLGGGYAVLPTIGHIRELPKKDAIDPGNGYSMKYIVSPGKEDAVKKIKDEAKNVEQVILATDPDREGEAIAWHVADIISNAKFEQPDIKRAVFYEISEKAVKDAVSNPGEIAMDLVQSQETRRALDRHFGFTLSPLLWRLFPSNNHSAGRVQSPALRMIVEREREIEAFVPQEYWTISAKLEKDGEYDAKLSAFKQEPVKKFTFDSTTLVEKASKDLEEQCKKGLVAKSISKKTIKRSPREPFRTSVLQQQASNRFGFTPKRTMQVAQSLYAREGGGLITYIRTDSIEIDEGKVPAVRSQVASMFGEDFVQPRNYKNKKEAKNIQEAHGAITPVDISLVPADAKKILKDDEFKLYQLIWQRTVASQMKDAIFERTSIEFVPTGDESLATFSFSDQELVFSGYLEATQEEVTNNKPPLINENDAIGFKELVKTQ

SEQ ID NO: 183198 - protein, 392 aa, Unknown
  Bacterial polypetide isolated from the Sargasso Sea
MSKSLVIVESPAKAKTISKYLGSEYIVKSSVGHIRDLPKGKSKAKRQNSIPKDASPEEKVRLKKEQERRRIIRRMGVNPDDGWTANYEIIPDKEKVIKDLRKASKEVEKVYLATDLDREGEAIAWHLKEALGKNKFEYHRVRFNEITKSSILESFSDPKEIDQDLVNAQQARRFLDRVVGFELSPLLWKKIARGLSAGRVQSVALRLLCEREKLISQFQPEEFWEVSATLKDFNHEEILFKLNRKKSDPLLKENEAKKIEELVGSSSLEISEITKKPTTVKPKAPFITSTLQQAASSKLGFGVSRTMRVAQKLYEAGRITYMRTDAPSLSNDSIEDARLFIKDTLADEYLTEKPRIYSGKENAQEAHEAIRPTSASLTPEKLTGHSEEEVKL

SEQ ID NO: 183199 - protein, 868 aa, Unknown
  Bacterial polypetide isolated from the Sargasso Sea
MDHTLVIVESPTKAKTIRKFLPPNYEVLASMGHVRDLPKGAAEIPAAVKKEKWSRIGVNTTEDFEPLYIVPKDKKKVVKELKDALKGANQLLLATDEDREGESISWHLMQILKPKIPTKRMVFHEITKKAINKALDQTREIDMELVQAQETRRILDRLFGYELSPLLWKKVAPRLSAGRVQSVSVRLLVRRERERRSFKKASYWGIKASLVKDNITFETKLFSLNGQRISNGSDFDEQTGKLKEGNKSLIIGEEQVNDLLKTFSSEDWLVSKIEKKPSTRKPVPPFTTSTLQQEANRKLRLSARETMRCAQGLYERGFITYMRTDSVHLSEQATRAARECVSSMYGKEYLSNSPRQFNSTARNAQEAHEAIRPAGEVFKTPKETNLTGRDLSLYDLIWKRTVASQMAEARLTMINAEISVGDGLFKSSGKSIDFAGFFRAYVEGSDDPSSSLEQQEIILPNLTTGTCLKVTNKESTFHETKPPARYTEAALVKVLEKEGIGRPSTYASIIGTIVDRGYANISSNTLAPTFTAFAVTALLEEHFPDLVDTTFTAKMESSLDEISSGNLEWLPYLETFYKGKNGLEVKVQKTEGDIDGKAYRQVDFEDLPCVVRIGSNGPWLEGTKIDESGNEIQAKGNLPMDITPGDLDIKQVDQILSGPSDLGTDPKTGEKVFLRFGPYGPYVQLGNNDQDKAKPRRASLPKELKTDDLTLDEALVLLSLPRLLGVHPEGGVVEADRGRFGPYIKWIKNESESENRSLKKEDDVFTVDIKRALEILAMPKMGRGGQEVLKDFGKPKEFKEKIQILNGRYGVYLKCGKTNVSIAKDTDIEKFTIDEAVSLLEEKLKDKKGAILKKTKISNKKTTRKKKS

SEQ ID NO: 183200 - protein, 746 aa, Unknown
  Bacterial polypetide isolated from the Sargasso Sea
MDHTLVIVESPTKAKTIRKFLPSNYEVLASMGHVRDLPKGAAEIPAAVKKEKWSRIGVNTTEDFEPLYIVPKDKKKVVKELKDALKGATQLLLATDEDREGESISWHLLQILKPKIPTKRMVFHEITKKAINKALDQTREIDMELVQAQETRRILDRLFGYELSPLLWKKVAPRLSAGRVQSVSVRLLVRRERERRSFKKATYWGIKASLVKDNVTFETKLFSLNGQRISNGSDFDEQTGKLKQGNKSLIIGEEKVNELLKIFSSEDWLVSKIEKKPSTRKPVPPFTTSTLQQEANRKLRLSARETMRCAQGLYERGFITYMRTDSVHLSEQATKAARECVSSMYGKEYLSNSPRQFNSTARNAQEAHEAIRPAGEIFKTPKETNLTGRDLSLYDLIWKRTVASQMAEARLTMINAEISVGDGLFKSSGKSIDFPGFFRAYVEGSDDPSSSLEQQEIILPNLTIGTCLEVTNKESTFHETKPPARYTEAALVKVLEKEGIGRPSTYASIIGTIVDRGYANISSNTLAPTFTAFAVTALLEEHFPDLVDTTFTAKMESSLDEISSGNLEWLPYLETFYKGKNGLEVKVQKTEGDIDGKAYRQVDFEDLPCVVRIGSNGPWLEGTKIDESGNEIQAKGNLPMDITPGDLDKKQVDQILSGPSDLGTDPKTGEKVFLRFGPYGPYVQLGNNDQDKAKPRRASLPKELKTDDLTLDEALVLLSLPRLLGAHPEGGVVEADRGRFGPYIKW

SEQ ID NO: 183201 - protein, 358 aa, Unknown
  Bacterial polypetide isolated from the Sargasso Sea
MPPVPNTLVIVESPTKARTIRGFLPRTFRVEASMGHVRDLPNNASEIPASHKAEKWAKTGVNTEKDFEPLYVVPKDKKKIVKELKDALKVADELLLATDEDREGESISWHLLQLLNPKVPVKRMVFHEITEEAIKRALGQTRELNMELVHAQETRRILDRLVGYTVSPLLWKKVAWGLSAGRVQSVAVRLLVQRERARRAFRSGSYWDLKAQLKHEGISFEAKLSHLAGERIATGGDFDESTGAIKAGTKVKLLSEADAQGLLKAIDGKTWSVAEVEEKPTTRRPAPPFTTSTLQQEANRKLRLSAREAMRTAQGLYERGYITYMRTDSVHLSEQAITAARSCVSDKYGADHLSPQPR

SEQ ID NO: 183202 - protein, 349 aa, Unknown
  Bacterial polypetide isolated from the Sargasso Sea
MNLVIVESPAKAKTINKYLGKDYLVLASYGHIRDLPSKNGSVDPENKFQMEWEIDSFSKKYLKEITNAAEDSDKIILATDPDREGEAIAWHVKEVLEKKKLLKDKNLERVVFNEITKKAILDAIKNPRQIHLPLVEAYLARRALDYLVGFNISPILWTKLPGSKSAGRVQSVALKLITEREKEIELFKPDEYWTLTSNFTNKNNKNIFSKLSLFNGEKIEKFSFKNKEKIQKAVDVINKTKFKITDVNTKVFRRNPLAPFTTSTLQQTASGRFGFGASRTMQIAQRLYQGVDIEGETTGLITYMRTDGTNISKEAIEDFRKFITDDYGDKYLPGAPNSYTGKKAKNAQE

SEQ ID NO: 183203 - protein, 259 aa, Unknown
  Bacterial polypetide isolated from the Sargasso Sea
MAKSLVIVESPAKAKTISKYLGSDFIVESSVGHIRDLPKKASPNTKRASIPKDISPEEKLRLKTINDRNRLIRRMGIDPDNGWTADWQIIPEKEKVIKSLKKAAKSVEHIYLATDLDREGEAIAWHLKEALGPEKYEYSRVRFNQITKSSIVDSFNDPKDIDLDLVKAYRARRFLDKVIGFELSPLLWKKIARGLSAGRVQSVALRVLDERERLIQEFIPEEFWEVSMNLLKHQLSIPFYLNRKKSDPLLKEDEAKKIE

SEQ ID NO: 183204 - protein, 781 aa, Unknown
  Bacterial polypetide isolated from the Sargasso Sea
MANKSLVIVESPSKAKTIGKYLGSEYLVKSSVGHVRRLTSGKKAIDPKDWSVSYEIDPKKTKVVQDLKKSAKGIDEVFLATDLDREGEAIAWHLKEILGKNHNYKRVRFNEITKSAIKKAFEDPTDLNEGLIDAQKTRRILDRIVGYDLSSFLWKKIGSYGKLSAGRVQSVAVKLVVEKEREIKAFSPEEYWEIEVKVKHEERNITFKLNVKKSDLKLSNIDEAKQISEKLLNNEIEITDNDKTKRKIPIKPPFITSTLQQTSSSMLGFSLSKTMKLAQDLYAAGYISYMRTDSPNLSILSQNNCKQYLLEKFGDTYSEPRNFSAKTSNSQEAHEAIRPTDINLEADQITMSADHVKLYKLIWQRFAASQMPQPEIETNAIKAVCDGLVFETSLSSVTFDGFYKVMPPPKSSYVDYDLSSLSIGLSKKIDEVEKSQHFTKPPSRYSEASLVKELEKRGIGRPSTYQEIITNIQDRGYVKSVSKRLFATKIANLISDRLNKGFSQIMDYGFTADMERNLDEIASGNLVWRNLLEKFSDEFEQAKEQAEDLMERNKPIDTQIICDCGRSKRMQLRTNQSGQFLGCEAFILEGDEQCKNTLSLLDEELFSDSDDKEAESIFNKTKCPICNSAMDGYIIDSKRKLEICSNSPICPGTLLVEGEFIKPKNDDEEFIDCHKCDGQMELKLGRFGKYFACQKCDATRQIMKNGELKPIFMDPIKLESLRCEKCDDFYLLRDSLKGLFLAASQFPKNRETRAITVNELKPVTDKLPEKYSHFAKAPEVD

SEQ ID NO: 183205 - protein, 230 aa, Unknown
  Bacterial polypetide isolated from the Sargasso Sea
MNLVIVESPAKAKTINKYLGGNYTVLASYGHIRDLPSKNGSVDPEDKFKMIWEVDSFSKKYLKEITDAAKKSEKIILATDPDREGEAIAWHVREYLDEKKLLKDKKIERVVFNEITKKAVTNGIDNPRNIETNLVDAYMARRALDYLVGFNISPILWTKLPGSKSAGRVQSVALRLLTEREHEIEQFKPVEFWSLNVNFKNAKGDILNSNIILLNNSKIEKFSFKNKEDI

SEQ ID NO: 183206 - protein, 411 aa, Unknown
  Bacterial polypetide isolated from the Sargasso Sea
MADKSLVIVESPAKAKTISKYLGKEYIVKSSVGHVRKLPKGEKAIDRKDWSISYEIDPKKTKVVKELKSAAKGVEDIFLATDLDREGESIAWHLKEILGKKHNYIRVRFNEITKTAIKDAFDNPSKLNEELINAQKARRILDRVVGYDLSGMLWKKIGSYGKLSAGRVQSVAVRLVVEREIGIKAFTPEEYWEIEIEIKHDDRNIRFKLNTKKSNLEIKNESKALELANNFQGADLEITENEKKKRKVSVRPPFITSTMQQSASSFLGYSLKKTNKLAQDLYTGGYITYIRTDSPSISVLAQNNCKQYLLDTYGEAYSTPRNFASKSSNSQEAHEAIRPTDVTFKTDELSLSEDHKKLYKLIWDRFVASQMPQPELTVNSIKAKIDNNIFETSLSSISFDGFYKVMPPSKS

SEQ ID NO: 183207 - protein, 556 aa, Unknown
  Bacterial polypetide isolated from the Sargasso Sea
MPKNLVIVESATKAKTIEKILGQDFKVVSCVGHISDLPVKELGVDVENDFKPKYIIPTEKKPVIKDLKKYVSESDKVWLASDEDREGEAIAWHLYENLNLTNKDYDRIVFHEITKNAILAALDSPREINYNLVNAQQARRVLDRLVGYELSPVLWRKVKTGLSAGRVQSVSVRLIVEKEREIKNFLTNSTYKSIGTFKNSRGVNLKAELNNKFDSADEVKAFLQKNINSTYTVSNVEKKPAKKSPTPPFTTSTLQQEASRKLGFGVTRTMSTAQKLYEAGLITYMRTDSVTISEEAKSSILSKIESKYGDSYVNLRNYKNKNKSAQEAHEAVRPTDISVEDISSDYDQQRLYQLIWRRTISSQMSDAQIERTVVNINSNSFDEIFIARGEVIKFDGFLRVYIEGTDDETQEEKDTLPQLNVNENLDLINIISRESFSRPPSRYTEASLVKKLEELGIGRPATYATTISTIQNRGYVSKGDNEGQERIYKSIELKNGNITEITSTEKTGSNKGKLVPTDIGIIVNDFLVDNFNNILDYGFTAEVEKSFDKIAEGNQN

SEQ ID NO: 183208 - protein, 731 aa, Unknown
  Bacterial polypetide isolated from the Sargasso Sea
KNFERVVFNAVTKDKVLDAINNPRSIDSDLVEAYKARRSLDYLIGFKISPILWTKLSGVKSAGRVQSVALKIICEREIEIENFKSQRYWSITSSMSAKNGQNFTASLVSINENKLNKFDIKSEKEAKAIINNLNNSIFTVSEVKKTSILRKPQPPFTTSTLQQEASKRLGFNPTRTMQVAQKLYEGIDSQKIEGGLITYMRTDGVQIEDNVINEIRNNIEFIFGAEQVPQNKNIYQTKSKNAQESHEAIRPTSIRNTPEEIKAHLSDEQFKLYELIWKRTMASQMANAKFERTSITIKAIDNLGQNNLFRASGEHRLEAGYQVLFDDKPNDGVEKDLNEEKLSNQNVFGILENESISCKKLMDNAHDTEPPPRFNPASLIKLLEDLGIGRPSTYASILSVLTERNYTKLEQKRFTPTSNGRLLTVFLENYYPDYVKYDFTADLEEKLDQISNGDFTRISLLEDFYANLDMKTKNVKDVERIEVMENLVDTLAPHIFGQHSENPRLCPDCSGGKITLKSFESGSFLCCSNYPDCNFQHGLGKNDAIATQKQVIAIDPMTGNEITLQSGRYGPYLEVEDSSIENDKPKRVSIPRNIKVEDLSDELALQLISLPKSIGNHPETNQEITGAIGRYGPYIKHENTYVSIKLEDLFAIGLNRAVTLIDEKNKVSPSSPNQILGQYPKTKNDIILSSGRYGPYLKYKKKNYSVGKNISVETLNLEEAIKIIDLKDKKN

SEQ ID NO: 183209 - protein, 878 aa, Unknown
  Bacterial polypetide isolated from the Sargasso Sea
MGKSLVIVESPAKAKTINKYLGKEFIVKSSVGHIRDLPTSSSSDGNEKVKSAAEVKKMSPEEKARYKKVKDHQALVSRMGVNPEKGWAAKYQILPGKEKVVKELQALADSADQIYLATDLDREGEAIAWHLQEVIGGDPSRYQRVVFNEITKTAIQEAFSKPSALDTNMVNAQQARRFLDRVVGFMVSPLLWKKVARGLSAGRVQSVAVRLVVERESEIKAFVPEEFWDVHAQLNTPASEALRMEVVKYLDSAFEPTNEQQALAAVQALSSASFKVIAREDKATQSKPSAPFITSTLQQAASTRLGFGVKKTMMMAQRLYEAGHITYMRTDSTNLSQEALDSVREMIGKEYGAKYLPADPIRYGSKEGAQEAHEAIRPSNVNVEAAALTDMERDAQRLYELIWRQFVSCQMTPAQYDATKLTVKAGDYELKATGRILRFDGWTRVQTALKKKNEEDNTLPSVNEGDLLSLVELEPKQHFTKPPARYSEASLVKELEKRGIGRPSTYATIISTIQERGYVKVENRRFYAEKMGEIVSERLVGSFAELMSYDFTASMEQTLDDVASGELDWKKVLDGFYADFTKQLEKAELAPEEGGMRLNQMVMTNIKCPTCGRPMGIRTGTTGVFLGCSGYELPPKERCKTTMNLTPGIEAISDSEDAETDALRAKHRCGICGTAMDSYLIDEKRKLHVCGNNPICEGYEVEEGQFKIKGYEGPLIECDRCGHDMELKNGRFGKYFGCTNEECKNTRKLLKNGEAAPPKEDPIYLPELKCSKSDAHFVLRDGAAGIFLAASTFPKSRETRAPLVEELVKYRELLWPKYQYLADAPIADDEGNKAAVKFSRKTKEQYVATEVDGKATGWSAHYVNGKWVTESTAKKAKK

SEQ ID NO: 183210 - protein, 446 aa, Unknown
  Bacterial polypetide isolated from the Sargasso Sea
REVVFDGFTRIVKSKSDDPDANLLPPLAVNQQLTLKNLENKQKYTKPPARFSEAALVKELEKKGIGRPSTYANIISTIQDRGYVEVQNRRFFVKKIGMIVTDRLVSSFDDIMDYSFTANFENELDRIANGELNWKDVLNSYYAAFQDDLYSAMDEENGMVPNLPTMTNINCPECKKNKLTIRNASNGVFLGCAGYSLPGDEQCKKTLNLISGDEAVSVDDQEEAEHLIAKRRCPKCDTSMDNYLLDENHKLHVCSNNPDCDGFEVEEGTFKIKGYDGPTLSCHKCGSEMQLKTGRFGKYFGCMNDNCGATRALQRNGEPKPIVMEPIITEIPCIKFEDIYLLRDSMKGLFLAASKYPKNRETRAPSVEEFNQAVTEETLLDACKYLEDQGKHTHLLDAPKKDIDGNTYVIRYNKVEDTHYLASEKDGKKTGNTATHNGDKWVEVIK

SEQ ID NO: 183211 - protein, 557 aa, Unknown
  Bacterial polypetide isolated from the Sargasso Sea
MNSLVIVESGAKAEKIKSFLNKSFPDENWSVEACVGHVRDLAEKEDAVDPNDWKNLKWEFSSKGKKVMKGLRKLCKESDALYLATDPDREGEAIAWHILNDFEEKKLLEKPTVHRITFNEITPSAVESAVKSPRDIDYNLVNAYLARRILDHLIGFKVSPLLWRHVSRAKSAGRVQSPTLRIICEKENERDRHIPDEYWPFSATFDYYGSSFEATLNKISDINIKKGLKDEEEVSRTKIDLDASNFLLTKIETKLQTSNPQPPFRTSSMIASANSQFGMSAKQTTQAAQSLFLAGHITYPRTDNISIAGSGIDDQDKYLASPLEEIRNYISDNFDQTFLSNEVRRYKNKLTTAQMAHEAIRPAIISVKPSDLDLPTNEERLYRLIWNRTVASQMESSKYERKSLTISSQDKNFEFTASSRKNIFAGFEVLSPSEENNITEFPDGLEEGSELKVIDMQAEQKFSSPPNRYSEASLIKKMEEEGIGRPSTYATILEGLKAKKYIYGGKSMIPSDLGRILTAYLKKVFEDFFIETKFTANLEATLDEIASGNEEYEKVLN

SEQ ID NO: 183212 - protein, 607 aa, Unknown
  Bacterial polypetide isolated from the Sargasso Sea
VESTTKGKKTLKEIRELSKDSEGIYLASDPDREGEAIAWHILDHLKDKKLMEGRQIHRISFNEITPSAIKYAVENPRDIDQFLVEAYLARRVLDHLIGFKVSPLLWRHVPRAKSAGRVQSPTLRMICAREDEIDAFCPEEFWPLKVNFKTKECTFSSDLISQNRADLKKVPIISEIDALNLKKEIESSKFFIKEIKDKEVSYSPKAPFRTSTLQQAASSKLFFNPDRTMQVAQSLYESGLITYMRTDGIGISSEVVNEIRSLISSEFGENYLPDSPKVYKSKAANAQEAHEPIRPTDIRKKPEDNSGLNQDQQNLYNLIWRRTVASQLQNSRYLRKTILIEDQDKKFQLRTSGREIIFDGFEKVLKDETDTEESQKLKGIYDDSLLDITDVITEQKFTSPPRRFSEASIIKNMEDEGIGRPSTYANTVKNLRDRKYTFGAKSINPSDLGRILVSYLSKAYKSFFIEIDFTAELEKSLDQVSSGSMLWTKVLDDFYAKLLEHISKIEEFRTREVLDMLNEQIGHRAFPKNIKGEVIVDCPKCANEISIKHGRWGFFVGCGECQWTKPVFEKSIKFETYAQLPKDLGAHPDTGEPVYADISINGPCIWT

SEQ ID NO: 183213 - protein, 416 aa, Unknown
  Bacterial polypetide isolated from the Sargasso Sea
MSKTLVIVESPAKAKTISKYLGSEYIVKSSVGHIRDLPKGKSKKPLQRNTIPKDLPEDEKRRLKQINERKRLIRRMGIDPDNGWAANYEIIPEKEKVIKELKKAAKSVDSIFLATDLDREGEAIAWHLKEALGADKFNYSRVRFNQITKDAILESFEDPKDIDSSLVEAQQARRFLDRVVGFELSPLLWAKIARNLSAGRVQSVALRLLVEREHSIQKFKPEEFWEISFKAKNDENTPIEFNLNRKKSEPLLQAEEAKKIEELINSSDLLVNEVTQKPVKSKPKPPFITSTLQQAASTKLGFNVKRTMRTAQKLYENGLITYMRTDAPALSPESIKDARMYIETNLGEKYLTNAPRIYSSNENAQEAHEAIRPTIASTKSESLISSTDEEKRLYELIWQPFIGSQLPDAEYLATMQ

SEQ ID NO: 183214 - protein, 230 aa, Unknown
  Bacterial polypetide isolated from the Sargasso Sea
MNLVIVESPAKAKTINKYLGADYTVLASYGHIRDLPSKNGSVDPENSFKMIWEVDSFSKKYLKEITDTAKNSDKIILATDPDREGEAIAWHVKEFLDEKKLLKDKKVERVVFNEITKKAVTNGIDNPRNIENELVDAYMARRALDYLVGFNISPILWTKLPGSKSAGRVQSVALRLLTEREHEIEVFQPKEFWTLNVNFFTEDNLIINTNINQLDGKKIDKFSFKNKVGN

SEQ ID NO: 183215 - protein, 374 aa, Unknown
  Bacterial polypetide isolated from the Sargasso Sea
MERVVFNEITKKAILDAIKNPRQIHLPLVEAYLARRALDYLVGFNISPILWTKLPGSKSAGRVQSVALKLITEREKEIELFKPDEYWTLTSDFTNKNNKNIFSKLSLFNGEKIEKFSFKNKKEIQKAVDVINKTKFKIIDVNTKVFRRNPLAPFTTSTLQQTASGRFGFGASRTMQIAQRLYQGVDIEGETTGLITYMRTDGTNISKEAIDDFRKFITDDYGDKYLPEAPNSYSGKKAKNAQEAHEAIRPTNISRKPSDIKKYVNADQFKLYELIWSRALSSQMMPAEFDRNTIIISSNDSKINFRASGSVVKFDGFLKVYQVQETDEDAKNILPEVKVGEEISILKLHDEQHFTDPPPRYSEASLVKKMEELG

SEQ ID NO: 183216 - protein, 733 aa, Unknown
  Bacterial polypetide isolated from the Sargasso Sea
RQIEPLLVDAYMARRALDYLVGFNISPILWTKLPGSKSAGRVQSVALKLITEREHEIELFNPEEFWTLSLKFQDEKKNSITASIYQLDGKKIEKFTFRKKEDIEKAISGLKNKKFNISDISSKIVNRNPSGPFTTSTLQQVASSRLGFGASRTMQIAQKLYQGIEIEGDTVGLITYMRTDGTNLSADAISDFRNYIKKSYGNEYIPEKANNYSGKKAKNAQEAHEAIRPTDINRSPEAVKKYLSTDQNKLYNLIWSRALSSQMVSAKFDRNTITIETEDKNTVCKTSGSVLKFDGFLKVYKNPNSEDDDEILPEVKKGPINIESFLDEQHFTQPPPRYSEASLVKKLEELGIGRPSTYASIISTISNRGYAEITNKRFFPTDRGKLISAFLEKLFSKYVDYNFTAGLEDQLDEITTGKESWINVLELFWKDFNNNVSEVKEKRTREVLDLLNESLGTLIFDKDDSGNVVRKCQLCDTGSLSLKNSFRGGAFIGCSNYPECKFTRPLSKAKAAAQAQLAEPKFLGKHDNGNDIFLKNGRFGPYLQYEKLLESIEKENKKKKKKTKKAKKDLNELLKNISIPKGIELDSIDIDKARFLCSLPKSLGINPDNQKEIFLNTGRFGPYLKCENKSARLENVEEIFSIGLNRAITLIADAKPGRMSSSIIKDLGEHPEDKKPVRIMKGQYGPYIKYKSLNATIPEEKDPTELNMEEALILIEKRREYDKNKKTKKKKKK

SEQ ID NO: 183217 - protein, 426 aa, Unknown
  Bacterial polypetide isolated from the Sargasso Sea
GSVDPENKFKMIWEVDSFSKKYLKEITDVAKDSDKIILATDPDREGEAIAWHVKEFLDEKKILKDKKIERVVFNEITKKAVINGIENPRSLEGQLVDAYMARRALDYLVGFNISPILWTKLPGSKSAGRVQSVALRLLTEREHEIEVFNPEEFWTINVNFITSSKNILTSLISELNGEKIEKFSFRNKEDINNAISKIKEKKYSIKDITSKIYTRNPLGPFTTSTLQQTASSKLGFGASRTMQIAQRLYQGIEIDGDTKGLITYMRTDGTNISKEAIPLFRKYIEENYGDNYLPEQANNYSGKKAKNAQEAHEAIRPTEIKNSPESIKKYLSTDQYKLYDLIWSRALSSQMQPAKFDRKTILITSEDGKNVLKSSGSTVKFDGFLKLQKVDENDDEKILPEVSKGLIDIKDFNDEQHFTQPPPRFS

SEQ ID NO: 183218 - protein, 368 aa, Unknown
  Bacterial polypetide isolated from the Sargasso Sea
MESGSWKISDVQEKVKKSNPKPPFTTSTLQQEASRKLRFSARKTMRAAQGLYEQGFITYMRTDSTALSDEGMKASRSEILDRFGKEYLPEKGNIYSTKVKNAQEAHEAIRPSGIKFKSIDEVKKSTDDDGAKLYDLILKRTLASQMKSAKINQVTATILNQKSEFRANGKTILFPGYMAAYVESNDKRSGVAEDKETVLPKLEANQSLECNSLNSDEHSTKPPARFTEASLVKELEEKGIGRPSTFANIIDTIVRRTYVNRERSKLTPTFLGLAVTQLLENHFNSLVDDKFTATMEDGLDAISRGELESLPFMKEFYFGSDSQSGLVNMLDDKVDIGKACSVQLEDKEDSIEIRVGQYGPFVRQGENQ

SEQ ID NO: 183219 - protein, 622 aa, Unknown
  Bacterial polypetide isolated from the Sargasso Sea
MNVLIVESPSKAKSINKYLGSDFKVLASVGHVRDLSAKNDAIDTENDFQMKWETSDRGKKVIKEITDVAKKSENLYLATDPDREGEAIAWHVEKLLRDNSSLSKLNIHRVTFNEITKNAVLDSLKEPREIDENLVNAYLARRALDFLVGFTLSPVLWRKLPGSKSAGRVQSVALRIISERELEIEKFIPQEYWSLQGEFRNKEDKIINSRLTVYDGNKVDKLDIKNESEATKIFNDIKNSTFTVGNITKKEARRNPYPAFTTSTMQIESSRKLGLSASQTMRTAQRLYEGTDIKGETTGLITYMRTDSVVMSKEAINQVRGFVTDNYGANYLPEAPRVYKSKAKNAQEAHECIRPTNIYLTPKDIKQYITLEEYKLYEIIWQRAVSSQMASAVLDQVAVDITNEDKKIVLRANGSTIKFPGMYKVYQEAKDDDKDEEKETILPAMSEGESLNFQEVEKTQHFTSPPPRYTEASLVKKLEELGIGRPSTYASIIKVLQDRDYVILDKKRFNPHDRGRIVSIFLEKYFNQYVEYDFTADLENQLDEISDGKLDWKEVLRKFWETFKQLCDETVGKSNREVIDVLDEALGPHFFPPNGSNEKRKCPTCDNGRLGIKVGKFGGFIG

SEQ ID NO: 183220 - protein, 369 aa, Unknown
  Bacterial polypetide isolated from the Sargasso Sea
MNLVIVESPAKAKTINKYLGDDYKVLASYGHIRDLPSKNGSVDPDQDFKMEWEVDSFSKKYLKEITDAAKDSSKIILATDPDREGEAIAWHVKEYLNEKKLLKDKEIERVVFNEITKKAVIHGIENPRQIEPHLVDAYMARRALDYLVGFNISPILWTKLPGSKSAGRVQSVALKLITEREHEIESFKPEEFWTLSINFTDQNNKTITASISQLDNNKIEKFSFRNKVEINKAIESINKKKFNIADISSKVVNRNPSGPFTTSTLQQTASNRLGFGASRTMQIAQKLYQGIEIEGELTGLITYMRTDGTNLSKDAVSTFRDYIQKEIGNEYLPKDALNYSGKKAKNAQEAHEAIRPTDIIRTPQSVKKY

SEQ ID NO: 183221 - protein, 625 aa, Unknown
  Bacterial polypetide isolated from the Sargasso Sea
NIKTKKFNITDISSKVVSRNPSGPFTTSTLQQVASSRLGFGASRTMQIAQKLYQGIEIEGDTVGLITYMRTDGTNLSAEAVSDFRNFIKKEYGNGYLPENPNNYSGKKAKNAQEAHEAIRPTDINRNPDSLKKYLSSDQQKLYSLIWSRALSSQMETAKFDRNTITIESEDKKTICKSSGSVLKFDGFLKIYSNQSKDDDEQILPEMTKGPINIEALIDEQHFTQPPPRYSEASLVKKLEELGIGRPSTYASIISTIANRGYAEILNKRFFPTDRGKLISAFLEKLFSKYVDYNFTAGLEDQLDEITSGKESWLKVLEMFWKDFNNNVSEVKEKRTREVLDLLNESLGALIFDTDKEGKIVRKCQLCNTGSLSLKNSFRGGAFIGCSNYPECKFTRPLSKAKAAAQSKLSEPKFLGKHENGNDIFLKNGRFGPYLQYEKVLEENIEEEKPKKRKKTKKKKTEVNELLKNISIPKGIELESIDLEKAKFLCSLPKSLGINPENQKEITLNTGRFGPYLKCENKSARIENVDEIFSIGLNRAIALIAEAKPGRMSSSIIKDLGEHPEDKKPVRIMKGQYGPYIKYKSLNATIPEEKDPVELTMEEALILIEKRREYDKNKKLKKRKK

SEQ ID NO: 183222 - protein, 516 aa, Unknown
  Bacterial polypetide isolated from the Sargasso Sea
VVEREKEIKAFSPQEYWELEVSIRHDERDITFKLNTKKSGLEINSKEEAEKIAAAFQGNEIEITSNEKTKRKIAVKPPFITSTLQQTSSSMLGFSLSKTMKLAQDLYTGGYISYMRTDSPNISMLAQNNCKQYLLDTYGEAYSAPKNFAAKASNSQEAHEAIRPTDVTFKAEELSLSQDHKKLYNLIWSRFVASQMPQPEIIVNSIKAKKETNMFETSVSSISFDGFYKVMPPGKNSGYVDYDLESLSVGLMKEVNKVEKSQHFTKPPSRYSEASLVKELEKRGIGRPSTYQEIITNIQDRGYVKSENKRLYATKIANLISDRLIKSFNNIMDYGFTANMEKSLDDVAEGKESWKKLLEDFYAEFDKAKKVAAEGMERNKPILTEVKCEECNSDRKMHLRTNQNGQFLGCEGYLEDGDKQCKKTYSLLSDELFTDNDDKEAESIFNKAKCDLCGSSMDGYIIDETKKLLICANSPICSGTKFEIGNFIKPKNGEEELIDCHKCDSKMELKLGRFGK

SEQ ID NO: 183223 - protein, 733 aa, Unknown
  Bacterial polypetide isolated from the Sargasso Sea
MPVVVVESPAKAKTINKYLGSDYTVLASFGHVRDLPAKDGSVDPDKGFDMKWEIGADSKKHVKAIADALKKDNELILATDPDREGEAISWHLEETLRNKRVINSDTPVSRVVFNAITKSAVSEAMANPREIDAPLVHAYLARRALDYLVGFNLSPVLWRKLPGARSAGRVQSVCLRLIVEREIEIEAFKPKEYWSVKASLKTPRGQVFDGKLINFAGTKLDKYDLKSSSEAELAAQAITTRDLIVASVESKPTSRNPFAPFMTSTLQQEAGRKYGMGARQTMQAAQRLYEAGHITYMRTDGIDMAPEAVTSTREAIRQRYGDQFLPASPRFYKNKAKNAQEAHECIRPTSISKDAKQLKLSDADQFKLYDLIWKRTISCQMESAKLERTSVDIQSPDKEVTLRATGQVVLFEGFLKVYEESRDDVEQSDDENRLPQMSKGENIEKLSIDPEQHFTQPPPRYTEASLVKKMEELGIGRPSTYANIVTTIQDREYVRKEKNRLFPEDKGRIVTIFLLNFFKRYVEFDFTAGLENQLDSVSAGKGNYKELLGQFWDDFSEAISETSELRITEVLDVLDDALAPQLYPAKEDGSDPRRCPKCGNGQLHLKSSRTGGFVGCGNYPECNFTRPISGEPDETAERLLGEDNGDKIFLKNGRYGPYIQRGEASEENKKPPRASLPKGWSPSDIELEKALKLLSLPREIGPHPEDGQIIEAGIGRYGPFVRHGRTYANLKDP

SEQ ID NO: 183224 - protein, 708 aa, Unknown
  Bacterial polypetide isolated from the Sargasso Sea
MILYIAEKPSLGRAIADVLPKPHKKGDGFIEDAQGNCVSWCVGHLLEQAEPDAYNPEFKSWKFEHLPIVPEKWQLKPKVATRSQLTVLKKLVKQADTIVNAGDPDREGQLLVDEVIAYLGVTGDKLQQTQRLLISDLNPQAVKRALSQLRSNREFIPLSTSALARSRADWLYGMNMTRAYTIQGKKVGYQGVLSVGRVQTPLLGLIVRRDEEIARFQSKPFYEVLAHLVTDKQQSFTAKWQPSEACLPYMDEEGRVLAKGLAQNVVRRITDKPAKVTQLSTKDKQQNPPLPYSLSALQIDAAKRFGMSAKDVLDTCQSLYERHKLITYPRSDSRYLPTEQHGLASSVLAAIMGGGPELVAHAEAPNPRLKSKAWDDKKVDAHHAIIPTEKQPNLGSLSQRERQLYLHIARQYLAQFYPAYCYSETAVEVTIEGGLFKTKARQDKSLGWKQLFAREADEHKESTGRESLKNTDDKSTDKDAEDEVFCGILPPLALGQILHCNQGELVEKQTQPPKAFTDATLLSAMTGINRYVTDPEIRKILKETDGLGTEATRAGIIELLFKRGFIQRQGKSIVATEVGKGLINSLPLSATTPDMTALWEASLNGICHKEISYQGFMQPLLGTLNHLIENAGAQLPSALNGLKGQGFKRAAKKSVYRKAGARGAAGGKKAGTGAKKGNARNSAEASSTSTTAKPTVPRRRTSKATAQA

SEQ ID NO: 183225 - protein, 201 aa, Unknown
  Bacterial polypetide isolated from the Sargasso Sea
MNLVIVESPAKAKTINKYLGDEYTVLASYGHIRDLPSKNGSVSPEEKFKMIWEIDSFSKKYLKEITDVAKISKKIILATDPDREGEAIAWHVKEYLNEKKLLKDKTVERVVFNEITKKAVTNGIDNPRNIESNLVDAYMARRALDYLVGFNISPILWTKLPGSKSAGRVQSVALRLLTEREHEIELFKPRGIWTLNVVFKT

SEQ ID NO: 183226 - protein, 872 aa, Unknown
  Bacterial polypetide isolated from the Sargasso Sea
MSKSLVIVESPAKAKTISKYLGSEYIVQSSVGHIRDLPKKGTGTSKRSSIPKNISPEEKARLKAVNDRNRLIRRMGIDPDNGWKADWQIIPEKEKVIKSLKKAAKNVDNIYLATDLDREGEAIAWHLKEALGSDKYNYSRVRFNQITKDAILESFSDPKEIDLNLVKAYRARRFLDKVIGFELSPLLWKKIARGLSAGRVQSVALRLLDEKERSIQEFIPEEFWEIYLYGSTDKNEKIKFNLLTKKNDPLLNQNEVEEIKRQIESTELVINEIVKKPVKIKPKAPFITSTLQQSASTRLGFNVKRTMRVAQKLYEGGLITYMRTDAPSLSKESINEARNFVNDNLGENYLTNSPRIYSGSENAQEAHEAIRPTNSFLTPKDVINLSEEESRLYSLIWERFIASQLPDAEYLSTSAKVYVGEKIFVAKGRELVFDGFTRVLKTSSKEEDILPSLQEGQLISVDRVELEQKFTKPPARYSEAALVRELEKKGIGRPSTYANIISTIQDRGYVQIENKRFFVKKIGHIVAERLIESFHDIMDYDFTANLENSLDEVANGEADWRNVLDNFYKSFQNDLISASDEDSGMRPGNIPTTTDIVCVCGKTNMVIRNSSNGVFLGCSGYQNEGNDKCKETLNLISGDEAVSVDDSEEAENLLIKKRCPKCDTSMDNYLIDEFRKLHVCGKNPDCNGYLVEDGKFKIKGYDGPTLECHKCGSEMQLKTGRFGKYFGCLNDNCGATRALQRNGEPKPITMEPIEMPDLKCIKCEDHYLLRDSMKGLFLAASQYPKNRETRAPKVSEINKLHNEIVEACRFLPNKEKHMYLLEAPENDVDGNPYIIRYNRTDDVHYLASEKDGKKTKWTATYSDGEWIQNLKS

SEQ ID NO: 183227 - protein, 418 aa, Unknown
  Bacterial polypetide isolated from the Sargasso Sea
MPTDHTLVIVESPTKAKTIRGFLPKDFQVLASMGHIRDLPNNASEIPAKHKGEKWATIGVNTTADFDPLYVVPKDKKKIVKELKQSLKGASELLLATDEDREGESISWHLMNVLDPKIPVKRMVFHEITKEAISKALSKTRAIDMELVHAQETRRILDRLVGYTLSPLLWKKVSWGLSAGRVQSVAVRLLVLRERARRAFKSGSYWDLKAKLEKEGSEFEVKMTSIGGKRIATGSDFDESTGLLKSGRNVILLKEDESKELAKNLTTDKWKVVNVEEKPSIRKPVPPFTTSTLQQEANRKLRLSARETMRCAQGLYERGFITYMRTDSVHLSDQAINASRNCVESKYGVEYLSKKPRQFSNKTRNAQEAHEAIRPSGESFKTPKESNLQGRDLSLYELIWKRTVASQMADARLTMLGV

SEQ ID NO: 183228 - protein, 839 aa, Unknown
  Bacterial polypetide isolated from the Sargasso Sea
MSQKSVIIVESPSKAKTISKYLDDQYEVVACVGHVKDLPRGSLGVDVDNKFQMELVVLDDKKDFFKQLASKAKSAPEIILATDPDREGEAIASHIASEVPDSKISRVQFTEITNFGVKNGMEHKVNIDENLVEAQRTRRIIDRLVGYKISKVLWITLQKNMNFVKQSLSAGRVQSAALKIIIDRERKRAKFKKVTYFGLSAKLLTSKKEALNAKLFIMDSKRIAKGQDFDQESGTLKKDGLIALSGSQAKALVKEINPGPWVVTNIEEKPKTSNPKPPFTTSTLQQEASRKLKFSTRMTMSTAQRLYEAGLITYMRTDSINLSNEAISASRDVIKKDFGSNYLPDEPRQYKGKVKNAQEAHEAIRPAGRQFKTIKDIKDSMGANESSLYELIWKRTIASQMKSAKLKQTSITIKNQNTEFRANGQVILFAGYMEVYVEDGDDPKSPNINKENILPELKENDHLSCENLSIDESTTKPPARFTEASLVKEMEADGIGRPSTYSAIINKILQKDYVRNNKGSLTPTFLAFAVTQLLENHFTSLVDAKFTAEMEDSLDAIARGEQESLPFMKEFYFGSESDNGLLAMLDEKIDIPKACIIPLNGDEKEPIIARVGNYGPYIQKGDLRRNIPDILAPGDITIEKAMEILNHAPEKEDKELGPDPETGQIILLKVGPYGPYVQLGDTKTRKSIPKNVDLDSVNIEYALSLLSLPRNIGEHPESKEPIFADYGRYGPYIKMGKQNASLRGDETPLDITLEKAVELLANRNKKSSTLRSLGSHPDSNEEIVVKDGRYGPYVSDGKINASLNNSFEPDTITLEQATELINEKRAKGPTKRKRKKKKK

SEQ ID NO: 183229 - protein, 619 aa, Unknown
  Bacterial polypetide isolated from the Sargasso Sea
QEDVKLIRDKINDNQLSINEIIKKPVKVKPKPPFITSTLQQSASTRLGFNVKRTMRVAQKLYEAGYITYMRTDAPSLSKDSINDARNFINENLGENYLTNAPRIYSSTENAQEAHEAVRPTNTFLRSSDLINLSEEEVKLYKLIWERFVASQMPDAEYLSTSAKTFVDEHIFVAKGRELVFDGFTKVLKTSSKEEDILPSLNEGDSLTVENINLEQKYTKPPSRFSEAALVRELEKKGIGRPSTYANIISTIQDRGYVEIQNKRFFVKKIGHIVAERLLESFDDIMDYDFTANLENSLDKVANGNADWRNVLDNFYESFQKDLHIASDESTGMRPGNIPIETNISCPCGKAFMVIRNSSNGVFLGCSGYQNIGDEKCKETINLISGDEAISIDDNEEAENLLIKKRCPKCGTSMDNYLMDESRKLHVCGKNPDCDGYLVEEGQFRIRGYDGPTLECHKCGSDMQLKTGRFGKYFQCQNDNCKATRALQRNGEPKPLTMEPIELPNLKCLKCEDHYLLRDSMKGLFLAASQYPKNRETRAPKVSEIKDLSNEIVQACRFLPDKNKHEYLLSAPVYDSEGNPYVIRYNRNEDVHYVASEKDGKKTKWTAAYTNGEWLETKK

SEQ ID NO: 183230 - protein, 353 aa, Unknown
  Bacterial polypetide isolated from the Sargasso Sea
MTNVVVVESPAKAKTINKYLGSDFRVLATVGHIRDLIGRDGSVKPDSDFEMDWEVFPDSQKQIKEIANALNEADNLYLATDPDREGEAISWHLKEILKEKNLLSDVKVQRVVFNEVTEAAVLDAFNNPRDLDNHLVEAYLARRALDHLVGFKLSPVLWRKLPGNKSAGRVQSVALRLICERELDIEKFDPREYWSVLVNLENSEKKSFSAKLTHLAGKKLGDYDLGNEELAKKAVASIESQPLFVLKVEKKQVRDYPKAPFTTSTLQQAAANKLYFTAKKTMSVAQSLYQGVNINGETLGLITYMRTDGVSMSAEAITSCRDEIKSQYGKEYLPDSHNIYKVKAKNAQEAHEA

SEQ ID NO: 183231 - protein, 617 aa, Unknown
  Bacterial polypetide isolated from the Sargasso Sea
MKNLLIVESPTKIKSIEKFLGKDYKVLASVGHVRDLMPSSRKGIDVEDNYAPVWKITKEKKIVMDEIKKASKEAETVYFATDPDREGEAISKHIYDILDKAKLLNGKNVHRVTFNEITKTAVTEALENPREISSDLWHAYLARRTLDYLMGYDISEFLWKKVSRLARGGRVQSPALRLIVEREKEIDKFVPIEFWILSLNACKNAECIDAELVSIDGEKVKNKNITNIENETRASELKKAIEESKTITIKSVKESERKLKPKSPFTTASLQQTAYSSLGFSVKQTSSVAQRLYQGVALDGDEVAGLISYMRTDSTNLSDECLKDINSFLDKNHPDLAYGEVRKYQKKIKNAQEAHEAIRPTQIDLTPDKIKGFLDDQEFKLYELIWKRTVASQMKDAVYNQVSMELELNNKYLFKYSGSYLKDYGFKKIYDLSDNSQKEDNKKILEKLKTNDVLDIKEVKTEQKFTQPPPRYNQASLIQALEELGIGRPSTYVTIISKILDSNYVDPEKNNFQPTALAKVVCDTLIKHFGNDLVDFEFTARLENYLDEIANGEKETINCIKDTYEPFRANLENKLETVDISELRELKDLGVHPDTGRPVTVRLTKYGPTIQMGTRED

SEQ ID NO: 183232 - protein, 573 aa, Unknown
  Bacterial polypetide isolated from the Sargasso Sea
MDRVVGYDLSGMLWKKIGSYGKLSAGRVQSVAVRLVVEREIGIKAFTPEEYWEIEIEIKHDDRNIRFKLNTKKSNLEIKNESKALELANNFQGADLEITENEKKKRKVSVRPPFITSTMQQSASSFLGYSLKKTNKLAQDLYTGGYITYIRTDSPSISVLAQNNCKQYLLDTYGEAYSTPRNFASKSSNSQEAHEAIRPTDVTFKTDELSLSEDHKKLYKLIWDRFVASQMPQPELTVNSIKAKIDNNIFETSLSSISFDGFYKVMPPSKSSGYVDYKLTGLDVGINKTIELVDKSQHFTKPPSRYSEASLVKELEKKGIGRPSTYQETITTIQDRGYVRSENKRLYATKIANLVTDRLQNSFKNIMDYGFTAEMEKNLDKVAEGEEDWKKLLEDFNKVFEDAKSKADESMERNPPIDTDVECPCGKGKRMHLRTNHNGQFLGCEGYLLEGDEQCKKTSSLISVDLFSDDDDKEAESIFNKTKCDLCGSTMDGFIIDENKKLHICSNSPICPGTKFEKGQFIKPKNADEELIDCHKCDAKMEMKLGRFGKYFSCQDECGATRQIMKNGELKPI

SEQ ID NO: 183233 - protein, 124 aa, Unknown
  Bacterial polypetide isolated from the Sargasso Sea
MNLVIVESPAKAKTINKYLGDEYKVLASYGHIRDLPSKNGSVDPDQDFKMEWEVDSFSKKYLKEITDAAKDSSKIILATDPDREGEAIAWHVKEYLNEKKLLKDKEIERVVFNEITKKAVIQGN

SEQ ID NO: 183234 - protein, 575 aa, Unknown
  Bacterial polypetide isolated from the Sargasso Sea
SNIEEKIKNSNPKPPFTTSTLQQEAARKLRSSARKTMRTAQRLYENGFITYMRTDSTFLSDEGVKGSQNEIISMFGKEYLPDQPKVYKTKVKNAQEAHEAIRPAGINFASVEQVKNTIDEDAAKLYDLIRKRTLASQMKSAKIKQIAISIENQQSLFRANGKKIIFPGYMAAYVESTDKRNGVTEDQETILPDMTKGQSLNCDELVSDEHFTKPPARFTEASLVKELEAQGIGRPSTFANIIDTIVYRTYVQRDRGKLTPTFLGVAVTQLLENHFTELVNTQFTANMEDGLDAISRGEKDATPFMKDFYFGSENQTGLETMLDDKVDIGKACSVQFENDGEPIEIRVGQYGPFVQQGETRKAIPQNIFLGDINVDKALEILNEEINEDKELGIDSESGEKIFLKSGPYGPYVQLGETSKRKAIPKGTDLSEVNLEFGQKLIALPRTLGLHPETNEEVKADYGRFGPYVTAGKGKNGRIPPNMSPLTIELSDALELIKKRSSGPQELRTVGDHPETGETLILKDGRYGPYMTDGKVNASLPRDADPEKLSLEEAVEIINKKRAAPPRKKRKRAKKK

SEQ ID NO: 183235 - protein, 581 aa, Unknown
  Bacterial polypetide isolated from the Sargasso Sea
EIREFEPKEYWKVRADFEGFHAELSKVDGKVVKIQNDEEANQVTQSISAGECVLKEIDEREASRNPAAPFTTSTLQQEASNKLGFSVKKTMLIAQQLYEGNFEIPDYSGGLITYMRTDSVTLSKEALAMANEVIEKRFGNEFILEKPRSFRNRTKNAQEAHEAIRPVNLEILPDQVIPHLERDQGRLYGLIWKRTLATQMKAAKIARTTFRINAGEKSECQFEAKGQQILFPGFLKVYMDSSSDAQSVLGEKDLLLPRVEQGQRLPLKDLNAEQLFTKPPPRYSEASLVKKLESQGIGRPSTFAPTISTIQNRGYVELLEDKRLKPTDMGEVVTDFLTNHFNEIVNLGFTAKIERNFDRIARGEEGWMDMMEGFYHPFHGRIEEKKETVTRDEAVKRRVLGSDPDSGKPVSVSIGRYGPMVQIGTREDVEKPRFASLPKGSSLTEISLEEALECFKLPRTLGENEEGEEIQANIGRFGPYVRIGKEFFSLPKDLGPMDVELDQALEIIREGREAKAKKTLHQFGEIQVLNGRYGPYIKKGKDNYRIPKGTDAETIDEETCLQIIKDNPPTGKRRGRAKKGS

SEQ ID NO: 183236 - protein, 454 aa, Unknown
  Bacterial polypetide isolated from the Sargasso Sea
MEWEIDTFSKKYLKEISDAAKNSSKIILATDPDREGEAIAWHVKEYLNEKKLLKDKEIERVVFNEITKKAVTHGIENPRQIEQMLVDAYMARRALDYLVGFNISPILWTKLPGSKSAGRVQSVALKLITEREHEIESFNPEEFWSLNIKFRDGNNKYVTASINLLDNKKIEKFSFKNKEEINKAISILNKKKFSVTDISGKVVNRNPSGPFTTSTLQQTASSRLGFGASRTMQIAQKLYQGVEIEGETIGLITYMRTDGTNISNDALITFRDYIQNEIGNKYLPEKSLSYSGKKAKNAQEAHEAIRPTDIIRTPESIKKYLSTDQNKLYNLIWSRALSSQMASAKFDRNTITITSDDNGTICKASGSVLKFDGFLKIYNNVSKDDNEDILPDVSKGQINIEAIIDEQHYTQPPPRYSEASLVKKLEELGIGRPSTYASIISTIANRGYAEILNK

SEQ ID NO: 183237 - protein, 519 aa, Unknown
  Bacterial polypetide isolated from the Sargasso Sea
TNKDYDRIVFHEITKNAILNALDSPREINYNLVNAQQARRVLDRLVGYELSPVLWRKVKTGLSAGRVQSVSVRLIVEKEREIKNFLTNSTFKSIGIFKNSSGVNLRAELNNKFDSSEEVKLFLQKNINSTYTVSNVEKKPAKKSPTPPFTTSTLQQEASRKLGFGVTRTMSTAQKLYEAGLITYMRTDSVTISEEAKTSILSKIESKYGDSYVNLRNYKNKNKSAQEAHEAVRPTDISVEDISSDYDQQRLYQLIWRRTISSQMSDAQIERTVVNIDSNSFDQIFIARGEVIKFDGFLRVYNEGTDDEVQEEKGILPQLNVNENLDLVNIMSRESFSRPPSRYTEASLVKKLEELGIGRPATYATTISTIQNRGYVSKGENEGQERTYKSIELKNGDIIESTSTEKTGSNKGKLVPTDIGIIVNDFLVDNFNNILDYGFTAEVEKSFDKIAEGNQNWTDIIKQFYTDFHTNVNIVKDTAERQSGEKILGEDPVSGRVVKVRLGKFGPIAQIGTIDDEDK

SEQ ID NO: 183238 - protein, 418 aa, Unknown
  Bacterial polypetide isolated from the Sargasso Sea
MSKPLVIVESPTKVKTISKILGSEYIVKSSVGHIRDLPRNAKAIPASYSNKEILWGAVKPKNFENIYVIPEDRKAIVKELKDIADEASDVYLATDDDREGEAIAYHLMESLELKSEPKRIKFNEITEAAVTNAINNPETIDIGKFKSYEARRTLDRMIGYEISPKVRDLGGAFISTGRVQGPAIRLIVEREEERLKFVKSKYFEIKALCKSNDYEFTANLKRVSGKRLASSSDFNEKGNKTSKDKKYLDENEANEIVSILKNQTASISSIKESSRSGKPPKPFKTTSLQSSARSNLGFQPRKTMSVAQRLYQEGLITYMRTDSIRLSDVAIKASRAYIKDNFSEKHLPDSPNLYGDSKNAQAAHEAIRPSGESFTTPQELLKTHKEDSDEYKLYSLIFNTTVASQMTDAQGITKTIEI

SEQ ID NO: 183239 - protein, 690 aa, Unknown
  Bacterial polypetide isolated from the Sargasso Sea
MPPVPNTLVIVESPTKARTIRGFLPRTFRVEASMGHVRDLPNNASEIPTSHKAEKWAKTGVNTEKDFEPLYVVPKDKKKIVKELKDALKAADELLLATDEDREGESISWHLLQLLNPKVPVKRMVFHEITEEAIKRALGETRELNMELVHAQETRRILDRLVGYTVSPLLWKKVAWGLSAGRVQSVAVRLLVQRERARRAFRSGSYWDLKAQLKHEGISFEAKLSHLAGERIATGGDFDESTGAIKAGTKVKLLSEADAQGLLKAIDGKTWSVAEVEEKPTTRRPAPPFTTSTLQQEANRKLRLSAREAMRTAQGLYERGYITYMRTDSVHLSEQAITAARSCVSDKYGADHLSPQPRQYTTKSRNAQEAHEAIRPAGSSFRTPAESGLKGLDLSLYELIWKRTVASQMADARLTMVSAQIDVEKARFRASGKRIDFAGFFRAYVEGSDDPDAALEGQEVLLPTLRSGDHPSCQSCEPHGHQTQPPARFSEAALVKMLEKEGIGRPSTYASIIGTICDRGYATLQNNSLTPSFTAFAVTALLEEHFPDLVDPSFTARMENTLDEISNGSAEWLPYLDHFFRGEKGLEQQVAKREGDIDPVASRTIQLDDLPCVVRIGRFGAYLEAKRPGEDGEEELIKATLPQDLTPADLDSDQAELLLKQKADGPESLGEDPATGEAIYLLFGQYGPYV

SEQ ID NO: 183240 - protein, 557 aa, Unknown
  Bacterial polypetide isolated from the Sargasso Sea
ITSTLAKLPGSKSAGRVQSVALRIISERELEIEKFDPEEYWSIQGKFLNKDKKDINARLTVFEGNKIDKLDIKNEKQATNIYDTIKNSKFKVGNIIKKEAKRNPYAAFTTSTMQIESSRKLGLSASQTMRTAQRLYEGTEINGDTTGLITYMRTDSVIMSNEAINQVRSFVSENYGAEYLPDNPRIYKSKAKNAQEAHECIRPTNIQLTPKDIKHYITGEEFKLYEIIWQRAVSSQMSSAILDQVAVDIMTQDQQISLRANGSTIKFPGMYKVYQEAKDDDKDEEKETILPAMNEGEELDLKKVNKNQHFTMPPPRYTEASLVKKLEELGIGRPSTYASIIKVLQDRDYVMLDNKRFNPHDRGRIVSIFLEKYFNQYVEYDFTADLENQLDEISDGKLDWKEVLSKFWETFKKLCDDTVGKSNREVIDVLDDALGAHFFPPEGKDESRKCPTCENGRLGIKVGKFGGFVGCSNYPDCKYTVQFNQLNDKDGAALSGPKEIGIYPETNEMITLRKGPYGYYMQVGEGTPEKKPKRVSIPKNFEPDEIGLNTAIQLLGL

SEQ ID NO: 183241 - protein, 704 aa, Unknown
  Bacterial polypetide isolated from the Sargasso Sea
MILYIAEKPSLGRAIADVLPKPHKKGDGFIEDAQGNCVSWCVGHLLEQAEPDAYNPEFKSWKFEHLPIVPEKWQLKPKAATRSQLTVLKKLVKQADTLVNAGDPDREGQLLVDEVIAYLGVTGDKLQQTQRLLISDLNPQAVKRALSQLRSNREFIPLSTSALARSRADWLYGMNMTRAYTIQGKKVGYQGVLSVGRVQTPLLGLIVRRDEEIANFQSKPFYEVLAHLVTDKDQAFTAKWQPSEACLPYMDEEGRVLAKGLAQNVVRRITDKPAKVTQLSTKDKQQNPPLPYSLSALQIDAAKRFGMSAKDVLDTCQSLYERHKLITYPRSDSRYLPTEQHALASGVLAAIMGGAPELVAHAEAPNPRLKSKAWDDKKVDAHHAIIPTEKQPNLAGLSQRERQLYLHIARQYLAQFYPAYCYSETAVEVTIEGGLFKTKAKQDKSLGWKQLFAREENERKDASSTANFAQGDKDADEGEYVGQLPPLTLGQVLHCHQGELVEKQTQPPKAFTDATLLSAMTGINRYVTDPEIRKILKETDGLGTEATRAGIIELLFKRGFIQRQGKSIVATEVGKGLINSLPLSATTPDMTALWEASLNGICHKEISYQGFMQPLLGTLNNLIENAGAQLPSALNGLKGQGFKRAATKKSGYRKAGTRGAAGVKKAGTGPKIGNASNSAAASSTSTTAKPTAPRRRTSKVPAQA

SEQ ID NO: 183242 - protein, 557 aa, Unknown
  Bacterial polypetide isolated from the Sargasso Sea
LSINFIDQNNQKITASISQLDDNKIEKFSFRNKEEINKAIASVNKKKFSISDISSKTVNRNPSGPFTTSTLQQTASSRLGFGASRTMQIAQKLYQGIEIEGETIGLITYMRTDGTNLSKDAVSAFRDYIQKEIGNEYLPNDALNYSGKKAKNAQEAHEAIRPTDIIRTPQSVKKYLSTDQNKLYDLIWSRALSSQMESAKFDRNTITITSDNNDTICKASGSVLKFDGFLKIYNNQSKDDDENILPTVSKGPINIEALLDEQHYTQPPPRYSEASLVKKLEELGIGRPSTYASIISTIANRGYAEILNKRFFPTDRGKLISAFLEKLFSKYVDYNFTAGLEDQLDEITTGKESWIKVLELFWKDFNNNVSEVKEKRTREVLDLLNDSLGELIFDKDNDGNVVRKCQLCNSGTLSLKNSFRGGAFIGCSNYPECKFTRPLSKAKAAAQAQLAEPKLIGKHENGNDIYLKNGRFGPYLQYEKIQTEEEIEKTNKKKKKTKKSKSDVNDLLKNISIPKGLELDSIDLEKAKFLCSLPKSLGINPDNQKEITLNTGRFVLI

SEQ ID NO: 183243 - protein, 214 aa, Unknown
  Bacterial polypetide isolated from the Sargasso Sea
MPSSLVIVESPAKAKTISKYLGDEYIVKSSVGHIRDLPKKGIKSGAKRNVIPKDLPADEKARLKKINERKRLINRMGVDPDSNWKATYQIIPEKEKVIKELKTSAKKVENILLATDLDREGEAIAWHLKEALGPEKYNFQRVRFNAITKDSILEAFSDPKEIDQNLVNAQQARRFLDRVVGFELSPLLWAKIARNLSAGRVQSVALRLLAEKEK

SEQ ID NO: 183244 - protein, 155 aa, Unknown
  Bacterial polypetide isolated from the Sargasso Sea
MNLVIVESPAKAKTINKYLGENYKVLASYGHIRDLPSKNGSVDPDQNFKMEWEVDSFSKKYLKEITDAAKNSSKIILATDPDREGEAIAWHVKEYLNEKKLLKDKEIERVVFNEITKKAVIHGIENPRQIEPLLVDAYMARRALDYLVGFNISPI

SEQ ID NO: 183245 - protein, 456 aa, Unknown
  Bacterial polypetide isolated from the Sargasso Sea
ISSKIVNRNPSGPFTTSTLQQTASSRLGFGASRTMQIAQKLYQGVEIDGDTVGLITYMRTDGTNLSVDAVSDFRNFIEKEYGRQYLPKNPNNYSGKKAKNAQEAHEAIRPTDINRSPDIVKNYLSSDQLKLYNLIWSRALSSQMQTARFDRNTITITSDDNLTICKASGSVLKFDGFLKVYPSPSKDEDEEILPEMSKGPINIESLIDEQHFTQPPPRYSEASLVKKLEELGIGRPSTYASIISTISNRGYAEILNKRFFPTDRGKLISAFLEKLFSKYVDYNFTASLEDQLDEITSGKESWIKVLEMFWKDFNNNVSEVKEKRTREVLDLLNESLGALIFDKDNDGKIVRKCKLCETGSLSLKNSFRGGAFIGCSNYPECKFTRPLSKAKAASQAQLAEPKFLGKHENGNDIFLKNGRFGPYLQYEKILDDKIENIITKKKKKAKKNKSNVNELL

SEQ ID NO: 183246 - protein, 458 aa, Unknown
  Bacterial polypetide isolated from the Sargasso Sea
NSFRWVYIFCTGREVVFDGFTRVVKAKSDDKESNILPSLEVNQQLILKDIDNNQKYTKPPARFSEAALVKELEKKGIGRPSTYANIISTIQDRGYVEIQNRRFFVKKIGMIVTDRLVSSFDDIMDYSFTANFEDQLDRIANGELNWKEVLNSYYSAFQDDLSSAMDEENGMSPNLPTMTNINCPECKINKLTIRNASNGVFLGCAGYSLPAEMQCKKTLNLISGDEAVSIDDQEEAEHLVTKRRCPKCDTSMDNYLLDENHKLHVCSNNPDCDGFEVEEGAFKIKGYDGPTLSCHKCGSEMQLKTGRFGKYFGCMNDNCGATRALQRNGEPKPIVMEPITTEIPCIKFEDIYLLRDSMKGLFLAASKYPKNRETRAPSVEEFNKVVTEEILLDACKYLEDQEKHTHLLFAPKHDTDGNPYIIRYNKVEDTHYLASEKDGKKTGNTASHNGEKWIEVSK

SEQ ID NO: 183247 - protein, 853 aa, Unknown
  Bacterial polypetide isolated from the Sargasso Sea
MNLVIVESPAKAKTINKYLGSDYTVLASYGHIRDLPSKNGSVDPENSFKMIWEIDSFSKKYLKEITDTAKNSEKIILATDPDREGEAIAWHVKEFLNEKKLLKDKKVERVVFNEITKTAVTNGIDNPRNIENELVDAYMARRALDYLVGFNISPILWTKLPGSKSAGRVQSVALRLLTEREHEIEVFKPDEFWTLNLNFLTKENLNINTSITQLDDKKIEKFSFKNKEDINNALDLIKNKKYNITDIISKIYTRNPSGPFTTSTLQQTSSSKLGFGASRTMQIAQRLYQGIDIDGETVGLITYMRTDGTNISKDAVATFRDFITQNYGETYLPPAPLNYSGKKAKNAQEAHEAIRPTEIGRVPEDMKKYLSTDQYKLYNLIWSRSLSSQMESAKFDRKTITITSEDNKNICKASGSTLKFDGFLKVSRIDENKDDENILPEVGKGEVEFNDFTDEQHFTQPPPRYSEASLVKKLEELGIGRPSTYASIISVISNRGYADIENKRFFPTDRGKLLSAFLEKLFSKYVDYDFTAKLEDQLDDITSGKENWIKVLEEFWRDFNLNISDVKEKRTREVLDMLNESLGSLIFEVDKDGKINRKCKLCNSGQLSLKNSFRGGAFIGCSNYPDCKFTRPLSKSKAAQQLTLAEPKLLGQNDNGKDIYLKNGRFGPYLQYEKELNDVEKTKKKKKKIIKEDNNMKNVSIPKGIDIKSIDLDRAKYLCSLPISLGKNPENDKDITVNVGRFGPYLKCENKSARLENVEEIFSIGLNRAVTLIAEAKPGRISSSLIKDLGEHPEDKKPVRIMKGQYGPYIKYKSLNATIPEEKDPIELTMEEALILIEKRKEYDKNKKKKKGK

SEQ ID NO: 183248 - protein, 146 aa, Unknown
  Bacterial polypetide isolated from the Sargasso Sea
MNLVIVESPAKAKTINKYLGKDYLVLASYGHIRDLPSKNGSVDPENKFQMEWEIDSFSKKYLKEITNAAEDSDKIILATDPDREGEAIAWHVKEVLEKKKLLKDKNLERVVFNEITKKAILDAIKNPRQIHLPLVEAYLARRALDY

SEQ ID NO: 183249 - protein, 432 aa, Unknown
  Bacterial polypetide isolated from the Sargasso Sea
AAKNSSKIILATDPDRECEAIAWHVKEYLNEKKLLKDKEIERVVFNEITKKAVIQGIENPRQIEPHLVDAYMARRALDYLVGFNISPILWTKLPGSKSAGRVQSVALKLITEREHEIESFKPEEFWTLSINFIDQKNQKIIASISQLDGNKIEKFSFRNKDQINKAIANINKKKFNITDISSKIVNRNPSGPFTTSTLQQTASSRLGFGASRTMQIAQKLYQGIEIEGETIGLITYMRTDGTNLSKDAVSAFRKYIQKEIGNEYLPKDALNYSGKKAKNAQEAHEAIRPTDVIRTPQSVKKYLSTDQNKLYDLIWSRALSSQMESAKFDRNTITITSDNNDTICKASGSVLKFDGFLKVYNNQSKDDDESILPDVSKGPINIEALLDEQHYTQPPPRYSEASLVKKLEELGIGRPSTYASIISTIANRGYAE

SEQ ID NO: 183250 - protein, 408 aa, Unknown
  Bacterial polypetide isolated from the Sargasso Sea
DKIKLKEINARKALIRRMGIDPDNEWETEWETIPGKEKQIKALKKAAKSVDHIYLATDLDREGEAIAWHLKEALGPKHSYSRVRFNQITKTAILDSFSNANEIDLDLVKAYRARRILDRVIGFELSPLLWKKIARGLSAGRVQSVALRLLDERERSIQAFIPEEFWEIKLDVKSSTEEIIKFDLFRKKSDPLLKKADAEEIQNQINLAELSINEISKKPIKVKPKPPFITSTLQQSASTRLSFNVKRTMLVAQRLYEAGYITYMRTDAPSLSKESINDARNYIKENIGDKYLTDAPRIYSSTENAQEAHEAIRPTNAYLQVKDLINLSDEENKLYQLIWERFIASQLPDAEYLSTSVKINVNDNIFVAKGREVVFDGYTAVLKNTTKEEDILPSLSEGDKVGKEKIHL

SEQ ID NO: 183251 - protein, 589 aa, Unknown
  Bacterial polypetide isolated from the Sargasso Sea
MSKPLVIVESPTKVKTISKILGSEYIVKSSVGHIRDLPRNTKSIPAQYTKEEILWGAVKPNEFENIYVIPEDRKKVVKELRELADKAPDVYLATDDDREGEAIAYHLKEALELKKEPKRIKFNEITEPAVLNAIENPEVIDIGKFKSYEARRTLDRMIGYEISPKLRDLGGAFISTGRVQGPAIRLIVEKEEERLRFVKSKYFEIEATCKTSDIEFVANLKSVKGKRIASSKDFDKNGIKINKDKEYISEKDCDEVLKILNNGSAKTSKIKETPRSGKPPKPLKTTSLQSSARNNLGFQPRKTMSVAQKLYQEGLITYMRTDSIRLSDIAIKAARKYISENFTKDHLPTEPNLYGDNKNAQAAHEAIRPSGDIFTEPKELLGKYKEDSDEFKLYSLIFNISVASQMTEAKGVTKSIEIEVEDDTFGPIILGISGTTWIFGGYRDLIKDLSEKSQELPDLAEGDLINIINSKSEEKFTTPPNRYSSTSLINKLEELGIGRPSTYVSIIESITSVFINSESSLKPRILAIAMINNFMKPYFDLYIDYEFSKLMEDELDKILESKNPEEAKVKFLEESYNKIKKHIEGYENA

SEQ ID NO: 183252 - protein, 872 aa, Unknown
  Bacterial polypetide isolated from the Sargasso Sea
MTKSLVIVESPAKAKTISKYLGPEYIVESSVGHIRDLPKKGGTTRTRLVVPKDLSPEEKARQKEINARKSLVRRMGVDPDNGWDANWQIIPEKEKVLKALKKAAKNVDNIYLATDLDREGEAIAWHLKEALGPQKYNYSRVRFNQITKDAIIESFSDPKEIDLNLVKAYRARRFLDKVIGFELSPLLWKKIARGLSAGRVQSVALRLLDERERSIQEFIPEEYWEISFSATTNNNETITFNLATKKTDPLLSKEKVETIKQQIESCNLSINEISKKPVKVKPKAPFITSTLQQSASTRLGFNVKRTMRVAQKLYEAGLITYMRTDAPSLSKESIKDARSYINENIGEKYLTNAPKIYSSTENAQEAHEAVRPTNAYLKPQDVMHLSDEESKLYTLIWERFIASQMPDAEYLSTSAKVFVEEKVFVARGREIVFDGFTKILKSSSKEEDILPNLQEGDSLKRETIDLEQKFTKPPSRFSEAALVRELEKKGIGRPSTYANIISTIQDRGYVAIENKRFFVKKIGHIVAERLMESFDDIMDYDFTANLENNLDKVANGDADWRSILDNFYRAFQNDLNSASDEYGGMRPGNIPTETNITCPCGKTNMVIRNSSNGVFLGCSGYQNSGDEKCKETLNLISGDEAISIDDNEEVENLLIKKRCPKCETSMDNYLIDENRKLHVCGKNPDCDGYLVEDGQFRIKGYDGPTLECHKCGSEMQLKTGRFGKYFGCLNDNCGATRALQRNGEPKPITMEPIEIKDLKCIKCEDHYLLRDSMKGLFLAASQYPKNRETRAPKVSEINSLREEIIEACRFLPDKEKHLYLLDAPETDKDGNPYVIRYNRTEDTHYVASEKDGKKTKWTATYSNGQWVENLKS

SEQ ID NO: 183253 - protein, 215 aa, Unknown
  Bacterial polypetide isolated from the Sargasso Sea
MNLVIVESPAKAKTINKYLGDNYTVLASYGHIRDLPSKNGSVDPDDKFKMIWEVDSFSKKYLKEITDAAKKSDKIILATDPDREGEAIAWHVREYLGEKKLLKDKKIERVVFNEITKKAVTNGIDNPRNIESNLVDAYMARRALDYLVGFNISPILWTKLPGSKSAGRVQSVALRLLTEREHEIEQFKPEEFWTLNVNFKTSNGETLNSKYYIIK

SEQ ID NO: 183254 - protein, 609 aa, Unknown
  Bacterial polypetide isolated from the Sargasso Sea
NLAELSINEISKKPVKVKPKPPFITSTLQQSASTRLSFNVKRTMRVAQKLYEAGYITYMRTDAPSLSQESINDARNYIKENIGDKYLTDAPRIYSSTENAQEAHEAVRPTNAYLQVKDLINLSDEENKLYQLIWERFIASQLPDAEYLSTSAKINVNDNTFVAKGREVVFDGYTTVLKNTAKEEDILPSLSEGDKVQKETIHLDQKYTKPPSRFSEAALVRELEKKGIGRPSTYANIISTIQDRGYVEIQNKRFFVKKIGHIVAERLLESFENIMDYDFTANFENDLDKVANGEAEWKNVLDTFYKSFQNDLITASDVNTGMRPGNIPIETDITCPCGKTNMVIRNSSNGVFLGCSGYQNIGDDKCKETLNLISGDEAVSVDDNEEAQNLLIKKRCPKCGTSMDNYLIDENRKLHVCGKNPDCDGYLIEDGHFRIRGYDGPTLECHKCGSDMQLNTGRFGKYFLCQNDNCRATRALQRNGEPKPITMEPIQLENLKCLKCEDYYLLRDSMKGLFLAASQYPKNRETRAPKVFEINKLENELREACKFLPNKEKHLYLLTAPEEDTDGNPYVIRYNRTDDVHYLASEKDGKKTKWTATYTNGEWVQNLKS

SEQ ID NO: 183255 - protein, 333 aa, Unknown
  Bacterial polypetide isolated from the Sargasso Sea
MNQKSLLIVESPTKVKTIQQYLGKEYDVISCVGHVKDLPKNDLGIDLENDFKIKLAVLPDKKDFIAELRKKSKTADRVLVATDPDREGEAIASHLATEIPEEKLDRVQFTEITKAGINEGINNVRDINHDLVAAQTARRVIDRLVGYKVSPVLWATLQSNMNFVSTNLSAGRVQSAAVKMIVDQDRLRAKFISTNYFDLKADLRKVNSKENFNATLLKVDGLKVASSNDFDSKTGELKNKDVLLLTESQSDELVKELKSGNWIVTDIKKKPRTSNPKPPFTTSTLQQEASRKLRSSARQTMSIAQKLYENGFITYMRTDSTHLSDEAISGSRK

SEQ ID NO: 183256 - protein, 483 aa, Unknown
  Bacterial polypetide isolated from the Sargasso Sea
SKNEKLLIIVESPSKTKTISKYVDNASVIASVGHFKDLPKKDMGIDIDNDFAMQIESMPDKKKFLSQLKKEVKIADRILIATDPDREGEAIAADIASEIKGDIERVEFTEITKQAVLEAVNNSRKINYDLVDAQRARRAIDRIVGFSFSPVLWKTLRSLKNKGLSAGRVQSVALKLLVDREKLRNKFIENKFYAIDANISEEKSGEIFKASLVSYNGKPVAKSDDFGKFDIGLKDDNIIQVDQKLAEQIKEECNANDWLVNSIESKPTSSSPAPPFTTSTLQQDASRRFGFSPKRTMVVAQKLYEQGFITYMRTDSTHLSSEALNASKKFIESSFGNDFLSEKTNIYKNKVANAQEAHEAIRPAGTVFRKVEDVQKIGADEAKLYELILNRTVASQMKPAQYIRTNVEIHNGTSIFKASGNVTVFKGYTLAYEQALTRKDKGRPDSLPALDKQSKIQSKEVLLEEKTTSPPRRFSEAMLVKEM

SEQ ID NO: 183257 - protein, 841 aa, Unknown
  Bacterial polypetide isolated from the Sargasso Sea
MKLVLVESPAKAKTINKYLGPDFDVMATIGHIRNLPNKNGVNPDNNFQMEWELIDRGNKFLKDIKASLKSANKLILATDPDREGEAISWHVLELLNDKKIKLDIPVERVVFHEITRNSVLEAINNPRTLDQELINASLARNALDYLIGFKLSPVLWQKLPGAKSAGRVQSVALRLICEREFEIQSFVPEEYWTVESNLKNKAEETLKSRLISLKGKKLDKLSLKSESDAIEAIRCIENSDLVVNSNEEKKEFRNPKPPFTTSTLQQEASRKLNFSASRTMKAAQKLYEGLNVGSETTGLITYMRTDSVQLSKESVNEIRKKIILDYGNKYCPEKLKVYKSKVANAQEAHEAIRPTSVNRNPKEIKSFISEDCFKLYDLIWKRTVSSQMSSAILNKTIIDIESANTSDIKNHVVLRANGSRIVFDGFLKTYNEGVDEKNENEIEDNLLPKVSIGEKLDVIKNTKDQHFTQPLPRYTDASLIKKLEELGIGRPSTYASILEKLQNRGYVFKEGSRYFADDIGRIVTSFLENYFEQYVEYSFTAELEKKLDLVSEGKLDWRKLLEEFWENFKIAINNTTEIQRTEVIEKIDLALENHFFNQNENGTINRECPTCTNGKLSLKIGKFGSFIACSNYPDCKYSRKLSEQNTDENEMGFDGEKSFGIDQISNEEVLLKKGPYGIYLQLGNDKKPKRTSIPKLIKVEDLNLETALSLLSLPRDLGKPPGEDKSIYAGIGRFGPYLRFGTTYVSLPHDHTVLTIGLNHANDLMQEKLSKSPPIINLGEHPDGGPIEIKSGRFGSYAQYKKLRASIPKKQNLDDFTLEMGIELINEKGKEPKTRTSRSKK

SEQ ID NO: 183258 - protein, 439 aa, Unknown
  Bacterial polypetide isolated from the Sargasso Sea
DGFTKILKTSSKDEDILPSLHENQLITTDGIELEQKFTKPPARYSEAALVRELEKKGIGRPSTYANIISTIQDRGYVQIENKRFFVKKIGHIVAERLIESFHDIMDYDFTANLENSLDEVANGDADWREVLDNFYKSFQNDLISASDLNSGMRPGNIPTETNIVCSCGKTNMVIRNSANGVFLGCSGYQNEGSDKCKVTLNLISGDEAVSVDDSEEAENLLTRKRCPKCETSMDNYLIDEYRKLHVCGKNPDCDGYLVEDGKFKIKGYDGPTLECHKCGSEMQLKTGRFGKYFGCLNDNCGATRALQRNGEPKPITMEPIEMPDLKCVKCEDHYLLRDSMKGLFLAASQYPKNRETRAPKVSEINKLHDKIIEACRFLPNKEKHMYLLDAPEKDADGNPYVIRYNRTDDVHYLASEKDGKRTKWTATYSNGEWVQNLKS

SEQ ID NO: 183259 - protein, 552 aa, Unknown
  Bacterial polypetide isolated from the Sargasso Sea
FHPILWTKLPGSKSAGRVQSVALRLLTEREHEIEVFNPEEFWTINVNFITSSKNILTSSISELNGEKIEKFSFRNKEDINNAISKINEKKYSIKDITSKIYTRNPSGPFTTSTLQQSASSKLGFGASRTMQIAQRLYQGIEIDGDTKGLITYMRTDGTNISKEAIPLFRKYIEENYGGDYLPEQANNYSGKKAKNAQEAHEAIRPTEIKNSPESIKKYLSTDQYKLYDLIWSRALSSQMQPAKFDRKTILITSEDGKNILKSSGSTIRFDGFLKLQKIDENDDEKILPEVSKGPIEIKEFNDEQHFTQPPPRFSEASLVKKLEELGIGRPSTYASIISVISNRGYADIVNKRFFPTDRGKLLSAFLEKLFSRYVDYDFTAKLEDQLDDITSGKENWIKVLDQFWKDFNENVSNVKEKRTREVLDLLNDSLGSLIFDKNSNGKVDRSCKLYNKDCKFSVEGTLSLKNSFRGGAFIGCSNYPDCKYTRPLSKAKAAAQANLSEPKLIGKNDIGKDIYLKNGRFGPYLQYELSDEEIENIKKPKTKTKKKKKRRK

SEQ ID NO: 183260 - protein, 343 aa, Unknown
  Bacterial polypetide isolated from the Sargasso Sea
LLGEREKEDPLKKLVTGGIKASLIKDNITFETKLFSLNGQRISNGSDFDEQTGKLKEGNKSLIIGEEQVNDLLKTFSSEDWLVSKIEKKPSTRKPVPPFTTSTLQQEANRKLRLSARETMRCAQGLYERGFITYMRTDSVHLSEQATRAARECVSSMYGKEYLSNSPRQFNSTARNAQEAHEAIRPAGEVFKTPKETNLTGRDLSLYDLIWKRTVASQMAEARLTMINAEISVGDGLFKSSGKSIDFAGFFRAYVEGSDDPSSSLEQQEIILPNLTTGTCLEVTNKESTFHETKPPARYTEAALVKVLEKEGIGRPSTYASIIGTIVDRGYANISFNTLAPTF

SEQ ID NO: 183261 - protein, 427 aa, Unknown
  Bacterial polypetide isolated from the Sargasso Sea
MSKLVIVESPAKAKTIQKYLGDGYAVLPTIGHIRELPKKDAIDPSNGYSMKYIVSPGKEDAVKKIKGEAKNVEQVILATDPDREGEAIAWHVADIISNSRFEQPDIKRAVFYEISEKAVKDAVGNPGEIAMDLVQSQETRRALDRHFGFTLSPLLWRLFPSNNHSAGRVQSPALRMIVEREREIEAFDPQEYWTISVKLEKDGEYDAKLSVFKQEPVKKFTFNSTRLVEEASKGLEEQCQKGLVAKSISKKSIKRSPREPFRTSVLQQQASNRFGFTPKRTMQIAQSLYAREGGGLITYIRTDSIEIDEGKIPAVRSQVASMFGEEFVQPRNYKNKKEAKNIQEAHGAITPVDISLAPTDAKKILKDDEFKLYQLIWQRTVASQMKDAIFERTSIEFVPTGDESLATFSFSDQELIFSGYLEATQEE

SEQ ID NO: 183262 - protein, 413 aa, Unknown
  Bacterial polypetide isolated from the Sargasso Sea
MARRALDYLVGFNISPILWTKLPGSKSAGRVQSVALRLLTEREHEIEQFIPEEFWTLNVNFKTLNGNILNSNLVLLNENKVEKFTFKKKEDINKAIEIIKKSKYKISDITSKVYTRNPPGPFTTSTLQQTASSKLGFGASRTMQIAQRLYQGIDIEGDTLGLITYMRTDGTNISQDAISDFRNFIQTSYGDNYLPQQPNNFSGKKAKNAQEAHEAIRPTDISRTPDSMRKFLSTDQIKLYDLIWSRALSSQMETAKFDRKTITIVSNDNLNHFKCSGSTLKFDGFLKLTRIEDEDEKILPDVGKEDVSTDEFIDEQHFTQPPPRYSEASLVKKLEELGIGRPSTYASIISVISNRGYADVVNKRFFPTDRGKLLSAFLEKLFSKYVDYGFTAGLEEQLDDITSGKEEWVKVLD

SEQ ID NO: 183263 - protein, 240 aa, Unknown
  Bacterial polypetide isolated from the Sargasso Sea
MSKSLVIVESPAKAKTISKYLGNEYIVKSSVGHIRDLPKGKSKAKRQNSIPKDASPQEKARLKKEQERRRIIRRMGVNPDDGWSANYEIIPDKEKVIKDLRKASKEVEKVYLATDLDREGEAIAWHLKEALGKNKFEYHRVRFNEITKSSILESFSDPKEIDQDLVNAQQARRFLDRVVGFELSPLLWKKIARGLSAGRVQSVALRLLCEREKLISQFQPQEFWEVSATLKDFNHERNLI

SEQ ID NO: 183264 - protein, 343 aa, Unknown
  Bacterial polypetide isolated from the Sargasso Sea
HLVDAYMARRALDYLVGFNISPILWTKLPGSKSAGRVQSVALRLLTEREQEIEVFQPKEFWTLNIIFKNNKNEKINTTISQLDGNKVEKFSFKNKQDINDALSKIKNKKYNITDISSKTYNRNPSGPFTTSTLQQTASSKLGFGASRTMQIAQRLYQGIDIEGETVGLITYMRTDGTNISKDAITSFRDFIMQNYGDKYLPEQPLNYSGKKAKNAQEAHEAIRPTEIIRKPEDMKKYLSTDQYKLYNLIWSRSLSSQMQSAKFDRKTITINSNEDKNIFKASGSTLKFDGFLKLYKIDENDDDNENILPDVEKGDVMFEDHIDEQHYTQPPPRYSEASLVKKL

SEQ ID NO: 183265 - protein, 390 aa, Unknown
  Bacterial polypetide isolated from the Sargasso Sea
MNLVIVESPAKAKTINKYLGDNYKVLASYGHIRDLPSKNGSVNPDQDFKMEWEVDSFSKKYLKEITDAAKDSSKIILATDPDREGEAIAWHVKEYLNEKKLLKDKEIERVVFNEITKKAVIQGIENPRQIEPLLVDAYMARRALDYLVGFNISPILWTKLPGSKSAGRVQSVALKLITEREHAIESFKPEEFWTLSIKFADTANQNFTASISQLDNNKIEKFSFRNKEEINKAISSINKKKFSITDISSKIVNRNPSGPFTTSTLQQTASSRLGFGASRTMQIAQKLYQGIEMEGETIGLITYMRTDGTNLSKDAVTSFRNYIQKEIGNEYLPKDVLNYSGKKAKNAQEAHEAIRPTDIIRTPESVKKYLSTDQNKLYDLIWSRALSSQM

SEQ ID NO: 183266 - protein, 379 aa, Unknown
  Bacterial polypetide isolated from the Sargasso Sea
NVSVDPKDRFKMIWEIDSFSKKYLKEITDVAKKSKKIILATDPDREGEAIAWHVKEYLNEKKILKDKKVERVVFNEITKKAVTNGIDNPRNIEPNLVDAYMARRALDYLVGFNISPILWTKLPGSKSAGRVQSVALRLLTEREHEIEQFNPEEYWSLNVNFKTLKGNILNSNLAILKENKIDKFFFKTKDDINNAVEQIKKSKYKISDISSKIYTRNPNGPFTTSTMQQTASSKLGFGASRTMQIAQRLYQGIDMEGDTVGLITYMRTDGTNISKDAVSDFRSFIKSSYGDNYLPTEPNNYSGKKAKNAQEAHEAIRPTDISRTPESMRRFLSTDQNKLYELIWTRALSSQMMAAKFDRKTITIVSDDNLNQFKCSGSL

SEQ ID NO: 183267 - protein, 363 aa, Unknown
  Bacterial polypetide isolated from the Sargasso Sea
MNLVIVESPAKAKTINKYLGKDYKVLASYGHVRDLPSKNGSVDPENNFKMEWELDTFSKKYVKEITDAAAESEKIILATDPDREGEAIAWHVREILESKKLLKGKKVERVVFNEITKKAVTNGINNPREIESLLVDAYMARRALDYLVGFNISPILWTKLPGSKSAGRVQSVALRLITEREHEIELFKPEEFWTIASNFQYDDKLIQSKLFVFNEKKIEKFSFKKKTDSEKALNAIKDQSYKITDVSSKVFRRNPLAPFTTSTLQQTASGKYGFGASRTMQIAQRLYQGIDLEGDTIGLITYMRTDGTNISKEAITDFRNFINKEHGKEYIPEVPNNYSGKKAKNAQEAHEAIRPTDVNRKSF

SEQ ID NO: 183268 - protein, 839 aa, Unknown
  Bacterial polypetide isolated from the Sargasso Sea
MSNKPLLIVESPTKVKTIQQYLGSEYDVLSCVGHVKDLPKNDLGINIDDGFKVELSVLPDKKQFISELRKKSKTAERVLIATDPDREGEAIAAHLATEVPEEKIERVQFTEITKAGIAEGINNIREIDKDLVDAQTARRVIDRLVGYKVSPVLWATLQSNMDFVKTNLSAGRVQSAAVKIIVDRDRLRAKFIRSVYFDLKSLLTKTGETNSFNATLVKLDGAKIASSNDFDSETGELKNNNVILLSESQAEELVKELKPADWTVTDIKEKPRTSNPKPPFTTSTLQQEAARKLRSSARQTMSTAQQLYENGFITYMRTDSTHLSEEALAGSRKIIKELYGEEYLPEEVKEYATKVRNAQEAHEAIRPAHRDFRSVEEVKKSLGDDASKLYDLIWKRTVASQMRSAKLMQTAVTIQNQKAEFRANGQVVLFPGYMKVYVEGRDNPDKDLANKERILPSFNVGEKLTCESVEAESHQTKPPARYTEASLVKSLEENGIGRPSTFASILATIVRRGYVDRKSGKLSPTYLGLAVTQLLENHFTNLVSKEFTAKMEDGLDEVSRGELDAIPFMTNFYRGGGRFAGLENMLGEKVDIPTACSIAMPEKIAETTEGRIGRYGPYLRRGDDTRSIPEDIYMGDLTLDTIENIFSQETKEDEPLGNDPDSGESIWIKKGPYGHYVQLGDTKTRKGIPKNYDLNAVDLEYALKLLSLPRDVGMHPDTNEMVTADYGRYGPYIKCGKQNAAIKGTETPLDITLERAIELLANRNKTSSELKNLGKHPETGEDLVVKDGRYGPYISDGKVNAALKGELSPETITLDEAVDLINKRRLAPPKKRRSKKKKK

SEQ ID NO: 183269 - protein, 821 aa, Unknown
  Bacterial polypetide isolated from the Sargasso Sea
MSKLVIVESPAKAKTIQKYLGDGFTVLPTIGHIRELPKKDAIDPNNGYSMKYIVSPGKEDAVKKIKSDAKSAEQVILATDPDREGEAIAWHVADIISNAKFELPDIKRAIFYEISEKAVKDAVGNPGEIAMDLVQSQETRRALDRHFGFSLSPLLWRLFPSNNHSAGRVQSPALRMIVEREREIEAFVPQEYWTISAKLEKDGEYDAKLSVFKEETIKKFTFDSTALVEEASKALEGSCKTGLVAKSITKKTIKRSPREPFRTSVLQQQASNRFGFTPKRTMQIAQSLYAREGGGLITYIRTDSIEIDEGKLPSVRDQVAFMFGDDFVQPRNYKNKKAAKNIQEAHGAITPVDISLIPTEAKKVLKDDELKLYQLIWQRTVASQMKDALFERTSIEFVPIGDEGLATFSFSDQELIFSGYLEATQEEVTNNKPPLINENDSIEFKGLIKTQHFTDPPPRYNDASMIKALEEKGIGRPSTYADILSKLTDRNYVWLKQKRYEPSDMGRLVSNFLNERFGGYISDEFTSNMENNLDEISSGKKSKEDVLNDFWSPLIDTVDEVSDVVTRKDVNPQRPLGNHPETGRPVFARMTKNGPAVQVGDMDKDEKLEWAAIKEGQSLFSIDLEIACELLNKPSENILGYHPETSEPVIVREARYGPTVQLGSKEGGNKPRYVGLLKTDSIDEITFERALDYLSLPKELGVDPESGEKVLVTIGPYGPYFKRGSKNFRGRKGLDPFSVELEEALLSISSSKGSGALKTFDDSPVKIVDGRWGAYVTDGKKNASVPKDKDPESLELQDCLELLEKAPAKKRGKRKSKKAAK

SEQ ID NO: 183270 - protein, 577 aa, Unknown
  Bacterial polypetide isolated from the Sargasso Sea
GASRTMQIAQRLYQGIDIDGETVGLITYMRTDGTNISKDAVASFRNFIAQNYGNDYLPPSPLNYSGKKAKNAQEAHEAIRPTEISRVPDDMKKYLSTDQYKLYNLIWSRSLSSQMESAKFDRKTITISSDDEKNIFKASGSTLKFDGFLKVSNLDGNKDEENILPDVSKGEVSYKDFNDEQHFTQPPPRYSEASLVKKLEELGIGRPSTYASIISVISNRGYADIENKRFFPTDRGKLLSAFLEKLFSKYVDYDFTAKLEDQLDDITSGKENWIKVLEEFWRDFNLNVTDVKEKRTREVLDLLNESLGSLIFEVDKDGNINRKCRLCDSGQLSLKNSFRGGAFIGCSNYPECKFTRPLSKSKAAQQLTLAEPKLIGQNDHGKDIYLKNGRFGPYLQYEKEKEEEEAKKKKRKLKKEENNMKNVSIPKGIDIKSIDLERAKYLCSLPLSLGKNPENDKDITVNVGRFGPYLKCENKSARLENVEEIFSIGLNRAVTLIAEAKPGRISSSLIKDLGEHPEDKKPVRIMKGQYGPYIKYKSLNATIPEEKDPIELTMEEALILIEKRKEYDKNKKKKKGK

SEQ ID NO: 183271 - protein, 347 aa, Unknown
  Bacterial polypetide isolated from the Sargasso Sea
MNLVIVESPAKAKTINKYLGSDYTVLASYGHIRDLPSKNGSVDPENDFKMIWEIDSFSKKYLKEITDSAKNSSKIILATDPDREGEAIAWHVREFLEEKKLLKDKKVERVVFNEITKKAVTSGIDNPRQIESQLVDAYMARRALDYLVGFNISPILWTKLPGSKSAGRVQSVALRLLTEREHEIEIFKPEEFWTLNVIFEDKNKSKITSNLNQLNGKKTEKFTFKSKDDVNKAINEIKKKEYQISDISSKIYTRNPSGPFTTSTLQQTASSKLGFGASRTMQIAQRLYQGIDIEGDTIGLITYMRTDGTNISKDAIETFRSYISDNFGKNYLPQSSFNYSGKKAKNA

SEQ ID NO: 183272 - protein, 853 aa, Unknown
  Bacterial polypetide isolated from the Sargasso Sea
MNLVIVESPAKAKTINKYLGKNYKVLASYGHVRDLPSKNGSVDPSNNFKMEWELDTFSKKYVKEIADAAANSEKIILATDPDREGEAIAWHVREILESRKLLKGKKVERVVFNEITKKAVTNGINNPREIESLLVNAYMARRALDYLVGFNISPILWTKLPGSKSAGRVQSVALRLVTEREHEIELFKPQEFWTISCDFKNHDKIIKSKLSIFNNEKIEKFSFKKKADSENALKEIKSKSYKITDVSSKVYKRNPLAPFTTSTLQQTASGKFGFGASRTMQIAQRLYQGIDIEGDAVGLITYMRTDGTQISKDAIEDFRNFINKIHGKEYLPENPNSYIGKKAKNAQEAHEAIRPTDITKKPSDMKKYLSTDQSKLYELIWNRALSSQMTPAEFDRKSIQIESPDKKIGFKANGSTIKFEGFLKVYKFEEKDEDLRNILPNVKIGDQIDIKELIDDQHFTDPPPRYSEASLVKKMEELGIGRPSTYASIITVLSTRNYVELLNKRFHPTDRGKLLSAFLEKLFTKYVDYNFTADLENQLDEITSGKVEWIKVLDGFWKDFYSNVGNVKEKRTREVLDLLNDSLGDLVFERDDNDIIDRKCKVCDKGELSLKNSFRGGAFIGCSNYPECKFTRPLSKSKASQQINLSEPKLIGQNDLGKDIFLKNGRFGPYLQFEIDLDTSIENKKKKGKKKKENENLKNVSIPKGLPIENVDLEKAKYLCSLPKVLGKHPDLNDDITINIGRFGPYLKCSNKSARIETVDELFTIGLNRAITLISEAKPGRMSSSEIKNLGEHPEDKKPVRIMKGQYGPYIKYKSLNATIPEDKDPTELTMEEALILIEKRKEYDKTKKKKKR

SEQ ID NO: 183273 - protein, 371 aa, Unknown
  Bacterial polypetide isolated from the Sargasso Sea
KTLAKKAKTIWLASDEDREGEAIAWHLSQQLDLDSNKTKRIVFHEITKNAIQEAIKSPRVIDENLVNAQQARRVLDRLVGYKLSPVLWTKVKGGLSAGRVQSVAVRLIVEKERLIQNFVPKELFKTNAVFETKNGKKINAQLIKVFDSKESAKKFLIDSIESEYFISSIDKKPAKKSPVAPFTTSTLQQEASRKLYFSVSKTMTLAQKLYESGLITYMRTDSVNLSKDAQQSAIIQIETLYGSEYAQERNFKTKNKSAQEAHEAIRPTDMSKIKISADYDQIRLYELIWKRTISSQMKDAKLERTQLRIKSSKQNELFSANGEVIIFDGFLRAYIEGTDDEINENSGILPNVENKDSVSIKDLKCIQKFQN

SEQ ID NO: 183274 - protein, 386 aa, Unknown
  Bacterial polypetide isolated from the Sargasso Sea
MNLVIVESPAKAKTINKYLGKDYLVLASYGHIRDLPSKNGSVDPENKFQMEWEIDSFSKKYLKEITNAAEDSDKIILATDPDREGEAIAWHVKEVLDKKKLLKDKHLERVVFNEITKKAILDAIKNPREIHLPLVEAYLARRALDYLVGFNISPILWTKLPGSKSAGRVQSVALKLITEREKEIELFKPEEYWTLTSDFTNKDDKNIFSKLSLFNGEKIEKFSFKNKDEVQKAVDVINKTKFKITDVNTKVFRRNPLAPFTTSTLQQTASGRFGFGASRTMQIAQRLYQGVDIEGETTGLITYMRTDGTNISKEAIDDFRKFITDDYGDKYLPEAPNSYTGKKAKNAQEAHEAIRPTNISRKPSDIKKYVNADQFKLYELIWSRAL

SEQ ID NO: 183275 - protein, 144 aa, Unknown
  Bacterial polypetide isolated from the Sargasso Sea
MNLVIVESPAKAKTINKYLGDDYTVLASYGHIRDLPSKNGSVDPDDKFKMIWEVDSFSKKYLKEITDAAKKSDKIILATDPDREGEAIAWHVREYLEEKKLLKDKKIERVVFNEITKKAVTNGIDNPRNVESNLVDAYMARRAL

SEQ ID NO: 183276 - protein, 841 aa, Unknown
  Bacterial polypetide isolated from the Sargasso Sea
MTKSLVIVESPAKAKTISKYLGPEYIVESSVGHIRDLPKKGGTTRTRLVVPKDLSPEEKVRQKEINARKSLIRRMGVDPDNGWDANWQIIPEKEKVLKALKKAAKNVDNIYLATDLDREGEAIAWHLKEALGPQKYNYSRVRFNQITKDAIIESFSDPKEIDLNLVKAYRARRFLDKVIGFELSPLLWKKIARGLSAGRVQSVALRLLDERERSIQEFIPEEYWEISFSATTNNDETITFNLATKKTDPLLSKEKVETIKQQIESCNLSINEISKKPVKVKPKAPFITSTLQQSASTRLGFNVKRTMRVAQKLYEAGLITYMRTDAPSLSKESIKDARSYINENIGEKYLTNAPKIYSSTENAQEAHEAVRPTNAYLKPQDVMHLSDEESKLYTLIWQRFIASQMPDAEYLSTSAKVFVEENIFIARGREVVFDGFTKILKSSSKEEDILPNLQESDSLKRETIDLEQKFTKPPSRFSEAALVRELEKKGIGRPSTYANIISTIQDRGYVAIENKRFFVKKIGHIVAERLMESFDDIMDYDFTANLENNLDKVANGDADWRSILDNFYKAFQNDLNSASDEYVGMRPGNIPTETNIICPCGKTNMVIRNSSNGVFLGCSGYQNSGDEKCKETLNLISGDEAISIDDNEEVENLLIKKRCPKCETSMDNYLIDENRKLHVCGKNPDCDGYIVEDGQFRIKGYDGPTLECHKCGSEMQLKTGRFGKYFGCLNDNCGATRALQRNGEPKPITMEPIEIKDLKCIKCEDHYLLRDSMKGLFLAASQYPKNRETRAPKVSEINSLHEEIIEACRFLPDKEKHLYLLDAPETDKDGNPYVIRYNRTE

SEQ ID NO: 183277 - protein, 449 aa, Unknown
  Bacterial polypetide isolated from the Sargasso Sea
MSKSLVIVESPAKAKTISKYLGNEYIVKSSVGHIRDLPKGKSKAKRQNSIPKDASPDEKARLKKEQERRRIIRRMGVNPDDGWTANYEIIPDKEKVIKDLRKASKEVEKVYLATDLDREGEAIAWHLKEALGKNKFEYHRVRFNEITKSSILESFSDPKEIDQDLVNAQQARRFLDRVVGFELSPLLWKKIARGLSAGRVQSVALRLLCEREKLISQFQPEEFWEVSATLKDFNHEEILFKLNRKKSDPLLKEDEAKKIEELVGSSSLEISEITKKPTTVKPKAPFITSTLQQAASSKLGFGVSRTMRVAQKLYEAGRITYMRTDAPSLSNDSIEDARLFIKDTLAEEYLTEKPRIYSGKENAQEAHEAIRPTSASLTPEKLSGHSEEEVKLYDLIWRQFIACQMPDAKYLSINAKVILDDYVFSARGREVIFDGYTKISSQNAKKADE

SEQ ID NO: 183278 - protein, 250 aa, Unknown
  Bacterial polypetide isolated from the Sargasso Sea
MNLVIVESPAKAKTINKYLGSDYTVLASYGHIRDLPSKNGSVDPENSFKMIWEVDNFSKKYLKEITDTAKNSEKIILATDPDREGEAIAWHVKEFLNEKKLLKDKKVERVVFNEITKKAVTNGIDNPRKIENELVNAYMARRALDYLVGFNISPILWTKLPGSKSAGRVQSVALRLLTEREHEIEVFKPEEFWTLNLNFLTKENLNINTSITQLDGKKIEKFSFKNKEDINNALDLIKNKKYNITDIQSK

SEQ ID NO: 183279 - protein, 132 aa, Unknown
  Bacterial polypetide isolated from the Sargasso Sea
MNLVIVESPAKAKTINKYLGSDYTVLASYGHIRDLPSKNGSVDPENDFKMIWEIDSFSKKYLKEITDSAKDSKKIILATDPDREGEAIAWHVKEFLKEKKLLKDKEVQRVVFNEITKKAVINGIDNPRKIEP

SEQ ID NO: 183280 - protein, 425 aa, Unknown
  Bacterial polypetide isolated from the Sargasso Sea
MNLVVVESPAKAKTINKYLGKDYKVLASYGHIRDLPSKNGSVDPENNFHMLWEIDSFSKKYLKEITDTAAESNKIILATDPDREGEAIAWHVKEVLNQKKLLKDKKIERVVFNEITKKAVTKGIENPRDIEPLLVDAYMARRALDYLVGFNISPILWTKLPGSKSAGRVQSVALKLITEREHEIELFDPKEFWTLKVKFKDNNNNIITSNISQLEGSKVEKFSFKNKEEINDAAERIKKMKFSISDISSKIVSRNPSGPFTTSTLQQVSSGRLGLGASRTMQIAQKLYQGIEIEGETIGLITYMRTDGTNISEEAVINFRNFIKTKYGNEYLPKDPLNYSGKKAKNAQEAHEAIRPTDIDRTPDKIKKYLSPEQHKLYDLIWSRALSSQMQSAQFDRNTITITSDNKDTILKTTGSVIKFDGYLK

SEQ ID NO: 183281 - protein, 483 aa, Unknown
  Bacterial polypetide isolated from the Sargasso Sea
AERVLIATDPDREGEAIAAHLATEVPEEKIERVQFTEITKAGISEGINNIREIDKDLVAAQTARRVIDRLVGYKVSPVLWATLQSNMNFVKTNLSAGRVQSAAVKIIVDRDRLRAKFIRSNFFDLRSELTKAGETNIFNATLRKIDGVKIASSNDFDSQTGELKNSDVLLLSESQADELVKELQSAPWTVTDIKEKPRTSNPKPPFTTSTLQQEASRKLRSSARQTMSTAQKLYENGFITYMRTDSTHLSEEAIAGSRNVIKKLYGKDYLPDKAIEYSTKVRNAQEAHEAIRPAHREFRSVDDVQKVLGDDASKLYDLIWKRTVASQMKSAKLMQTAVTIENQKAEFRANGQVILFPGYMRVYVEGRDNPDKDLANKEKILPALDVGEKLNCKSLESESHNTKPPARFTEASLVKSLEENGIGRPSTFASILATIVRRGYVDRKSGKLSPTYLGLAVTQLLENHFTNLVSKEFTAKMEDGLDE

SEQ ID NO: 183282 - protein, 533 aa, Unknown
  Bacterial polypetide isolated from the Sargasso Sea
FNHEEILFKLNRKKSDPLLKEDEAKKIEELVGSSSLEISEITKKPTTVKPKAPFITSTLQQAASSKLGFGVSRTMRVAQKLYEAGRITYMRTDAPSLSNDSIEDARLFIKDTLADEYLTEKPRIYSGKENAQEAHEAIRPTSASLTPEKLTGHSEEEVKLYDLIWRQFIACQMPDAKYLSINAKVILDDYVFSARGREVIFDGYTKISSQNAKKADEENLPSLEEGQVLKLVEVKNEKKFTKPPARFSEAALVKELESKGIGRPSTYAAIISTIQARGYVKLENKRFFVNKIGLIVSDRLMESFNEIMDYDFTANLENELDEIASGNLEWKSVLNKFYQTFQDDLNNAGSAEDGMKPNEPTETNIICPSCNKSNMLIRNSANGVFLGCAGYFKSGDEQCKHTMNLISGDEAVSVDDQEEASNLFIKKRCHICGTSMDNYLIDENRKIHVCANNPECSGFLLEEGQFKIRGYDGPTLECHKCGSDMQLQTGRFGKYFLCQNDNCRATRQLMRNGEPKPIVMDPIKTNIACEKVE

SEQ ID NO: 183283 - protein, 849 aa, Unknown
  Bacterial polypetide isolated from the Sargasso Sea
MNLVIVESPAKAKTINKYLGNEFNVLASFGHVRDLPSKNGSVDPENDFSFEWEVSNTSKKHIKEIYEAAESSSHIFLATDPDREGEAIAWHIIELLNKKKLIKDKSVKRVVFSEITKSAVKNGIDNPRELDRSLVDAYLARRALDYLFGFNLSPVLWRKLPGAKSAGRVQSVALRLICEREVEIESFDPQEYWKIKANIDVLENTIESNLTHFNNEKIDKFTFKNESEAKKVTESFKGKNFKFTDITKKPASRNPDAPFSTSTLQQTASSIFGFGASRTMQIAQRLFQGVEINGETTGLITYMRTDSTDLSKEAIDSYRRFIKDNFDPAYLPKEIRSFKSKKAKNAQEAHEGIRPTDVLRKPEDMKKYLDTDGFKLYDLIWKRSLASQMNSAAFERTAITISSEDESLKLRANGSIQTFDGFLNIYSEFNKKSDDTDLDENEEDKDLPNIKLEDKIENVDPLSTQHFTLPPPRYSEATLVKKLEELGIGRPSTYASIISVLKMRNYVEVEKNRFIPEDRAILITGFLKGFFSKYVDYEFTAEMEESLDEITSGQIDWKEFLEKFWKNFSSNIGEVTDLRITNVLDHLNDSLKNHIFVEPEGKNITRCCPSCEGELSLKVSRFGAFVGCSNYPECKFTRPISPRKIKEVVEDTILGVDTETNKEIKLLSGRFGPYIQLGDNDQKEKPKRASIPKGIPASEIDLDKANYLLSLPREIGTHPENGEMISVNYGRYGGYITCSDKNASLEDNSEIFEIGINRAVTLLANAKPGRLKSSSEIKTLGEHPEDKKPIKVMKGKFGPYIKYKTVNATIPDNIDPEEIEIEVAIDLIEKKMEKMGKKKKIPKKKSSKK

SEQ ID NO: 183284 - protein, 391 aa, Unknown
  Bacterial polypetide isolated from the Sargasso Sea
MNLVIVESPAKAKTINKYLGDNYTVLASYGHIRDLPSKNGSVDPDQNFKMEWEIDSFSKKYLKEITDAAKDSSKIILATDPDREGEAIAWHVKEYLDEKKLLKDKEIERVVFNEITKKAVTHGIENPRQIEPLLVDAYMARRALDYLVGFNISPILWTKLPGSKSAGRVQSVALKLITEREHEIELFNPEEFWTLSINFQDKNKSNITASISQLDGEKIEKFSFKKKEEIEKAIDNIKNKKFNITDISSKVISRNPSGPFTTSTLQQVASSRLGFGASRTMQIAQKLYQGIEIEGDTVGLITYMRTDGTNLSADAVTDFRNFIKKEYGKEYLPQNPNNYSGKKAKNAQEAHEAIRPTDINRNPDSVKKYLSSDQQKLYSLIWSRALSSQME

SEQ ID NO: 183285 - protein, 461 aa, Unknown
  Bacterial polypetide isolated from the Sargasso Sea
PGDLDEGLIDAQKTRRILDRIVGYDLSSLLWQKIGSYGKLSAGRVQSVAVRLVVEREKEIKAFSPQEYWEFEVSVRHDERDIALKLNTKKSGLEVNSKEEAEKIASALKEHEIEIISNEKTKRKIPVKPPFITSTLQQTSSSMLGFSLSKTMKLAQDLYTGGYISYMRTDSPNISVLAQNNCKQYLLDTYGEVYSAPKNFAAKASNSQEAHEAIRPTDVTFKADELSLSQDHKKLYNLIWSRFVASQMPQPEIVVNSIKAQSETNIFETSVSSISFDGFYKVMPPGKNSGYVDYDLESLSVGLMKKINKVEKSQHFTKPPSRYSEASLVKELEKRGIGRPSTYQEIITNIQDRGYVRSENKRLYATKIANLISDRLIKSFTNIMDYGFTANMEKSLDEVAEGKESWKKLLEEFYAEFNEAKKVAVDGMERNNPISTKVRCAECDCDKEMILRTNQTGQFLG

SEQ ID NO: 183286 - protein, 725 aa, Unknown
  Bacterial polypetide isolated from the Sargasso Sea
NEITKNAVLDSLKSPREIDENLVNAYLARRALDFLVGFTLSPVLWRKLPGSKSAGRVQSVALRIISERELEIEKFNPEEYWSIQSNFKNNEDKLINSRLTVYEGKKVDKHDIKNEKQATDIYDQIQNSKFKVSNITKKEAKRNPYPAFTTSTMQIESSRKLGLSASQTMRTAQKLYEGTEINGETTGLITYMRTDSVVMSNEAINQVRNFVSQNYGNEYLPEKPRVYKSKAKNAQEAHECIRPTDINLTPKDIKQYITGEEFKLYEIIWQRAVSSQMASAVLDQMAVDIVDEDKKITLRANGSTIKFPGMYKVYQEAKDDDKDEEKETILPMMNEGETLDLKEVIKNQHFTMPPPRYTEASLVKKLEELGIGRPSTYASIIKVLQDRDYVILDKKRFNPHDRGRIVSIFLEKYFNQYVEYDFTADLENQLDEISDGKLDWKEVLRKFWETFKQLCDDTVGKSNREVIDVLDDALGAHFFPPEGKDESRKCPTCDNGRLGIKVGKFGGFIGCSNYPDCKYTVQFNQLNDKDGTTLSGPKEIGNYPETNEMITLRKGPYGFYMQVGEGTPEKKPKRVSIPKNFEPEEIGLNTAIQLLGLPRKLGFHPETNKTVSAGIGMYGPYILHDKKYKALEKTDNILDIELERAIELIAKPTQRGNATLKTFGEHPGEKKNITAHDGKFGPYVKCGKINASLLGDQTIDSLTLAEAIKLIDDRKQKIGLKKKKK

SEQ ID NO: 183287 - protein, 487 aa, Unknown
  Bacterial polypetide isolated from the Sargasso Sea
MSKSLVIVESPAKAKTISKYLGPNYIVESSVGHIRDLPKKASSDVKRFTTPKNISPEEKARLKSINERKRLIRRMGIDPDNGWEAVWQIIPEKEKVIKNLKKIAKNCEHIYLATDLDREGEAIAWHLKEALGSEKYNYSRVRFNQITKDAINESFLDPKEIDLDLVKAYRARRFLDKVIGFELSPLLWKKIARGLSAGRVQSVALRLLDERERSIQEFIPEEFWEIDLDVVSKQNEKLKFILNRRKNDPLLKQEDVKLIRDKINDNQLSINEIIKKPVKVKPKPPFITSTLQQSASTRLGFNVKRTMRVAQKLYEAGYITYMRTDAPSLSKDSINDARNFINENLGENYLTNAPRIYSSTENAQEAHEAVRPTNTFLRSSDLINLSEEEIKLYKLIWERFVASQMPDAEYLSTSAKTFVDEHIFVAKGRELVFDGFTKVLKTSSKEEDILPSLNEGDSLTVENINLEQKYTKPPSRFSEAALVRELE

SEQ ID NO: 183288 - protein, 609 aa, Unknown
  Bacterial polypetide isolated from the Sargasso Sea
MNLVIVESPAKAKTINKYLGSDYTVLASYGHIRDLPSKNGSVDPENDFKMIWEVDSFSKKYLKEITDSAKDSKKIILATDPDREGEAIAWHVKEFLEEKKLLKDKEVERVVFNEITKKAVTNGIDNPRKIEPHLVDAYMARRALDYLVGFNISPILWTKLPGSKSAGRVQSVALRLLTEREQEIEVFQPKEFWTLNIIFKNNKNEKINTTISQLDGNKVEKFSFKNKQDINDALSKIKNKKYNITDISSKTYNRNPSGPFTTSTLQQTASSKLGFGASRTMQIAQRLYQGIDIEGETVGLITYMRTDGTNISKDAITSFRDFIMQNYGDKYLPEQPLNYSGKKAKNAQEAHEAIRPTEIIRKPEDMKKYLSTDQYKLYNLIWSRSLSSQMQSAKFDRKTITINSDDDKNIFKASGSTLKFDGFLKLYKIDENDDDNENILPDVEKGDVMFEDHIDEQHYTQPPPRYSEASLVKKLEELGIGRPSTYASIISVIANRGYADINNKRFFPTDRGKLLSAFLEKLFTKYVDYDFTAKLEDQLDDITSGKENWIKVLENFWKDFNSNVSGVKEKRTREVLDLLNESLGSLIFEVDKDGNIDRKCKLCESGQLS

SEQ ID NO: 183289 - protein, 132 aa, Unknown
  Bacterial polypetide isolated from the Sargasso Sea
MNLVIVESPAKAKTINKYLGPNYTVLASYGHIRDLPSKNGSVDPEDKFKMIWEVDSFSKKYLKEIVDAAKISKKIILATDPDREGEAIAWHVKEYLEEKKLLKDKEIERVVFNEITKKAVTNGIDNPRNIES

SEQ ID NO: 183290 - protein, 382 aa, Unknown
  Bacterial polypetide isolated from the Sargasso Sea
KGADQLLLATDEDREGESISWHLLQLLAPKVPVKRMVFHEITKEAIGKALDQTRDLDMELVHAQETRRILDRLVGYTLSPLLWKKVAWGLSAGRVQSVAVRLLVQRERARRAFRSGSYWDLKAQLEHAGSGFEAKLTHLDGRRIATGNDFDESTGGLKEGSEVRLLTEEEARSLAQTVQTAAWSVDAVEEKPTVRKPVPPFTTSTLQQEANRKLRLSARETMRCAQGLYERGFITYMRTDSVHLSDQAISASRSCVEGLYGNEYLSKGPRQFSTKARNAQEAHEAIRPSGESFRTPGDTGLEGRDLAVYDLIWKRTVASQMAEARLTMLSIDLSSGEASFRASGKRIDFPGFFRAYVEGSDDPDAALEGQEVLLPALAVGDA

SEQ ID NO: 183291 - protein, 574 aa, Unknown
  Bacterial polypetide isolated from the Sargasso Sea
LEKIKKKKYKIVDISSKTYTRNPQGPFTTSTLQQTASSKLGFGASRTMQIAQRLYQGIDISGDTVGLITYMRTDGTNISKDAIEDFRDFIQNSYGENYLPKEANNYSGKKAKNAQEAHEAIRPTDIKRTPEEMKKFLSTDQIKLYDLIWSRALSSQMEPAKFDRKTITIASEDNLDQFKCSGSTLKFDGFLRVIKQNENEDETILPNVKEEKVEINNFVDEQHFTQPPPRYSEASLVKKLEELGIGRPSTYASIISVISNRGYADIVNKRFFPTDRGKLLSAFLEKLFTKYVDYGFTADLEDQLDNITSGKEDWIKVLEKFWNDFNINVSNVKEKRTREVLDLLNESLGELIFESNDGEIDRKCKLCNNGELSLKNSFRGGAFIGCSNYPECKFTRPLSKAKAKDQIALSEPKLIGSNDSGKEIFLKNGRFGPYLQYEIDDDSDVLKKKKKKKENDNLKNVSIPKGIDIETIDLDKAKYLCSLPKILGQHPDSGKDITVNSGRFGPYLKCENKSARLENVDELFTIGLNRAITLIAEAKPGRISSSLIKDLGEHPEDKKPVRIMKGQYGPYIKY

SEQ ID NO: 183292 - protein, 711 aa, Unknown
  Bacterial polypetide isolated from the Sargasso Sea
EIDSFSKKYLKEISDVAKDSKKIILATDPDREGEAIAWHVKEFLNEKKLLKDKKIERVVFNEITKNAVTNGIENPREIESDLVNAYMARRALDYLVGFNISPILWTKLPGSKSAGRVQSVALRLLTEREHEIEIFKPEEFWSLKVNFKTSDGNLITSNIFQIENKKIEKFSFKNKNDINQAIEKIKKDKYKITDITSKIYSRNPSGPFTTSTLQQSASSKLGFGASRTMQIAQRLYQGIEIEGETKGLITYMRTDGTNISKEALPVFRNFISDNFGNEYLPDQPINYSGKKAKNAQEAHEAIRPTEISNTPEKMKKYLSSDQNKLYNLIWSRALSSQMTPAKFDRKTIIIESNNKEHIFKSSGSTIVFDGFMKVINLDDDNNDENILPKVEKGEVNISDFIDEQHFTQPPPRYSEASLVKKLEELGIGRPSTYASIISVISNRGYADVVNKRFFPTDRGKLLSAFLEKLFARYVDYDFTAKLEDQLDDITSGKENWLSVLDQFWQDFNKNVSSVKEIRTREVLDMLNESLGNLIFYTNDDGKIDRSCKLCANGTLSLKNSFRGGAFIGCSNYPECKFTRPLSKIKASQQINLAEPKLIGKNDNDKEIYLKSGRFGPYLQYELLEDEIVKTKKRKTKKEENNLKNVSIPKGLDIENIDLEKAKYLCSLPKILGTHPDIGKEITVNVGRFGPYLKCENKSARIESVDELFFLV

SEQ ID NO: 183293 - protein, 537 aa, Unknown
  Bacterial polypetide isolated from the Sargasso Sea
PEEFWDVHADLTSQQKAALRMLVAKHQGNAFKPKNKAESDKALADLEGANYTVESRESKPTQSRPSAPFITSTLQQAASTRLGFGVKKTMMMAQRLYEAGYITYMRTDSTNLSQEALDSARAYISDNFGDKYLPDSPNRYGSKEGAQEAHEAIRPSNVSISAASLGDMERDAQRLYELIWRQFVACQMTPAKYDATTIKVAAGDYELTAKGRVLKFDGWTRVQPQLRKKGEEELMLPDVQKGDVLDLKALDPKQHFTKPVARFNEASLVKELEKRGIGRPSTYASIISTIQDRGYVRLENKRFYAEKMGEIVNDRLMENFDDLMSYDFTANMEQHLDDIAEGKKDWKDVLNDFYSGFYGKLLNAEKDPEEGGMRLNQAVPAGVECDKCGREMNVRTASTGVFLGCSGYNLPPKERCTNTMNLTPGDEVVKVDDEEELETEALRSKKRCPKCGTAMDSYLVDETRKLHVCGNTPTCDGTLVETGTFKIKGYDGPIIECDKCGSDMELKNGRFGKYFGCTNEECKNTRKLLRNGEAAPQ

SEQ ID NO: 183294 - protein, 391 aa, Unknown
  Bacterial polypetide isolated from the Sargasso Sea
KTISKYLGSEYIVESSVGHIRDLPKKASPSSKRASIPKDVSPEEKLRLKTINDRNRLIRRMGIDPDNGWTANWQIIPEKEKVIKSLKKAAKGVDHIYLATDLDREGEAIAWHLKEILGPEKYEYSRVRFNQITKSSIIDSFNDPKEIDLDLVKAYRARRFLDKVIGFELSPLLWKKIARGLSAGRVQSVALRVLDERERLIQEFIPEEFWEISMYLLKNELKVPFYLNRRKSEPLLKEDEARSIEKLIQNADLSIDEIIKKPVKTKPRAPFITSTLQQAASTKLSFNVKRTMRVAQKLYEAGHITYMRTDAPSLSKESIQDARNFIGERIGENYLTNAPRIYSSTENAQEAHEAIRPTNAYMTPDDLLNQTEEEKRLYQLIWQQYIACQMP

SEQ ID NO: 183295 - protein, 383 aa, Unknown
  Bacterial polypetide isolated from the Sargasso Sea
CLEAVNNSRKINYDLVDAQRARRAIDRIVGFSFSPVLWKTLRSLKNKGLSAGRVQSVALKLLVDREKLRNKFIENKFYAIDANISEEKSGEIFKASLVSYNGKPVAKSDDFGKFDVGLKDDNIIQVDQKLAEQIKEECNANDWLVNNIESKPTSSSPAPPFTTSTLQQDASRRFGFSPKRTMVVAQKLYEQGFITYMRTDSTHLSSEALNASKKFIESSFGNDFLSEKTNIYKNKVANAQEAHEAIRPAGTAFSKVENVQKIGADEAKLYELILNRTVASQMKPAQYIRTNVEIHNGTSIFKASGNVTVFKGYTLAYEQALTRKDKGRPDSLPALDKQSKIQSKEVLLEEKTTSPPRRFSEAMLVKEMETRGIRRPSTYSAII

SEQ ID NO: 183296 - protein, 351 aa, Unknown
  Bacterial polypetide isolated from the Sargasso Sea
LQNKNNKNIFSKLSLFNGEKIEKFSFKNKEEIQKAVDVINKTKFKITDVNTKVFRRNPLAPFTTSTLQQTASGRFGFGASRTMQIAQRLYQGVDIEGETTGLITYMRTDGTNISNEAIEDFRKFITDDYGDKYLPEAPNSYTGRKAKNAQEAHEAIRPTNISRKPSDIKKYVNADQFKLYELIWSRALSSQMTPAEFDRNTIIISSNDNKINFRASGSVVKFDGFLKVYQVQETDEDAKNILPEVKVGEEINILKLNDEQHFTDPPPRYSEASLVKKMEELGIGRPSTYASIISVLSTRNYVELINKRFNPTDRGKLISAFLEKLFSKYVDYNFTADLENQLDEITSGKIE

SEQ ID NO: 183297 - protein, 367 aa, Unknown
  Bacterial polypetide isolated from the Sargasso Sea
SVALKLITEREHEIELFNPEEFWTLSLKFQDEKKNSITASIYQLDWKKIEKFTFRKKEDIEKAITGLKNKKYNISDISSKIVNRNPSGPFTTSTLQQVASSRLGFGASRTMQIAQKLYQGIEIEGDTVGLITYMRTDGTNLSADAISDLRNFIKKSYGNEYIPEKANNYSGKKAKNAQEAHEAIRPTDINRSPETVKKYLSTDQNKLYNLIWSRALSSQMLSAKFDRNTITIETEDKNTVCKTSGSVLKFDGFLKVYKNPNSEDDDEILPEVKKGPINIESFLDEQHFTQPPPRYSEASLVKKLEELGIGRPSTYASIISTISNRGYAEITNKRFFPTDRGKLISAFLEKLFSKYVDYNFTAGLENQ

SEQ ID NO: 183298 - protein, 330 aa, Unknown
  Bacterial polypetide isolated from the Sargasso Sea
MRYTLIQGQGNFGSIDGDPPAAMRYTEVRMQKISDEILADLEKETVSFSENYDGSEQMPDVMPTKIPNLLINGSSGIAVGMATNVPPHNLTEVINGSLNLLENPKLSIDQIIDSISGPDFPTGGTIDGKMGIYEAYKTGRGIIYVRSKSKVEESKTGKKSLVIYEIPYMVNKARTLEKIAELVKEKKIDGISEIRDESDKDGLRIVIDVKKGESVEVLENNLFSQTQLEQSFGINFTVLVDGQPRVLNLKDILQEFLKHRKDVVLKRTKFELRKAKERGHIVEGLMVAIANIDEIIKIIKKSKDPKIAALELVKKKWKAGPVEAILKKVG

SEQ ID NO: 183299 - protein, 144 aa, Unknown
  Bacterial polypetide isolated from the Sargasso Sea
MTKNNTYQADAIKVLKGLEAVRKRPGMYIGDTDDGTGLHHMVYEVVDNSIDEALAGYCNNISVKINSDGTITVKDDGRGIPVDIHKGEKKSAAEVIMTQLHAGGKFDHDSYKVSGGLHGVGVSVVNALSEKLKLEINRDGKKYF

SEQ ID NO: 183300 - protein, 212 aa, Unknown
  Bacterial polypetide isolated from the Sargasso Sea
MEKTPIQNKNLFSPILVQDEMSSSYLSYAMSVIVSRALPDVRDGLKPVHRRIIYAMYKGGYDWSKPFRKSARIVGDVIGKYHPHGDQAVYDALVRLVQDFSMSLPLISGQGNFGSIDGDPPAAMRYTETKLAKIAQHLTEDLEKNTVLYRNNYDETEKEPTVLPSQYPNLLVNGAGGIAVGMATSIPPHNLKEIINGTVAFINNKDITISAN

SEQ ID NO: 183301 - protein, 308 aa, Unknown
  Bacterial polypetide isolated from the Sargasso Sea
RNALSKELTLTICRDGGMYQQKYSEGLAKTKLKKIKASKETGTEITFSASDKIFTSINFEADRVNKRVQELSFLNAGVSIEVTDARTGKSKKFKNEGGVSSYVDYLRGRKPSLCQTIQCEGGQDGVTVEVAMQWNDSYNENVLCYTNNIPQKDGGTHLSGFRSSLTRVLKAFIKKEELNKNVPVDLLGEDVREGLIAVISVKVPDPKFSSQTKEKLVSSEVESIVSSVLNKGLNEFLLENPKEAHGILSKVSEAALAREAARKAREMTRRKGVLELAGLPGKLADCQEKNPELSEIYLVEGDSAGGSA

SEQ ID NO: 183302 - protein, 300 aa, Unknown
  Bacterial polypetide isolated from the Sargasso Sea
MFNKVKLKFCFKKSARIVGDVIGKFHPHGDQSVYEALVRLAQNFSTRYPLVDGQGNFGNIDGDNAAAMRYTEARLTALAELMLKDISEDTIDYINTYDGIDHEPIVLPSAFPNLLANGSSGIAVGMATNIPPHNINELFKALSKLLKNPNYTNSQLLKLIPGPDFPTGGEIIDSDDALKDAYVKGKGTIRLRARWKKEDLGRGQYQIIVYEIPYQVNKARIIEKISDLIDNKKANYLEAIQDESAEDIRIVLIPKNRSFKAEVIFEDLCKNSDLEIRYAINFNAINHKLEPKLFSLKESL

SEQ ID NO: 183303 - protein, 345 aa, Unknown
  Bacterial polypetide isolated from the Sargasso Sea
FKGLDAVRNRPVMYIGDTDDGTGLHHMVFEVVDNSVDEALAGSCTHIEVIIHEDDSITVKDNGRGIPVDKHKTEKTSAAEVIMTVLHAGGKFDDDSYKVSGGLHGVGVSVVNALSETLNLRIHKNGHTYEQDYVHGVPQKPLKKGSKTNRCGTTVTFKPSAKTFTNTTYSFDILSKRLRELSFLNSGLSIKLTDARSGKEDEFYFEGGISAFVSHLNKVQSPVHESVINFSKTIDDITVDIAIQWNESYRENMYCFANTIRQKDGGTHLAGFRGALTRTINTYIDKEIAKADISVSGEDCREGMTAIISVKHPDPKFSSQTKDKLVSSEVKGVVESVVNKHLKEF

SEQ ID NO: 183304 - protein, 297 aa, Unknown
  Bacterial polypetide isolated from the Sargasso Sea
QTKERLDSKDHMSFVSSSTKDSLSIWLNQHTEEGEKIADLAIAAAQKRIKSSTKVDRKKTFKGPALPGKLSDCNCDNIEESELFLVEGDSAGGSAKQARDRRFQAIMPLRGKILNTWDLESADIIKSQEIKDLATAIGSLPGDTDISNLRYGKICILADADSDGLHIATLLCALFLRHYKNLVTSGKIFVSMPPLYRIDAAKEVFYALDENEKESIVKKIKKQNSKIKIDIQRFKGLGEMNPSQLRETVMKPESRRLVQLTLSSSDNANSVFDLLLSKKRAPDRKEWLEKKGNLAEI

SEQ ID NO: 183305 - protein, 313 aa, Unknown
  Bacterial polypetide isolated from the Sargasso Sea
HPHGDQAVYDALVRMVQEFSMSLPLIDGQGNFGSIDGDPPAAMRYTETKLSKISQYLIDDIEKNTVNFKSNYDETENEPVVLPAQYPNLLVNGAGGIAVGMATSIPPHNLGEIINGTLALIENKDIKLNELMKHIPGPDFPTGGTIIGKNIIKEGYKVGRGSFKIRGNINIEQRKNGKERIVITSIPYQVNKSTLNERIVELVRDKKIEGISDIRDESNREGIRVSIDLRRGVEPETVKRQLYKYTSIESSFGFNTLAIVNKKPQTCSLKDFLENFLSFREDVVVKRTKYDLNKAEERAHILIGLTVSIENLD

SEQ ID NO: 183306 - protein, 311 aa, Unknown
  Bacterial polypetide isolated from the Sargasso Sea
MVCIFGDTDDGTGLHHMVYEVVDNSVDEALAGHCKMISVILNADESVTVKDDGRGIPTEIHKEEGISAAEVIMTQLHAGGKFDQNSYKVSGGLHGVGVSVVNALSEKLDLSIKRDGKEHAMSFQNGETVKALKAVKDCKDETGTEITFYPSKSVFTMTEFSRRTLEARLREMAFLNSGISIHLEDKRKDEPWAKTMSYEGGLEEFVKHIDQTRKSLMDLPISFSGKKDEIEVDVSMWWNDSYYETVNCFTNNIPQKDGGTHLAGLRSALTRVVNSYAQDTGLTKKENVQLVGEDIREGFTCVLSVKVADPK

SEQ ID NO: 183307 - protein, 288 aa, Unknown
  Bacterial polypetide isolated from the Sargasso Sea
DKLVSSEVRNIVENFMNEKLSIWFDQNPSIIKVVLLKIIQAAQARDVARKARESVRRKGALELTGLPGKLADCQNSKRDGTELFIVEGDSAGGSAKQGRNREFQAVLPLRGKILNTYVEEVNSKRNGNSNDSKTKALSKMISSNEIVTLINALGLDPKAEEIDLDDLRYGKIIIMTDADVDGSHIRALLLTFFNNKPFNKLIENGNIFLAQPPLFKINKSGKSIYIKDEKSLENFILNNSKNSKKIKKGSKEFEKMLSEEKSKLNIQRFKGLGEMNPDELWNTTLDPD

SEQ ID NO: 183308 - protein, 327 aa, Unknown
  Bacterial polypetide isolated from the Sargasso Sea
KYADSSGLTDKLKFDISGDDFREGLTAVISVKVAEPQFEGQTKTKLGNREVSAAVSQAVSEMLENYLEENPNDSKIIVQKVILAAQARHAARQAREMIQRKTVMTGGGLPGKLSDCSETDPLKCEVFLVEGDSAGGTAKQGRDRVFQAILPLRGKILNVEKAQQHRVFENEEIRNIYTALGVSIGTEDDSKALNLEKLRYNKIIIMCDADVDGSHISTLILTFFFRYMRELVEGGNVYIATPPLYLVKKGNKKAYAWNDKERDNLAKEFGSGVSIQRYKGLGEMNADQLWDTTMNPETRTLRQISLNFDNSQEAERWFSTLMGDDVP

SEQ ID NO: 183309 - protein, 323 aa, Unknown
  Bacterial polypetide isolated from the Sargasso Sea
NSYKVSGGLHGVGVSVVNALSERLKLTINRDNKKYYIEFKNGDAKISLKEVGKSKTSGTEINFVPSKDIFSSIKFSFSILEKRMRELAFLNKGIKIVLSDLRQKKPKTLEFKFEGGISEFVQFIDEKKESLKNKNENDLFKKPIYIEGLKNNIDVQCSLKWNAGYSEDVLPYTNNIYQKDGGTHLLGFRSALTRVVNKYANEQNLLKKNKVSLSGDDVKEGLTSVLSIKIPDPKFSSQTKDKLVSSEVRNIVETIINEKLSIWFDQNPSISKIILTKIIQAAVARDVARKARENVRRKGALELTGLPGKLADCQNSKQDGTEL

SEQ ID NO: 183310 - protein, 80 aa, Unknown
  Bacterial polypetide isolated from the Sargasso Sea
MNNYQADSIKVLKGLEAVRKRPGMYIGDTDDGTGLHHMIYEVVDNSIDEALAGHCKKIEVILNSNGSVTVKDDGRRIPVD

SEQ ID NO: 183311 - protein, 97 aa, Unknown
  Bacterial polypetide isolated from the Sargasso Sea
MINEHENNYDADSIKVLKGLEAVRKRPGMYIGDTDDGSGLHHMVYEVVDNCVDEALAGHCSEISVSLFDGSLVTVRDNGRGIPTDIHPGEGISAAEV

SEQ ID NO: 183312 - protein, 147 aa, Unknown
  Bacterial polypetide isolated from the Sargasso Sea
MAKKSKEAKYDSSNIQVLKGLEAVKKRPGMYIGDTDDGSGLHHMVFEVLDNCIDEAMAGYCSDINVIINKNGSVTIEDNGRGIPVDVHKKEGVSAAQLIMTTLHSGGKFDDNSYKVSGGLHGVGVSVVNALSKKLTLEVHRDGGEYF

SEQ ID NO: 183313 - protein, 128 aa, Unknown
  Bacterial polypetide isolated from the Sargasso Sea
MPKKNNYDSSNIKVLKGLEAVQKRPGMYIGDTDDGSGLHQMVYEVMDNSIDEALAGHCSNITVTVHEDNAVTVEDNGRGIPVDEHPTEKKSAAEVIMTVLHAGGKFDDNSYKVSGGLHGVGVSVVNAL

SEQ ID NO: 183314 - protein, 345 aa, Unknown
  Bacterial polypetide isolated from the Sargasso Sea
HPHGDQAVYDAMVRLVQEFSVRYPLVDGQGNFGSIDGDRAAAMRYTEARLTEIAELLLKDIDKNTVGFVSTYDGEYDEPIVLPALFPNLLANGASGIAVGMATNIPSHNIIELLMAIRHLIKRPNASITSIMKYIKGPDFSTGGILIDDNDTITKAYETGRGSFRLRANWFVEKKTHGQYVIVINEIPWSITKARIIEKIEEIISNKRISILSDIVDESSEDIRILIIPKNRDVNPDQLMSRLFKISDLELKINMNMNVIDSNKTPRVMNVKEVLLSFINHRLEVVVRYSKNRLRIAVDRKEVLEGYLIVFDNLDEIIEIIREDDNPKETIMKKWNLTDMQSESI

SEQ ID NO: 183315 - protein, 144 aa, Unknown
  Bacterial polypetide isolated from the Sargasso Sea
MQKEQISKDNNIKPISMYDEMSSSYLSYAMSVIISRALPDIRDGLKPVHRRILYAMHKGGFDWSKQFRKSARIVGDVIGKYHPHGDQAVYDALVRMVQDFSMSLPLIDGQGNFGSIDGDPPAAMRYTETRLAKVAQYLIDDIEK

SEQ ID NO: 183316 - protein, 306 aa, Unknown
  Bacterial polypetide isolated from the Sargasso Sea
GEVKGLVDKVVYEGILDFLEENPSIGRKVIEKALLAARSRSAARKARELIRRKSALGGSSLPGKLADCSNKDPVFCELYLVEGDSAGGSAKQGRDRKNQAILPLRGKVINSEKARVDKLLSNNEIQSIITALGTGFGGGDEETGERSAGDFDIEKIRYHKIIIMTDADVDGSHIRTLLLTFFYRKMKQLIDGGYLYLALPPLYRVHQGKKAAYAYDDNERDLLIERMKKDNKNTKVGIQRYKGLGEMNPEQLWDTTMDPEKRTLLQVTVESAEAAAVTFQNLMGSDVEARRTFIEKNAKFVANLDI

SEQ ID NO: 183317 - protein, 289 aa, Unknown
  Bacterial polypetide isolated from the Sargasso Sea
HGGTHVSGFRSGLSESVKEFADYRNLLPRGIKLSPEDVWMGLSYIISVRIEDPQFSGQTKEKLSSRAVSGFVTGLIKDAFTLWLNQHPEAGDQIVARAIENAQKRAKKNVKVKRKKATGGPTLPGKLADCTSDEPDLCELFIVEGDSAGGSAKQARDRVFQAILPLRGKILNSWEVDESNLLSSQEISNISQALGIEPGADELGNLRYHKICILADADSDGLHIATLICALFLKHFRKLVEDGHVYVSMPPLYRIDVGKDVHYALDETEKDSILKALEKKKPNTKTTVT

SEQ ID NO: 183318 - protein, 182 aa, Unknown
  Bacterial polypetide isolated from the Sargasso Sea
MAKKSSEAKYDSSNIQVLKGLEAVKKRPGMYIGDTDDGSGLHHMVFEVLDNCIDEAMAGHCSDIKVTINKNGSVTVEDNGRGIPVDVHKKEGVSAAQLILTTLHSGGKFDDNSYKVSGGLHGVGVSVVNALSKKLTLEVHRDGGEYFQEYENGKPKAKLKQVKKSEKTGTKITFFPSEQIFT

SEQ ID NO: 183319 - protein, 207 aa, Unknown
  Bacterial polypetide isolated from the Sargasso Sea
MSSSYLSYAMSVIISRALPDIRDGLKPVHRRILYAMHKGGYDWSKQFRKSARIVGDVIGKYHPHGDQSVYDALVRMVQDFSMSLPLVDGQGNFGSVDGDPAAAMRYTETRLSKVSKFLIDDIEKNTVDFKNNYDETEKEPIVLPAQYPNLLVNGAGGIAVGMATSIPPHNLGEIIDGTLALIENREIKIKELMKHIPGPDFPTGESL

SEQ ID NO: 183320 - protein, 267 aa, Unknown
  Bacterial polypetide isolated from the Sargasso Sea
MAKKKKQESSEYTAGQIQVLKGLEAVRKRPGMYIGSTSGRGLHHLVYEVVDNSIDEAMAGHCTRVTVTVHEDDSVTVEDDGRGIPVDIHPTEQVPGVELAMTTLHAGGKFDKDTYKVSGGLHGVGVSVVNALSAFLEVEIRRGGKLYHQRYERGIKTKELEEKGKAKGSGTQVTFKPDDEIFTDLVYSFEILSNRLRELAFLNKGLQIVLVDERGDRVEESYQYEGGIAEYVTFLRGSRGSLHDKICYFEASKPEAEIELALQYDQG

SEQ ID NO: 183321 - protein, 277 aa, Unknown
  Bacterial polypetide isolated from the Sargasso Sea
MSKNNYGADKISVLKGLEAVRKRPAMYIGDVGKRGYHHLVSEVVDNSIDEALAGFCTSIIVTIKNDGFISIEDNGRGIPVEIHKTEGKPALEVVMTVLHAGGKFDKNTYKVSGGLHGVGVSVVNALSETLIAEVHRDGFYYKQEYKIGEPTTEVEKIGKSDKTGTIISFKPDQSVFSHKGFEEEIIKGRLKELAYLNKNLSIKLINEPEETETEYCFPGGLSDFVKYLDGNEDLIHDEVISVTKEDIEVPVDLALRYSTNYNSNIFSFVKHINTIEG

SEQ ID NO: 183322 - protein, 202 aa, Unknown
  Bacterial polypetide isolated from the Sargasso Sea
MIENKSKPEYSADKITVLKGLEAVRKRPAMYIGDVGVKGLHHLIWEVVDNSIDEAMAGHCTEIKVSILPNGGVCVEDNGRGIPVDINKKEGKSGLELVMTVLHAGGKFDKDSYKVSGGLHGVGISVVNALSKKCSVFVKRDGGLFSQSYEYGKSTTEVLRDGDSSSTGTKVIFYPDDEIFTEHVYLFDTVDERLRELAYLNS

SEQ ID NO: 183323 - protein, 150 aa, Unknown
  Bacterial polypetide isolated from the Sargasso Sea
MSNNYGADKISVLKGLEAVRKRPAMYIGDVGKRGYHHLVSEVVDNSIDEALAGFCSSIIVTIKNDGFISIEDNGRGIPVETHKTEGKPALEVVMTVLHAGGKFDKNTYKVSGGLHGVGVSVVNALSESLIAEVHRDGFHYKQEYKIGQPT

SEQ ID NO: 183324 - protein, 332 aa, Unknown
  Bacterial polypetide isolated from the Sargasso Sea
ELTDSKDQNEDLKTGKEQSVIPILIDTEMQNSYLDYAMSVIVSRALPDVRDGLKPVHRRILYAMHESGYEWNKQHRKSARVVGDVIGKYHPHGDQAVYDALVRLAQDFSMSVPLLDGQGNFGSMDGDRAAAMRYTEVRMAKIASFLLEDIEKETVDFRPNYDETESEPSVLPAKYPNLLVNGAGGIAVGMATNILPHNLGEVIDASIAYLENTDVTFEEINQIIKGPDFPTGGTIIGIKGIKDSQSSGRGSIIVQAKSNIEEFKTDREAIVFTEVPYQVNKSSLLEKIAELVRDKKIDGISDLRDESDRQGVRVVVELKKGVISQVVLNKIY

SEQ ID NO: 183325 - protein, 178 aa, Unknown
  Bacterial polypetide isolated from the Sargasso Sea
KVVRFKESAVRAMGRTATGVRGIKLAGDDKVVSLIIPRGEGAILTVTQNGYGKRTAAAEYPTKSRATQGVISIKVTERNGSVVGAVQVDDCDQIMMITDAGTLVRTRVSEVSIVGRNTQGVILIRTAEDENVVGLQRVAEPVDDEELDAIDGSVAEGDDEIAPETDADADDDTVEDEE

SEQ ID NO: 183326 - protein, 309 aa, Unknown
  Bacterial polypetide isolated from the Sargasso Sea
MPKSKKNTNTKNYDSSNIKVLKGLDAVRKRPGMYIGDTDDGTGLHHMVFEVVDNSVDEALAGFCTHIEVIIHEDDSITVKDNGRGIPVDKHKTEKTSAAEVIMTVLHAGGKFDDDSYKVSGGLHGVGVSVVNALSETLNLRIHKNGHTYEQDYVHGVPQKPLKKGSKTDRSGTTVTFKPSPKTFTNTTYSFDILSKRLRELSFLNSGLSIKLTDTRSGKEEEFYFEGGISAFVSHLNKVQSPVHESVINFSKTIDDITVDIALQWNESYRENMYCFANTIRQKDGGTHLAGFRGALTRTINTYIDKEIA

SEQ ID NO: 183327 - protein, 350 aa, Unknown
  Bacterial polypetide isolated from the Sargasso Sea
MHKGGFDWSKQFRKSARIVGDVIGKYHPHGDQAVYDALVRMVQDFSMSLPLIDGQGNFGSIDGDPPAAMRYTETRLSKISQFLIDDIEKNTVDFKSNYDETEREPTVLPAQYPNLLVNGAGGIAVGMATSIPPHNLGEVINGTLALIDNKDIKIKELMKHIPGPDFPTGGIIIGKNIIKEGYKSGRGSFKIRGEIAVENLKNNRDRLVITSIPYQVNKSVLNEKIADLVREKKIEGIRDIRDESNREGIRVAIDLRTGVEPETIKRQLFKYTSIESSFGFNTLAIVDNKPKTCNLKEFIEQFLKFREDVVIKKTKFDLKKAEDRAHILIGLSISVENLDKVIKIIRSSKN

SEQ ID NO: 183328 - protein, 326 aa, Unknown
  Bacterial polypetide isolated from the Sargasso Sea
SGGLHGVGVSVVNALSEELTLKICRDGGQYEQKYANGKAQTKLKKVKTSKETGTEITFKPSKEIFSFVNFDIDKINKRVQELSFLNAGVNILVEDKKTGKSKKFSNSGGLSSYVKFLKGRKQNISEIFHCEGEQDGLSVEIALQWNDAYSENVLCYTNNIPQKDGGTHLSGFRSSLTRVMKTFIRKEELNKKSPVELLGEDVREGLTAIVSVKIPDPKFSSQTKEKLVSSEVESVVSNVFNKNFNEYLLENPKEAMSILTKISEAALAREAARKAREMTRRKGVLEVAGLPGKLADCQEKDPALSEIYIVEGDSAGGSAKQGRNRQ

SEQ ID NO: 183329 - protein, 249 aa, Unknown
  Bacterial polypetide isolated from the Sargasso Sea
MSDFAKEIISVNIEDELKQSYLSYALSVIHGRALPDIRDGLKPVHRRILYAMYDLKNFYNRPYKKSARVVGDVIGKYHPHGDSAVYDAMVRMAQDFSMRYPIVEGQGNFGSIDGDPPAAMRYTEVRMAKIADQMLGDIEKDTVSYSPNYDGSENIPDVLPTKIPNLLINGSSGIAVGMATNIPPHNLTEVLNGCVNLINNPKISIDELIKDISGPDFPTGGTKLMEKLVFTKLIKLEEELFISDQILLL

SEQ ID NO: 183330 - protein, 299 aa, Unknown
  Bacterial polypetide isolated from the Sargasso Sea
DEALAGYCKNIEIDINKDDTVTVKDDGRGIPVDMHKGEKKSAAEVIMTQLHAGGKFDHNSYKVSGGLHGVGVSVVNALSENLKLEIDRDGKKYFMEFKNGKARSPLKVIGKSKTSGTKINFFPSKEIFSSVKFNSNIIQKRMRELAFLNKGIKISVNDFTQKKEKKIEFKFEGGIVEFVNYLDEKKEKLQNKNGNDLFKKPIFIEGKKNDILLECSLKWNAGYGEDVNSYTNNIFQKDGGTHLLGFRSALTRVINKYATENNLLKKNKLSISGDDIKEGLTCILSIKIPDPKFSFKQKI

SEQ ID NO: 183331 - protein, 213 aa, Unknown
  Bacterial polypetide isolated from the Sargasso Sea
MTNNNTYQADSIKVLKGLEAVRKRPGMYIGDTDDGTGLHHMVYEVVDNSIDEALAGYCKNINVKINSDGTITVNDDGRGIPVDIHKGEKKSAAEVIMTQLHAGGKFDHDSYKVSGGLHGVGVSVVNALSEKLQLEIFRDGKKHYIEFKNGEAKAPLKVVGRAKNTGTQITFLPSKEIFSSTKFSANILIKRMRELAFLNKGIKIIFTDAKVQK

SEQ ID NO: 183332 - protein, 366 aa, Unknown
  Bacterial polypetide isolated from the Sargasso Sea
TGVELIMCKLHAGAKFSGEDYGFSGGLHGVGVSVVNALSTKLNVKIKRDSKEYEINFSAGDKDNDLKSIGDVGATNSGTTIRFYPDKQYFETLEINKKSLKHLLKAKAVLCPGLQIDYFDEKKNERIKWIFDEGLSDYLDEFSGCNEKLLDETIILSKTSDDQALDVAVNWTEEASNNLLKETYVNLIPTALGGSHLNGFKSGLLEAIKEFCDYRNLIPKGIKINSDDILANCIFVISSKLKNPQFAGQTKERLDSKDHMSFVSSSTKDSLSIWLNQHTEEGEKIADLAIAAAQKRIKSSTKVDRKKTFKGPALPGKLSDCNCDNIEESELFLVEGDSAGGSAKQARDRRFQAIMPLRGKILNTWD

SEQ ID NO: 183333 - protein, 252 aa, Unknown
  Bacterial polypetide isolated from the Sargasso Sea
MSKEESLPIGGYAEKAYLEYSMYVILDRALPFVGDGLKPVQRRIIYAMSELGLKSSAKFKKSARTVGDVIGKFHPHGDSAAYEAMVLMAQNFSTRYPLIEGQGNFGSLDDPKSFAAMRYTECRLSAYSQNLLTEISQGTVDWMPNFDGTLIEPKFLPARLPNVLLNGASGIAVGMATDIPPHNLTDVVKATIALLESPKMSIKELMKYIPSPDFPTKAKIISTPDEIEEIYTTGRGSIKLRATYDVENGEIV

SEQ ID NO: 183334 - protein, 330 aa, Unknown
  Bacterial polypetide isolated from the Sargasso Sea
NIHQKDGGTHLLGFRSAITRVINKYATDGNLLKKNKVTIEGNDTREGLTGVLSVKIPDPKFSSQTKDKLVSSEIRFIVESIVTDKLSTWFDQNPGIRKIVLLKIVQAAIARDVARKAREGVRRKGSLELSGLPGKLADCQIGKAEGTELFIVEGDSAGGSAKQGRNREFQAVLPLRGKILNTYIDTNGSKNRNGNGQDAQTKALSKMMSSNEIVTLINALGTGSKDFNIDNLRYEKIVIMTDADVDGSHIRTLLLTLFNNYPFNELIEKNHIYLAQPPLYKITKGSKSYYIKDDKELENFLIKSSEKNKNSIKKNSKEFEKFIQKEKSKI

SEQ ID NO: 183335 - protein, 173 aa, Unknown
  Bacterial polypetide isolated from the Sargasso Sea
MSNKNTNTEYSAENIKVLEGLEAVRKRPAMYIGDVGKRGLHHLIYEVVDNSIDEALAGYCDRVIVVFNPDGSVTVEDNGRGIPVDIHKEEKKPAVEVVMTVLHAGGKFDKGSYKVSGGLHGVGVSVVNALSEWLWVEVRRDGKKHRQDYKIGEPQNKLKTTGEAKKTGTKVCF

SEQ ID NO: 183336 - protein, 315 aa, Unknown
  Bacterial polypetide isolated from the Sargasso Sea
PKGLKLNADDVLNNAIFVVSSKLQNPQFAGQTKERLDSKDHMSFVSSSTKDILSIWLNTHTEEGEQIAELAIISAQARAKASNTVERKKTFKGPALPGKLSDCNSEDLNKTELFLVEGDSAGGSAKQARERSFQAIMPLRGKILNTWELESEEIIKSQEIKNLSTAIGVLPGNNDLSGLRYGKICILADADSDGLHIATLLCALFLRHYKSLVKDGRIFIAMPPLYRIDCGKEVLYALDEKQKDDVVKEFRNKKGKPKINIQRFKGLGEMNPSQLRETVMDPNTRQLVRLSVSATDNANAMMDLLLSKKNAPARK

SEQ ID NO: 183337 - protein, 291 aa, Unknown
  Bacterial polypetide isolated from the Sargasso Sea
LDFLEQNPSIGRRVIEKALLAARSRSAARKARELIRRKSALGGSSLPGKLADCSNRDPVFCELYLVEGDSAGGSAKQGRDRRTQAILPLRGKVINSEKARIDKLLSNNEVQSMITALGAGFGGAEDEGGEKSAGDFDIEKLRYHKIIIMTDADVDGSHIRTLLLTFFYRKMKEIIEGGFLYLALPPLYRVSQGKKESYAYDDNERDLLIERMSKDNKNTKVSIQRYKGLGEMNPGQLWETTMDPETRTLMQVTVESAGEAAETFQNLMGNDVEARRTFIEKNAKFVANLDI

SEQ ID NO: 183338 - protein, 291 aa, Unknown
  Bacterial polypetide isolated from the Sargasso Sea
RFDRIISSKEVGTLIQAMGTGIRDDFTLDKLRYHKIVIMTDADVDGAHIRTLLLTFFHRQMPDIIRAGHLFIAQPPLYKVSKGRSEVYLKDGAHLDRYLVEAGLNGRVLETSGGARLGSDLEALVEHAIRMRNLMAFVPRRYDPVIIEALGLAGVFEPDLSIEARGAALTRTAAWLDRGDTEARWSARLSEDGTVEVERLWRGVTDHHKIEGSFLSSAEARKLARLAAENAEVYAGTARLVRASAAEAEPEATVDADGEDEPVVAARPTQGADVITRPSQLLALVLAAGRK

SEQ ID NO: 183339 - protein, 310 aa, Unknown
  Bacterial polypetide isolated from the Sargasso Sea
NTSDDNAYKVSGGLHGVGVSVVNALSEWLELTIWREGQEHWMKFAHGDAVAPLVVKGPAPKAEQNPDDNGFKKGTRVTFLASTDTFKNVTEFDFDKLEHRYRELAFLNSGVRIKLRDKRHEEVKEHDLFYEGGIAAFVKYLDRNKTALLAEPIAISSERDGIGIDVALEWNDSYYENVLCFTNNIPQRDGGTHLAAFRAALTRTLNNYSEKSGLLKKEKVSLTGDDMREGLTAIVSVKLPDPKFSSQTKDKLVSSEVRQPLESLMADRMNDWLEENPAHAKSIVQKIIDAAAAREAAKRARETDRPQGAM

SEQ ID NO: 183340 - protein, 216 aa, Unknown
  Bacterial polypetide isolated from the Sargasso Sea
GGTAKQGRDRRTQAILPLRGKVINSEKAREDKLLANNEIQSMITALGCGFGEDEDDPNSFNPEKLRYHKIVIMTDADVDGSHIRTLLLTFFWRKMKSLVQGGYLYMAMPPLYKLKQGKKERYAYTDEERDSLLRRLESENKTKIDIQRYKGLGEMNADQLWETTMNAETRTLIQVTVDHIMEEETNVRFRELMGSEVEHRRRFITERAKFATNIDI

SEQ ID NO: 183341 - protein, 313 aa, Unknown
  Bacterial polypetide isolated from the Sargasso Sea
TGPNGLHHLIWEVVDNSVDEAMAGRCNSIEVRLEKNGSVTVTDNGSGIPVKPRPKTKESALTTVLTTLHAGGKFESEAYSVSGGLHGVGISVVNALSVFVKAEVQRDGFFWNQNFDFGKPVSKIKKGKATKKTGTKINFLADPEIFEETQSFEYNIVSERLRQTAFLNKGLKIVLVDNRVKPATKDKFLYKGGLVDFVDYLNDGFEVLHEKTISFSDQSKDSEIEVALQWKNEDDVNIKSFANNIHTLEGGTHEEGLRTAITKAINDFAKSRNLHSDISLTGDDIREGITGVISVRVKEPQFEGQTKTKLGNT

SEQ ID NO: 183342 - protein, 328 aa, Unknown
  Bacterial polypetide isolated from the Sargasso Sea
NRDGKIYNLEFSNGTVTKKLNVIGTSPEKEKNFYTGTKITFLPTKNIFKNIDFNFKIIEKRLRELAFLNTGVSIDLIDKRQSQEIKINFKYDGGIKEYVNFINNGKNVIHNNPISFNGEKNNISIECALQWTDSYHENTICFTNNIVQRDGGTHLAGFRGALTRSIVNYINKNTKNSGSITGDDAREGLTCIISVKLPDPKFSSQTKDKLVSSEVRPVVESISLDKIEQWIEENPSQIKKVIDKIIEASNAREAARKARELTRRKTGLENTSLPGKLADCQEKNPELSELFIVEGDSAGGSAKQGRDRKNQAILPLRGKILNVERAKK

SEQ ID NO: 183343 - protein, 328 aa, Unknown
  Bacterial polypetide isolated from the Sargasso Sea
QINQEDLFGSSGSILSVFIENPEFQGQTKEKLSSIEPGRKIEMKAKQLFEQWLAKKTRSAEELFQYAYNRSQLRLQSKSNQIIEKNIKRKKTTLPGKLADCSIDGNKGTEIFLVEGDSAGGSAKQARDRQTQAILPLRGKILNVISAGRDKINANQEITDLMQAIGCKRGDKFNSKDIRYEKIIIMTDADVDGAHISTLLMAFFYKEFPKLIDEGHLYLSVPPLYKISKGAKTYYAVNDKHKDEIIKKEFKNSDVTINRFKGLGEMMPAQLKETTMSQENRTLLKVQIASKDKKKTHKSVDSLMGKKPELRFKFIVENSKKIAAESIL

SEQ ID NO: 183344 - protein, 368 aa, Unknown
  Bacterial polypetide isolated from the Sargasso Sea
LNAGVLINVEDKKTGKSKKFKNNGGLSSYVTHLKGRKQPVSEIFECSAIDNDVGVEIAMQWTDSYSENVLCYTNNIPQKDGGTHLAGFRGSLTRVLKAFIKKENAKKTPTDLLGEDVREGLIAIISVKVPDPKFSSQTKEKLVSSEVESVVSTVFNKYFNEFLLENPKDAISIISKVSEAALAREAARKAREMTRRKGVLEIAGLPGKLADCQEKDPTLSEIYIVEGDSAGGSAKQGRNRKNQAILPLKGKIINVEKARIDKVLGSAEVGTLIKALGCGIGKDDFDINNLRYHRIIIMTDADVDGSHIRTLLLTFFYRQMYEIVEKGHIYIALPPLYKITKGKEFYYASDENEKDKAIKKLSKSGSRG

SEQ ID NO: 183345 - protein, 304 aa, Unknown
  Bacterial polypetide isolated from the Sargasso Sea
MKNKNNYQADSIKVLKGLEAVRKRPGMYIGDTDDGTGLHHMIYEVVDNSIDEALAGYCKNIEIYINSDGTITVRDDGRGIPVDIHKGEKKSAAEVIMTQLHAGGKFDHDSYKVSGGLHGVGVSVVNALSEKLKLEINRDGKKYFIEFKNGTAKEPLKIVGKSKNNGTEITFLPSKEIFSSIKFSFGIIEKRIRELAFLNKGIKISITDTTQKKQKIKEFKFDGGIIQFVDYLDEKREKLKNKNGNDLFKKPIYIEKKKDNIELECSLKWNAGYSEDVYPFTNNIYQKDGGTHILGFRSALTRVI

SEQ ID NO: 183346 - protein, 319 aa, Unknown
  Bacterial polypetide isolated from the Sargasso Sea
VHRRIIYSMYQLKLFNDSPYKKCARIVGDVMGKFHPHGDQAIYDSLVRLSQDFSTRAPLIDGQGNFGNIDGDNAAAMRYTEARLEKIADYFFDGIEENSVNLIENYDGQNLEPEILPAKLPNILLNGSTGIAVGMATNIPPHNLYELNEAIIKLIKNPKISLNDLLKNFSGPDFPTGGEIIFTPNEKKEIYKKGRGSFYIRSRFEKENLGNGTYQIVIKEIPYQVNKTRLIEQLANLINNKKLPLDDVIDESDENIRIVLKPKNRNIDSNKLIELCFKLSDLSIKFSCNFNVLVNGINPKQLGLKDILIYFIEHRFTAI

SEQ ID NO: 183347 - protein, 331 aa, Unknown
  Bacterial polypetide isolated from the Sargasso Sea
LTINLNDERTNKADSYCYEGGLKDFVRHLNKPQKPTHQSIAYINKKSKKDGDIEVEVAIQWNESYRENTFCFANTIRQRDGGTHLAGFRGALTRTINTYIDKEIPKNDTSVVGDDCREGMTAIISVKHPDPKFSSQTKDKLVSSEVKGVVESAVNKHLKEFLEENPVEAKIIIGKILDAARAREAARKAREMTRKKGALDIAGLPGKLADCQEKDPSLSELFIVEGDSAGGSAKQGRDRKTQAILPLKGKILNVEKAQRAKMYSSVEIGTLITALGCGIHDEFDMDNLRYHKIVIMTDADVDGSHIRTLLLTFFYRELQDLISGGYLYIAQ

SEQ ID NO: 183348 - protein, 338 aa, Unknown
  Bacterial polypetide isolated from the Sargasso Sea
PLSDYQAQRRGGLGKAATKVKDEDFVEKLLVANTHDTILCFSDFGKMYWLKVYQLPLASRTSRGRPIVNLLPLSDGERITAILPVREYAEDKYIIMATSNGTVKKTALTAYSNPRANGIIAVNLKDGDQLIGVDITNGDDEIMLFSNEGKVVRFKEGEEVAVLDENGNPVLDEEGNPQINFKGVRPMGRGATGVRGIKLEEGQRVVSLIVPKGDGAILTVTENGYGKRTELSEYPSKSRATKGVVSIKVSERNGAVVGAVQVGGNDEIMLISDKGTLVRTPANGVSIIGRNTQGVTIIRTASDEKVVGLQRIDEIQGDEDEVELDENRYANSPPVVAE

SEQ ID NO: 183349 - protein, 264 aa, Unknown
  Bacterial polypetide isolated from the Sargasso Sea
SYTNNIFQKDGGTHLLGFRSALTRVINKYANENNLLKKNKLSISGDDIKEGLTCILSIKIPDPKFSSQTKDKLVSSEVRPIVETIINEKLSIWFDQNPPVTKVILAKVIQASLARDVARKARENVRRKGALELTGLPGKLADCQISKQEGTELFIVEGDSAGGSAKQGRNRENQAVLPLRGKILNTYVDSNGSKRNGNSADLKTKALSKMISSSEIVTLINALGLDPKVEDIDLKDLRYGKIIIMTDADVDGSHIRALLLTFFN

SEQ ID NO: 183350 - protein, 132 aa, Unknown
  Bacterial polypetide isolated from the Sargasso Sea
IPTAIPQAIYDALVRMAQDFSMSLPLVEGQGNFGSIDGDPPAAMRYTETRLSKVSQHLVDDINKETVQFKSNYDETDNEPEILPAQYPNLLVNGAGGIAVGMATSIPPHNLGEIIDGTLALIENRDIKIPEL

SEQ ID NO: 183351 - protein, 297 aa, Unknown
  Bacterial polypetide isolated from the Sargasso Sea
YEDVYPYTNNIYQKDGGTHLLGFRTALTRVINKYASEQNLLKKNKVTLSGDDVKEGLTCVLSIKIPDPKFSSQTKDKLVSSEVRNIVETIVSEKLSIWFDQNPSVSKIILTKIIQAAVARDVARKARENVRRKGALELTGLPGKLADCQNSKQEGTELFIVEGDSAGGSAKQGRNRENQAVLPLRGKILNTFTEINGSKKNGNSNDLRTKTLSKMISSNEIITLINALGLDPKNEEIDLKDLRYGKIIIMTDADVDGSHIRALLLTFFNNKPFNKLIEKGHVYLAQPPLFKVNRGSK

SEQ ID NO: 183352 - protein, 270 aa, Unknown
  Bacterial polypetide isolated from the Sargasso Sea
LLPRGVKLSPEDVWMGLSYIISVRIEDPQFSGQTKEKLSSRAVSGFVTGLIKDAFTLWLNQHPEAGDQIVARAIENAQKRAKKNVKVKRKKATGGPTLPGKLADCTSDEPDLCELFIVEGDSAGGSAKQARDRVFQAILPLRGKILNSWEVDESNLLSSQEISNISQALGVEPGADELGNLRYHKICILADADSDGLHIATLICALFLKHFRKLVEDGHVYVAMPPLYRIDVGKEVHYALDETEKDSILKALEKKKPNTKTTVTRFKGLG

SEQ ID NO: 183353 - protein, 297 aa, Unknown
  Bacterial polypetide isolated from the Sargasso Sea
LAPIAYTGFLEEIASETVNFSNNFDGSQKEPDVLPAQLPFLFLNGSSGIAVGMATNIPPHNLGEIVDALIALVENKDINNKKLSKIIKGPDFPTGGELINNQAIEELYETGKGSVIIRGVINKEEINLGKGKHKRNALIITELPYQISKAGWIEKLAELVNSNKINGIADIRDESDRDGMRIVIELKKDSNTELVISNLYKKTTLQTNFGAIFLTLVQGKPVQLNLKQYLNYFLEFREETIRKRTGYFLKNTLEKLEILEGLSKATKDIKRIIEIIEESENSGEAKSKLIEIFSLSE

SEQ ID NO: 183354 - protein, 311 aa, Unknown
  Bacterial polypetide isolated from the Sargasso Sea
DKTIFSGNKFFNPEKIYDLAKSKAYLFSGVTIDWKAPNIREYNLNKIPTSERFHFENGLMDLVRSNTAVEYNITNDYFIGEADFKEKFDLKEKGSIQWCACFNTYNPVIKSFCNTIPTGEGGTHLTGFLNAIAKGFKSYVELIGDKKFSAINKDDVLEILSSSISVFVEQPQFVGQTKDKLSNLEVQKKVESLIKDRFENWLANDKSRTLLLIENLRMRAEERIKTKQKKETLRKTPLKRLMLPGKLADCSISDKDGTELFLVEGDSAGGSAKQARNRTTQAILPLKGKILNVVGSSNKKVSENQEIDDLC

SEQ ID NO: 183355 - protein, 222 aa, Unknown
  Bacterial polypetide isolated from the Sargasso Sea
MAKKENKKKTGKDKKDNNDYGAESIKVLKGLEAVRKRPGMYIGDTDDGTGLHHMVYEVVDNSVDEALAGHCKMISVILNADESVTVKDDGRGIPTEIHKEEGISAAEVIMTQLHAGGKFDQNSYKVSGGLHGVGVSVVNALSEKLDLSIKRDGKEHAMSFQNGETVKALKAVKDCKDETGTEITFYPSKSVFTMTEFSRRTLEARLREMAFLNSGISIHLKK

SEQ ID NO: 183356 - protein, 353 aa, Unknown
  Bacterial polypetide isolated from the Sargasso Sea
LSVKVQDPKFSSQTKDKLVSSEVRPVVESLVNEKLTDWFERNPNIAKEIFLKIQKAAEAREAARKARELTRRKSALEITNLPGKLADCQEKDPSMSEIFIVEGDSAGGSAKQGRDRKFQAILPLRGKILNTWKSRTDKILGSQEIGTLITALGTGIGPNEFDSDKLRYHKVIIMTDADVDGSHIRTLLLTFFFKEMRGLIDNGNLYIARPPLFKIKRGKEELYISDENNLQRSLIKYGAEDVIFKTAQGSNLNKKNLIDILNKISEVIEIYNKVPDRYDKKVLEQIAIAGCLDINKFIDSKEKTKEAINYISKRVNVSRPDYDRGWKGEYSKEKGFIFRRELRGLRDNIIIDN

SEQ ID NO: 183357 - protein, 235 aa, Unknown
  Bacterial polypetide isolated from the Sargasso Sea
MNQSYSSESIKVLKGLEAVRKRPGMYIGDTDDGSGLHQMIYEVVDNSIDESLAGYCDKIEVLLNSDGTVTISDNGRGIPVDNHKEEGIPAAQLIMTELHAGGKFDQNSYKVSGGLHGVGVSVVNALSEKLLLEINREGSIYNMQFANGAVLDTLKEVGGSEIINGKTYTGTKITFLPATNIFKNIEFNFSTIEKRLRELAFLNTGVNIILRDNRAAKKKEISFKYEGGIIEYVNY

SEQ ID NO: 183358 - protein, 328 aa, Unknown
  Bacterial polypetide isolated from the Sargasso Sea
SLWWNDSYYEQILTFTNNIRQKDGGTHLSGFRSALTRVVNNYLDGSKSVKKQTVSPNSDDIREGLTSVLSVKVQDPKFSSQTKDKLVSSEVRPVVESLVNEKLTDWFERNPNIAKEIFLKIQKAAEAREAARKARELTRRKSALEITNLPGKLADCQEKDPSMSEIFIVEGDSAGGSAKQGRDRKFQAILPLRGKILNTWKSRTDKILGSQEIGTLITALGTGIGPNEFDSDKLRYHKVIIMTDADVDGSHIRTLLLTFFFKEMRGLIENGNLYIARPPLFKIKRGKEELYISDENNLQRSLIQYGAEDVTFKTAQGSNLNEKNLVDI

SEQ ID NO: 183359 - protein, 297 aa, Unknown
  Bacterial polypetide isolated from the Sargasso Sea
NDRKKLINKNGNEVFKKPIFISGKKNDVELECSLQWNTGYSENVFAYTNNINQKDGGTHLLGFRSALTRLINKFAADKNLLKKNKVVLSGDDVREGLTGVLSIKMKDPKFSSQTKDKLVSSEVRLIVETILNDRLSTWFDQNPSTIRIVLEKVIQAAVARDVARKARENVRRKGALELSGLPGKLADCQLNSKEKTELFIVEGDSAGGSAKQGRNREYQAVLPLRGKILNTFVEINGKRKNGSSEDIQNKTLSKIMSSSEIVTLINALGTGSKEFDINNLRYDKIIIMTDADVDGSH

SEQ ID NO: 183360 - protein, 268 aa, Unknown
  Bacterial polypetide isolated from the Sargasso Sea
LGGLHHLVYEVVDNSVDEALAGHCDHIEIVLRADGSALISDNGRGIPTDIHPRTGKSALETVLTVLHAGGKFGSGGYKVSGGLHGVGISVVNALSEWVNVTVYRDGSEFNQRFEKGVSKGELETKKQTGRPSKKGTTICFKPDKTIFSGGIEFEYTLLSSRLRELAYLNGGVKIVFRDERNQLSDGSFKEEIYLYQGGIKEYVEYMNAEKDSIHPEIIYVDSEKENVYVEAALQWCSDVYSDNILGFANNIRTIDGGTHIEGLKTVLT

SEQ ID NO: 183361 - protein, 288 aa, Unknown
  Bacterial polypetide isolated from the Sargasso Sea
DGSEDIPDVLPTKIPNLLVNGSSGIAVGMATNIPPHNLNEVLNGCINLINNPKITIDELIKDISGPDFPTGGTIDGKAGIYEAYKTGRGIIHIRSNTSIEEDKSGKQSLIINEIPFMVNKAKMLEKIAELVKEKKIEGITEIRDESDKDGLRVVIEVRKGDSVDVLENNLFAQTQLEQSFGINFTVLSEGQPKEVNLKEMLQAFIKHRKDIITKRTKYDLKKAKERGHVVEGLMVAIANIDEIISIIKKSKDPKLAAEALCKKVWKSGPVEAILKKKGSDACKPKGLS

SEQ ID NO: 183362 - protein, 146 aa, Unknown
  Bacterial polypetide isolated from the Sargasso Sea
MDFAKEILPVNIEDELKQSYLSYAMSVIHGRALPDVRDGLKPVHRRILYAMHDLKNNYNKPYKKSARVVGDVIGKYHPHGDTAAYDAIVRMAQDFSMRYTLIQGQGNFGSIDGDPPAAMRYTEVRMQKISDEILADLEKETVSFSE

SEQ ID NO: 183363 - protein, 287 aa, Unknown
  Bacterial polypetide isolated from the Sargasso Sea
RDGGEYFQEYSDGKPKAKLKKVKKSDKTGTKITFFPSEKIFTSIDFEVDRIYKRIQELSFLNAGVSINVEDKKSGKSKKFKNNGGLSSYVTHLRGRKQTVSDIFECSATDNDVGVEIAMQWTDSYTENVLCYTNNIPQKDGGTHLAGFRGSLTRVLKSFIKKENAKKTPTDLLGEDVREGLIAIISVKVPDPKFSSQTKEKLVSSEVEGVVSTIFSKYFNEFLLENPKDAMSIVSKVSEAALAREAARKAREMTRRKGVLEIAGLPGKLADCQEKDPSLSEIYIVEG

SEQ ID NO: 183364 - protein, 275 aa, Unknown
  Bacterial polypetide isolated from the Sargasso Sea
FNPSVIGLILEKAIQAFNAAEAARRARELVRRKSVLESSTLPGKLADCSSRDPGESEIYIVEGDSAGGSAKQGRDRRFQAILPLRGKILNIEKTDDAKIYKNTEIQALITALGLGIKGEDFDVKNLRYHRVVIMTDADVDGAHIRTLLLTFFYRYQKELVEGGYIYIACPPLYKVERGKNHTYCYNEGDLQKTLEGFGEKANYTIQRFKGLGEMMPKQLWETTMDPTTRTMKRVEIEDALEADRIFTILMGDKVAPRREFIETHSAELDMAALDI

SEQ ID NO: 183365 - protein, 362 aa, Unknown
  Bacterial polypetide isolated from the Sargasso Sea
HTSEKKYSKSARSVGEVMGKYHPHGDQSIYDTMVRMAQDFSLRYPLVDGQGNFGSIDGDPPAAMRYTESRLDKISKHMLEDIEKKIVDFQANFDDSEMEPTVLPARLPNLLLNGSDGIAVGMATRIPPHNLTEVAGAIRLHVNTILKESKDSSGIPNIPLEEYMQHVKGPDFPTGATIHGIDGIVDMYSTGKGRFHVRSKCDVLDDTSGKKIIIHEIPYQVKKSDMLVHIAELVSKEVVTGIRDIRDESSKEGIRVVIEVKSNSDPHAVLNQLFKSSRLQESYSANMMGILDGKPVLLSLPVMLHTYVRHREEIIERRAVFDLEKAESRAHILEGLVKAQERIEDVLKAGRESSGREQFESI

SEQ ID NO: 183366 - protein, 335 aa, Unknown
  Bacterial polypetide isolated from the Sargasso Sea
LGRDNILDKQLVKELEESYLNYSMSVIMSRALPDARDGLKPVHRRILFSMSEMSAMWNRPYKKSARVVGEVLGKYHPHGDSSIYDALVRMAQEFSMRHELVQGQGNFGSVDGDRAAAMRYTESRMSRIGSELLRDIEKETIPWTTNFDETLKEPAVLPAVYPNLLVNGSEGIAVGMATKIPPHNLSELVGGLVELMDNPECETKDLMKHIKGPDFPTAGKALGIKGIQDAYETGRGKVIMQGRAHVEPSNRGRDSLIITELPYQVNKANLIEKIAELARDKKIEGIAELRDESDKDGMRVVIETKRDAVPEVVLNQLYKQTQLQDTFWNNFTCSG

SEQ ID NO: 183367 - protein, 322 aa, Unknown
  Bacterial polypetide isolated from the Sargasso Sea
DIEKLRYHKVIIMTDADTDGSHIRTLLLTFFFRQMPQLLENGHIYIAQAPLYKMKKSGREEYLKDDLELEEYYLQGAVDDAKLMINESAPPIQADKLYELMRLYTNSLKILHGNARELPIELSESFLKIPMCEASNLSDETKLQDWCDALEKAIGQTPENQLSVRVARGSESESEESQSEEESTNLYVSIEMIIKGARTNIELKKSFFESRNYKALEPAVTQLEGLLEENASIERGGKMLSTPIYFSDVYYWLMEEAKKGVNVQRYKGLGEMNADQLQETTMDPNARRMLKISVEDAVGADRIFNTLMGDQVEPRRDFIDKN

SEQ ID NO: 183368 - protein, 298 aa, Unknown
  Bacterial polypetide isolated from the Sargasso Sea
MSLLNNKSYQADSIKVLKGLEAVRKRPGMYIGDTDDGTGLHHMVYEVVDNSIDEALAGYCKNIEVSINSNGSVTVKDDGRGIPIDMHKGEKKSAAEVIMTQLHAGGKFDHDSYKVSGGLHGVGVSVVNALSESLKLNINREGKKYFIEFKNGDAKSPLKQIGKSKENGTEIIFLPSKNIFSSTKFSFSILEKRLRELAFLNKGIKIILNDYSQKKTKSEEFKYDGGILEFVEYLDSKRESLKNKNENELFKKPIYLEGSKNNINIQCSLKWNAGYGEDIYPFTNNIYQKDGGTHLFGI

SEQ ID NO: 183369 - protein, 300 aa, Unknown
  Bacterial polypetide isolated from the Sargasso Sea
MSSSYLSYAMSVIVSRALPDVRDGLKPVHRRILYAMYKGGYDWSKQFRKSARIVGDVIGKYHPHGDQSVYDALVRMVQDFSMSLPLVQGQGNFGSIDGDPAAAMRYTETRLSKVSQFLIDDIEKNTVSYKSNYDETEKEPTVLPAQYPNLLVNGAGGIAVGMATSIPPHNLGEIIDGTLALIENKDIKIKELMKHIPGPDFPTGGIIIGKSIIKQGYNNGRGSFKIRGEVSSETLKNGRDRLIITSIPYQVNKSALNERIAQLVREKKIEGIKDIRDESNREGIRVAIDLRNGVEPETIK

SEQ ID NO: 183370 - protein, 321 aa, Unknown
  Bacterial polypetide isolated from the Sargasso Sea
AVTKAINDFAKSRNLHSDISLTGDDIREGITGVVSVRVKEPQFEGQTKTKLGNTEMKSRVQVLVNQEFPKWLSKNTKEGRAIVERCALAAKARMSAKKARELTKRKSILETSGLPGKLADCSSTDPSESELFIVEGDSAAGPAKQARDSKTQAILPIRGKIINVQKVTENRALQNEEISSLIKAIGTGINTEYKGEESRYDKIILLTDADVDGAHIRTLLLTFFFKFMPGLIKEGKVWISEPPLYRAKSSGSINYLKDDEDLEAFKKENKNRKFDISRFKGLGEMNAGELWDTAMNPESRTLIKVSIADGKAAEAKAANML

SEQ ID NO: 183371 - protein, 272 aa, Unknown
  Bacterial polypetide isolated from the Sargasso Sea
THLSGFRSSLTRVMKTFIRKEELNKKSPVELLGEDVREGLTAIVSVKIPDPKFSSQTKEKLVSSEVESVVSNVFNKNFNEYLLENPKEAMSILTKISEAALAREAARKAREMTRRKGVLEVAGLPGKLADCQEKDPALSEIYIVEGDSAGGSAKQGRNRQNQAILPLKGKILNVEKARLDKVLSSQEIGTLVTALGCGIGTDEFDADKLRYHRIIIMTDADVDGSHIRTLLLTFFFRQMFEILNRGHVYIALPPLYKVSKGKNIKYAASEKE

SEQ ID NO: 183372 - protein, 300 aa, Unknown
  Bacterial polypetide isolated from the Sargasso Sea
KEIFASTNFEIEEIYKRIQELSFLNAGVSINVEDKRNGKSKKFKNNGGLSSYVRHLKGRKQVISEIFECSAKESDVGVEIAMQWVDSYSENVLCYTNNIPQKDGGTHLAGFRGSLTRVLKAFIKKENAKKTPTDLLGEDVREGLIAIISVKVPDPKFSSQTKEKLVSSEVESVVSTVFSKYFNDFLLENPKDAMSIVSKVSEAALAREAARKAREMTRRKGVLEIAGLPGKLADCQEKDPKESEIYIVEGDSAGGSAKQGRNRKNQAILPLKGKIINVEKARIDKVLGSQEVGTLIKALG

SEQ ID NO: 183373 - protein, 155 aa, Unknown
  Bacterial polypetide isolated from the Sargasso Sea
MAKNNTTYQADSIKVLKGLEAVRKRPGMYIGDTDDGTGLHHMVYEVVDNSIDEALAGHCKNIKVDINSDGSITVEDDGRGIPVDIHKGEKKSAAEVIMTQLHAGGKFDHDSYKVSGGLHGVGVSVVNALSEKLELFIERDGKKHFIEFRNGDAQN

SEQ ID NO: 183374 - protein, 312 aa, Unknown
  Bacterial polypetide isolated from the Sargasso Sea
MSSSYLSYAMSVIVSRALPDVRDGLKPVHRRIIYAMYRGGYDWSKPFRKSARIVGDVIGKYHPHGDQSVYDALVRLVQDFSMSLPLISGQGNFGSIDGDPPAAMRYTETKLGKIAQFLTEDLEKNTVNYRNNYDETEKEPEVLPSQYPNILVNGAGGIAVGMATSIPPHNLSEIINATVAYIGNKDITISQLMKHVPGPDFPTGGIIIGKDILKQGYNKGRGSFKIRGEIDLEEKRGGRECLIIKSIPYQVNKSALIEKIAQLVRDKKIEGIRDIRDESNREGIRVVIELRKAVEPETIRRQLYKLTNIESS

SEQ ID NO: 183375 - protein, 176 aa, Unknown
  Bacterial polypetide isolated from the Sargasso Sea
MTDKISQINLEDEMKKSYLDYAMSVIIGRALPDVRDGLKPVHRRVLYAMKVLGNDHTKAYKKSARIVGDVIGKYHPHGDSAVYETIVRMAQDFSLRYTLVDGQGNFGSIDGDRAAAMRYTEVRMEKITQELLADIDKDTVDFIPNYDESEEEPAVLPTRLPNLLINGSAGIAVGMA

SEQ ID NO: 183376 - protein, 292 aa, Unknown
  Bacterial polypetide isolated from the Sargasso Sea
PASFPNLLVNGGTGIAVGMATNIPPHNLGEIIDGITAQIDNPDITLKQLMKHIKGPDFPTGCTICGLSPIEQYFTTGKGSIKVRGKLGIEDVRGGKQQIVVTEIPYNVNRATLVSRIAELANEKILSEITAVRDESDENTRVVIELKRDAVPKVVTNNLYKHTQLETTFSVNMLAIDHGKPKTLSLKDALNCYIEHRREVIVRRTRYELEKAERRAETLEGYLIALSNLDKFIKIIRESANRDEAKVKLMAHDFTRAAVEKLGILIRDKARLVNGRYEFSEEQANAILELRL

SEQ ID NO: 183377 - protein, 107 aa, Unknown
  Bacterial polypetide isolated from the Sargasso Sea
MATLNKYQADSIKVLKGLEAVRKRPGMYIGDTDDGTGLHHMVYEVVDNSIDEALAGYCKNIDVMMNADGTITVKDDGRGIPIDIHKGEKKSAAEVIMTQLHAGSKFD

SEQ ID NO: 183378 - protein, 234 aa, Unknown
  Bacterial polypetide isolated from the Sargasso Sea
RVREFQAVLPLRGKILNTYVNGKRNGEDRNTKALSKMMSSSEIVTLINALGTGSKDFNIDNLRYDKIVIMTDADVDGSHIRTLLLTFFNNHPFNQLIENGHVYLAQPPLFKITKANKSTYIKDEKALEDYILQLGKINKKIKKGSQEYKNFMQEQREKLSIQRFKGLGEMNPDELWETTLNPDNRTMLKVQYTKGTKDKSKEDQKMIEVLMGDEVAPRKDFITNNALEVTNLDI

SEQ ID NO: 183379 - protein, 288 aa, Unknown
  Bacterial polypetide isolated from the Sargasso Sea
KDPEKCEIFIVEGESAGGSAKQGRDRSTQAILPLKGKIINCEKARLSKVLSSNEIATLITALGGGIGNSSNEIDQDDESFKTDKLRYKKVIIMTDADVDGAHIKTLLLTFFYRQMRPLITDGCLYIAQPPLYKAKKGNSETYLKDDDDLENYLIDSGINDSSFILNTGEVIASNDLIDLVTKSRNFKKLINSLPKKYNQGFVEAVSISSAFKQPIEISDKVLVEISNRLTKKYSDIDADWKASYDDENGLMVSREVRGVNENMSIGRGLFDSVDSRRLEKISNDIKQF

SEQ ID NO: 183380 - protein, 220 aa, Unknown
  Bacterial polypetide isolated from the Sargasso Sea
MEIALMSNDYDSDSIKVLKGLEAVKKRPGMYIGDTDDGTGLHHMVFEVLDNSIDEGLAGFCNQIDVVVGKDGSVSVADNGRGIPVDKHEEGASAAEVIMTVLHAGGKFDENSYKVSGGLHGVGVSVVNALSSKLILEIERQGSKYRQEYADGFPQTKLEIVEKSDKTGTKVTFIPSKKIFSQIKFDVDILIKRIRELSFLNQGIGISVLDERTGKSHDFI

SEQ ID NO: 183381 - protein, 217 aa, Unknown
  Bacterial polypetide isolated from the Sargasso Sea
MSSSYLSYAMSVIISRALPDIRDGLKPVHRRIIYAMHKGGFDWSKQFRKSARIVGDVIGKYHPHGDQAVYDALVRMVQDFSMSLPLIDGQGNFGSIDGDPPAAMRYTETKLSKVSQYLVDDINKDTVKFKSNYDETEKEPEILPAQYPNLLVNGAGGIAVGMATSIPPHNLGEIINGTLALIENRDIKISELMKLIPGPDFQQEVYYWKDIIKQATN

SEQ ID NO: 183382 - protein, 221 aa, Unknown
  Bacterial polypetide isolated from the Sargasso Sea
ESEIYIVEGDSAGGSAKQGRDRRFQAILPLRGKILNIEKTDDTKIYKNTEIQSLITALGLGIKGEEFDEKSLRYHRVVIMTDADVDGAHIRTLLLTFFYRYQRDLVEKGFIYIACPPLYKVERGKNHKYCYNENQLKQTIEDFGDNANYNIQRFKGLGEMMPKQLWDTTMNPQTRMMKRVEIEDALEADRIFNILMGDKVAPRREFIETHSGNLDMATLDI

SEQ ID NO: 183383 - protein, 237 aa, Unknown
  Bacterial polypetide isolated from the Sargasso Sea
STLPGKLADCSSRDPSETEIYIVEGDSAGGSAKQGRDRKFQAILPLRGKILNIEKTDDSKIYKNTEIQSLITALGLGIKGEEFDVSSLRYHRVVIMTDADVDGAHIRTLLLTFFYRYQRELVEKGYIYIACPPLYKVERGKNHKYCYNENQLKDTITGFGENANYNIQRFKGLGEMMPKQLWDTTMNPQTRMMKKVEIEDALEADRIFNILMGDKVAPRREFIETHSSNLDMATLDI

SEQ ID NO: 183384 - protein, 192 aa, Unknown
  Bacterial polypetide isolated from the Sargasso Sea
MSGTDDSDIPEEEFNNNNDDSSKDTHVPVAISDEMRKSYLDYAMSVIVSRALPDVRDGLKPVHRRILYAMKEGGYHWNRPYRKSARVIGDVMGKYHPHGDNAIYDAMVRMAQPFSMSLKLLDGQGNFGSMDGDPPAAMRYTEVRMDQAANMLIDDIDKNTIDFQDNYDNSTREPSVLPAKFPNLLVNGAGGI

SEQ ID NO: 183385 - protein, 254 aa, Unknown
  Bacterial polypetide isolated from the Sargasso Sea
MEAVRKRPGMYIGDTDDGSGLHHMVFEVVDNSIDEAIVGFCKNITVIMHKNNSITVEDDGRGIPVDMHKGEKKSAAEVIMTQLHAGGKFDQSSYKVSGGLHGVGVSVVNALSKKLDLTVFRDGKEYFVSFEDGKTKNSLKFIKKTTKSGTKINFSPSKEIFSSIKFNTSILQKKMRELAFLNKGLKILLIDETGTKNKSYENKYDGGIQEFVSFIDQKKSALINKNDKSIFKKPIYIKGEKKEVIVECSLQWNS

SEQ ID NO: 183386 - protein, 248 aa, Unknown
  Bacterial polypetide isolated from the Sargasso Sea
MPENTKKKDKDNIDYGAESIKVLRGLDAVRKRPGMYIGDTDDGSGLHHMVYEVLDNAIDEALAGYCDIINVYLQKEGSIKISDNGRGIPVDIHPEEGISAAEVIMTQLHAGGKFDNDSYKVSGGLHGVGVSVVNALSEYLFLTIYRDGKKYFIEFQDGVSKSPLKIIDETNHSTGTEIIFKPSINTFSSINFDFSTLEHRIRELAFLNSGIKINLTDERSAEMKSLTFCFEGGLKEYVNYLNRSKVNV

SEQ ID NO: 183387 - protein, 296 aa, Unknown
  Bacterial polypetide isolated from the Sargasso Sea
VARKARETVRRKGALELTGLPGKLADCQNSNQDGTELFIVEGDSAGGSAKQGRNREFQAVLPLRGKILNTYVDTNGSKKNGNGNDQKTKALSKMISSNEIMTLINALGLDPKDEEIDLKDLRYGKIIIMTDADVDGSHIRALLLTFFNNKPFNKLIANGHIYLAQPPLFKINKGMKGIYIKDEKELEKYIMSSSKDLKKIKRGSKEFEKHYSIAKSKLSIQRFKGLGEMNPDELWNTTLNPDTRNLLKVEYSKDLKKDQNIIHTLMGNDVALRKDFICIKCNRCTKSRCIMKFLRL

SEQ ID NO: 183388 - protein, 317 aa, Unknown
  Bacterial polypetide isolated from the Sargasso Sea
WWSKIVFRDERNQLSDGSFKEEIYLYQGGIKEYVEYMNAEKDSIHPEIIYVDSQKENVYVEAALQWCSDVYSDNILGFANNIRTIDGGTHIEGLKTVLTRTFNTLAKKRGKRKDIEKNLAGENIREGLTVVLSVKVPDPEFEGQTKTKLGNTEVRGIVDSLIGEALTKYMEFNPGILDLILEKAIQSFNAAEAARRARELVRRKSVLESSTLPGKLADCSSRDPSESEIYIVEGDSAGGSAKQGRDRNFQAILPLRGKILNIEKTDDTKIYKNTEIQSLITALGLGIKGEEFDESSLRYHRVVIMTDADVDGAHIRT

SEQ ID NO: 183389 - protein, 287 aa, Unknown
  Bacterial polypetide isolated from the Sargasso Sea
GRKQEVSEVFECSATENDVGVEIAMQWTDSYSENVLCYTNNIPQKDGGTHLAGFRGSLTRVLKSFIKKENAKKTPTELLGEDVREGLMAIISVKVPDPKFSSQTKEKLVSSEVESVVSSVFSKYFNEFLLENPKDAMNIISKVSEAALAREAARKAREMTRRKGVLEIAGLPGKLADCQEKDPKLSEIYIVEGDSAGGSAKQGRNRKNQAILPLKGKIINVEKARIDKVLGSAEVGTLIKALGCGIGEEDFDIEKLRYHRIIIMTDADVDGSHIRTMLLTFFYRQNV

SEQ ID NO: 183390 - protein, 262 aa, Unknown
  Bacterial polypetide isolated from the Sargasso Sea
FEQNPQAVKIILLKIQKAAEAREAARKARDLTRRKSSLEVSNLPGKLADCQEKDPKLSEIFIVEGDSAGGSAKQGRDRKFQAILPLRGKILNTWKSRIDKILGSTEIGTLITALGVGIGKNEFDPLKLRYHKVVIMTDADVDGSHIRTLLLTFFFKEMRELIQNGHLYIARPPLYKIKKGKEELYLMDDQELSHALINYGSKGYEFHTSQGTVFKGKELENELKNISIAESILKRIPDRYDKKYLEQIAIAGCLDVSKLKIR

SEQ ID NO: 183391 - protein, 305 aa, Unknown
  Bacterial polypetide isolated from the Sargasso Sea
AVYDALVRMVQDFSMSLPLIDGQGNFGSIDGDPPAAMRYTETKLSKISQYLIDDIEKNTVNFKSNYDETEKEPVVLPAQYPNLLVNGAGGIAVGMATSIPPHNLGEVIDGTLALIKNKDIKLSELMKHIPGPDFPTGGTIIGKNIIKEGYKSGRGSFKIRGDIKIEQRKNGKERIVITSVPYQVNKSSLNERIVELIREKKIEGISDIRDESNREGIRVSIDLRRNVEPETVKRQLYKYTSIESSFGFNTLAIVDQKPKTCNLKEFLENFLSFREDVVVKKTKFDLKKAEDRAHILIGLSVSVEI

SEQ ID NO: 183392 - protein, 307 aa, Unknown
  Bacterial polypetide isolated from the Sargasso Sea
MPFTNNIYQKDGGTHLLGFRSALTRVVNKYANENNLLKKNKLSISGDDIKEGLTCIISIKIPDPKFSSQTKDKLVSSEVRNIVENILSEKISIWFDQNPSIAKTVLSKIIQAALARDVARKARENVRRKGALELTGLPGKLADCQISKQEGTELFIVEGDSAGGSAKQARNRENQAVLPLRGKILNTYVEEDTKKNNSNGNNHRTKTLSKMIASNEIVTLINAMGLDPKSDEIETKDIRYGKIIIMTDADVDGSHIRALLLTFFNNVPFNKLIKEGYIYLAQPPLFKINKGSKGIYIKDEKELEKYV

SEQ ID NO: 183393 - protein, 154 aa, Unknown
  Bacterial polypetide isolated from the Sargasso Sea
MSSSYLSYAMSVIISRALPDIRDGLKPVHRRIIFAMHKGGFDWSKQFRKSARIVGDVIGKYHPHGDQAVYDALVRMVQDFSMSLPLIDGQGNFGSIDGDPPAAMRYTETRLSKISQYLIDDIEKNTVEFKSNYDETEKEPTVLPAQYPNLLVNG

SEQ ID NO: 183394 - protein, 266 aa, Unknown
  Bacterial polypetide isolated from the Sargasso Sea
LTRVINKYASENNLLKKNKLAISGDDIKEGLTCVLSIKIPDPKFSSQTKDKLVSSEVRLIVETFINEKLSIWFDQNPSIAKIILAKVIQAAMARDVARKARESVRRKGTLELSGLPGKLADCQIGKQEGTELFIVEGDSAGGSAKQGRNRANQAVLPLRGKILNTYVEDLKSKNNGNGKGTDHRTKALSKMISSNEIVTLINALGLDPKVEEIDPKDIRYEKIIIMTDADVDGSHIRALLLTFFNNKPFNKLIEEGYLFLAQPPLL

SEQ ID NO: 183395 - protein, 311 aa, Unknown
  Bacterial polypetide isolated from the Sargasso Sea
YDSMVRMAQNFSMRLELIDGQGNFGSLDGDPPAAMRYTEARLSKISEKIVTDLEKNTVNFQPNYDDTTKEPSVLPAQYPNILVNGASGIAVGMATNIAPHNLGEVIDATLFCIDNPDASIDDLNKFILGPDFPTGCQIIGNKGIKDAFNSGKGACILRAKTSIENFKKDREAIIINEIPYQVNKSKLIEKIAETVKNNIIEGISDLRDESDRNGVRVVIELKKDVDSNVVLNKLYKHTLLQTTFNSNMLALNKGKPEQMNLKDILLSFIDFREEIVTKRTVYDLNKARDKAHILIGLVVANDNIDNIIDLI

SEQ ID NO: 183396 - protein, 88 aa, Unknown
  Bacterial polypetide isolated from the Sargasso Sea
MSEDKRSNKISNDYGAEQIQVLEGLEPVRKRPGMYIGSTGPRGLHHLVYEVVDNSVDEALAGHCDHIEIVLQADGSALIFDNGRGIPT

SEQ ID NO: 183397 - protein, 78 aa, Unknown
  Bacterial polypetide isolated from the Sargasso Sea
MVDINRDNTLPRDIVDEMRESYLNYSMSVIVSRALPDVRDGLKPVHRRILYGMSELGSSWNRPYKKSARIVGDVLGKY

SEQ ID NO: 183398 - protein, 185 aa, Unknown
  Bacterial polypetide isolated from the Sargasso Sea
NNEIQSIITALGTGFGGGDEEMGERSAGDFNIEKIRYHKIIIMTDADVDGSHIRTLLLTFFYRKMKQLIDGGFLYLALPPLYRVHQGKKAAYAYDDNERDLLIERMKKDNKNTKVGIQRYKGLGEMNPGQLWDTTMDPEKRTLLQVTVESAEAAAVTFQNLMGSDVEARRAFIEKNAKFVANLDI

SEQ ID NO: 183399 - protein, 263 aa, Unknown
  Bacterial polypetide isolated from the Sargasso Sea
MPPGAPDSDITPIAIEDEMRSSYLDYAMSVIVSRALPDVRDGLKPVHRRILYSMKENGYEFNRPYRKSARIVGDVMGKYHPHGDQAIYDAMVRMAQNFSMRLPLIDGQGNFGSMDGDKAAAMRYTEARMARSAHALIEDFDKDTVDFQANYDESTKEPQVLPAGFPNLLVNGAGGIAVGMATNIPPHNLGEMIDACCAIIDNPEITIDEIIEHHVEGPDFPTGGQILGRNGILSAFHTGRGSVVMRGKTSIEEIRKDRFAIII

SEQ ID NO: 183400 - protein, 194 aa, Unknown
  Bacterial polypetide isolated from the Sargasso Sea
MPLRGKILNIEKTDDAKIYKNTEIQSLITALGLGIKGEEFDISSLRYHRVVIMTDADVDGAHIRTLLLTFFYRYQRELVEKGYIYIACPPLYKVERGKNHKYCYNEGQLKKTIEDFGDKANFNIQRFKGLGEMMPKQLWDTTMNPQTRMMKRVEIEDALEADRIFNILMGDKVAPRREFIETHSGNLDMSTLDI

SEQ ID NO: 183401 - protein, 286 aa, Unknown
  Bacterial polypetide isolated from the Sargasso Sea
ELFIVEGDSAGGSAKQGRDRKNQAILPLRGKILNVERANPRQILTSNEIGILITAIGAGVGNPSGNEEQDKSEGKFDLSKLRYHKIIIMTDADVDGSHIRTLLLTFFYRHMKPLIESGHLYIAQPPLYRSKKGSSIQYIKDEEEMEQYLINEGSKNLIFEAPTTENKINQINKQELIKLINLSKEVQKLINQLTRRIDNKLIIEQAAVIAAFKTESLKNPKVATELAKYLELRLNTIEGKIWKVEYNKEKLTIIKTNKGVSEKYTIDEEFLITPEEKLLNEMRKTL

SEQ ID NO: 183402 - protein, 272 aa, Unknown
  Bacterial polypetide isolated from the Sargasso Sea
LAARSRSAARKARELIRRKSALGGSSLPGKLSDCSNKDPVFCELYLVEGDSAGGSAKQGRDRRTQAILPLRGKVINSEKARVDKLLSNNEVQSMITALGAGFGGSEEESGEKSAGDFDSEKLRYHKIIIMTDADVDGSHIRTLLLTFFYRKMKEVIDGGYLYLALPPLYRISQGKKESYAYDDNERDLLIERMKKDNKNTKVGIQRYKGLGEMNPGQLWETTMDPEKRTLMKVTVESAAEAAETFQNLMGSDVEARRSFIERNAKFVVNLDV

SEQ ID NO: 183403 - protein, 275 aa, Unknown
  Bacterial polypetide isolated from the Sargasso Sea
VLPTRIPNLLINGSSGIAVGMATNMAPHNLNESISACLAFIENPDISTEELIKHIPGPDFPTGGIINGRSGILSAYETGKGKVKIRAKVDIVGEDEGKTQIVVTEIPYMVNKAKLVENIAILMRDKKIEGIREIRDESDKDNPVRIVMDLTSGAIADVVLNNLYKQTQMQSVFGINNVALVGTEPKLLSLKEILEIFFNFRKEVVSKRTIFELNKAKDRGHILEGLTVALSNIDQMIELIKKSKDGAEAKTKLLAKKWKAGKVIDMLKRAGPECM

SEQ ID NO: 183404 - protein, 289 aa, Unknown
  Bacterial polypetide isolated from the Sargasso Sea
HHMVQELVDNAIDEALAGHCDTVFVTMHPEEAITVRDNGRGIPVDLHPEEKVSAAEVIMTTLHAGGKFDDNSYKVSGGLHGVGVSVVNALSDELRLTVRRDNKVYQQTYEHGVPVAPLAETGETQERGTECYFRPSPATFHNIKFQYELLAKRLRELAFLNSGVSIVLTEERTGKEDTFYYEGGLRAFVEFLNQNKQQLNEVFHFNVEREDGIGVEVAMQWNDTFQEQVFCYTNNIPQGDGGTHLAGFRGALTRTLNTYIENENLLKKAQVNTTGDDAREGITAVVSVK

SEQ ID NO: 183405 - protein, 294 aa, Unknown
  Bacterial polypetide isolated from the Sargasso Sea
AHIRTLLLTFFYRQMPELVEGGFLYIAQPPLYKVARGKSEVYLKDQSALEDYLIQQGSEGSILRLGDGSEISSQDLIRVVEEARQLKRVLEAFPTHYPRHILEQAAIAGAFVPGVVDSDLQGTADKVAERLNLIALEYEKGWNGRPTQDHGIKLTRILRGVEEMRTLDGPMLRSGEARKTGSFTKSLNEVYGKPARLLRKDRSQIIHGPLDLLDSIFVEGEKGLNLQRYKGLGEMNPDQLWETTLDPDARTLLQVKIDDAAEADDLFTRLMGEVVEPRREFIQQNALTVENLDF

SEQ ID NO: 183406 - protein, 231 aa, Unknown
  Bacterial polypetide isolated from the Sargasso Sea
NNIDVQCSLKWNAGYNEDVYPYTNNIYQKDGGTHLLGFRSALTRVVNKYASEQNLLKKSKVLLSGDDVKEGLTCVLSVKIPDPKFSSQTKDKLVSSEVRNIVEGIVNEKLSIWFDQNPSVSKIILTKIIQAAVARDVAKKARENVRRKGALELTGLPGKLADCQNSKQEGTELFIVEGDSAGGSAKQGRNREYQAVLPLRGKILNTFTELSGSKKNVSQSELRTKSLSKMI

SEQ ID NO: 183407 - protein, 227 aa, Unknown
  Bacterial polypetide isolated from the Sargasso Sea
MRRAIGDRYLTYALSTIMHRALPDARDGLKPVHRRILYAMRELKLASTGGFRKSAKISGDVMGNYHPHGDAAIYDAMARLAQDFNVRYPLVDGQGNFGNIDGDNPAASRYTEARMTVIAEALLEGLDENAVDFRENYDGTLNEPIVLPASFPNLLANGATGIAVGMATNIPPHNIAELCDACLHLIKKPDARNETLLNFVPGPDFPTGGVIVESVQSIAESYRTGRG

SEQ ID NO: 183408 - protein, 78 aa, Unknown
  Bacterial polypetide isolated from the Sargasso Sea
MTQFAKETLPISLEEEMRRSYLDYAMSVIVGRALPDARDGLKPVHRRVLYAMHELNNDWNRPYKKSARIVGDVIGKYH

SEQ ID NO: 183409 - protein, 304 aa, Unknown
  Bacterial polypetide isolated from the Sargasso Sea
MNTTHQSPQESQTYDAESIKVLKGLEAVRKRPGMYIGDTDDGSGLHHMVYEVVDNAIDEALAGHCDYIEVILNPNGSVTVIDNGRGIPVDMHKEEGMSAAEVIMTQLHAGGKFDQNSYKVSGGLHGVGVSVVNALSESLHLTIWRDGKERVATFKDGIVQESLHVRQNAPDKKGTQITFLPSREVFTHTEFSFATLEHRLRELAFLNSGVKLLLTDARTTPPHAITLHYEGGVKAFVTYLDRSKTPLHKPPLYIHESKNDIEVEVALEWTDAYHETTLCFTNNIPQRDGGTHLAGFRGALTRAI

SEQ ID NO: 183410 - protein, 293 aa, Unknown
  Bacterial polypetide isolated from the Sargasso Sea
VARDVAKRARENVRRKGALELTGLPGKLADCQNSKQEGTELFIVEGDSAGGSAKQGRNREYQAVLPLRGKILNTYTEINGSKKNGNQSDLRTKSLSKMISSNEIVTLINALGLDPKTEEIDLEDLRYGKIIIMTDADVDGSHIRALLLTFFNNIPFNKLIEKGHVYLAQPPLFKINKGSKGIYIKDEKDLENYIIKNCNDIKKVKKNSKEFDKIIQLEKSKLNIQRFKGLGEMNPEELWNTTLNPETRNLLQVQYSKNIEKDQNLIQTLMGNDVASRKDFIVDHAINVINLDI

SEQ ID NO: 183411 - protein, 198 aa, Unknown
  Bacterial polypetide isolated from the Sargasso Sea
MSKLFKEKIDNILSQKYLSYAISTIISRSLPDVRDGLKPVHRRIIYSMYQLKLFNNSSYKKSARIVGDVMGKFHPHGDQAIYDSLVRMAQDFSTRIKLIDGQGNFGNIDGDNPAAMRYTEARLQKYANYFFDGIEQNSVNFKENYDGQNLEPEVLPSQLPNILINGAMGIAVGMATNIPPHNVVELIESLKLIIRKDK

SEQ ID NO: 183412 - protein, 273 aa, Unknown
  Bacterial polypetide isolated from the Sargasso Sea
IKNPSIEDRELFELIKGPDFPTGGQILGRDGIRETFKTGRGSITMRGVANIEQIKSAGRAEKDAVIITELPFQTNKAGLIERIADMVNEKRLEGISDIRDESDRDGMRIVIELKRDAYPQVVLNNLFKLTPLQNNFSANILALVKGEPTTLSLRKMLDVFLEFRVETIRRRTGFLLKKAEERDHIVKGLLLALGAMDEIINLIRSAKDSISARENLQTDHELSSTQADAILQMQLRRLTALEADKIKAEHDEFTQKIYHISQIFNSKEKIFEI

SEQ ID NO: 183413 - protein, 155 aa, Unknown
  Bacterial polypetide isolated from the Sargasso Sea
MEKIEGNNLTKIKSISMYDEMSSSYLSYAMSVIISRALPDVRDGLKPVHRRILFAMNKGGFDWSKQYRKSARIVGDVIGKYHPHGDQAVYDALVRMVQEFSMSLPLIDGQGNFGSIDGDPPAAMRYTETRLSKISQFLLDDIDKNTGLFKKHYDE

SEQ ID NO: 183414 - protein, 308 aa, Unknown
  Bacterial polypetide isolated from the Sargasso Sea
IEFKDGNAKAPLKQIGKSSTTGTKITFLPSNEIFSSTKFSSQIIQKRIRELAFLNKGIKLIVVDKTQKKEKISEYKFDGGLNEFINYLNQKKDKLKNKNGNDLFKKPISLEGDKNGVEIECSLEWNSAYSEEVYAYTNNIYQKDGGTHLLGFRSALTRVVNKYVSDNNILKKSKLSISGDDIKEGLTALLSIKMPDPKFSSQTKDKLVSSEIRNIVETFINEKLSIWFDQNPAVIKIVLLKIIQAAQARDVARKARESVRRKGALELTGLPGKLADCQNPKRDGTELFIVEGDSAGGSAKQGRNREFK

SEQ ID NO: 183415 - protein, 211 aa, Unknown
  Bacterial polypetide isolated from the Sargasso Sea
MSSSYLSYAMSVIVSRALPDVRDGLKPVHRRILYAMYKGGYDWSKQFRKSARIVGDVIGKYHPHGDQSVYDALVRMVQDFSMSLPLIQGQGNFGSIDGDPAAAMRYTETRLSKVSQYLIDDIEKNTISFKSNYDETEKEPSVLPAQFPNLLVNGAGGIAVGMATSIPPHNLGEIIDGTLALIENKDIKIKELMKHIPGPDFPTGGVIIGKD

SEQ ID NO: 183416 - protein, 318 aa, Unknown
  Bacterial polypetide isolated from the Sargasso Sea
VSEIFECSATENDVGVEIAMQWTDSYSENVLCYTNNIPQKDGGTHLAGFRGSLTRVLKSFIKKENAKKTPTDLLGEDVREGLIAIISVKVPDPKFSSQTKEKLVSSEVESVVSTLFSKYFNEFLLENPKDAMSIVGKVSEAALAREAARKAREMTRRKGVLEIAGLPGKLADCQEKDPTLSEIYIVEGDSAGGSAKQGRNRKNQAILPLKGKIINVEKARIDKVLGSAEVGTLIKALGCGIGKEDFDIDNLRYHRIIIMTDADVDGSHIRTLLLTFFYRQMYEIVEKGHVYIALPPLYKITKGKEFVYASDESEKTML

SEQ ID NO: 183417 - protein, 326 aa, Unknown
  Bacterial polypetide isolated from the Sargasso Sea
VTVKDDDRGIPVDIHKTENKSAAEVIMTTLHAGGKFDDDSYKVSGGLHGVGVSVVNALSERLSLTIHKDGYKYQQDYKHSSPIKPLEKCGSSDETGSVIQFLPSTKYFKDLHYKEEVIKKRLKELAFLNSGITIHFNNDITGNKSKYYYEGGLQEYIKEILHNKKEIHDDLIYIPPMIKGGNSIEISMKWTASYTEQIMCYTNNIYQKDGGTHLSGFRSALTRTINNYSLKNNGKLKYEISGDDCREGLVAIVSIKMSDPKFSSQTKDKLVSSEIKSLTETSLSSKLSEFLEESPKDAKLIIGKIQQAAMAREEARKAKDLIRRKD

SEQ ID NO: 183418 - protein, 110 aa, Unknown
  Bacterial polypetide isolated from the Sargasso Sea
FIVEGDSAGGSAKQGRDRKFQAILPLRGKILNTWKSRTDKILGSTEIGTLITALGTGIGNQEFDLNKLKYHKVVIMTDADVDGSHIRTLLLTFFFKEMRSLIENGNLYIA

SEQ ID NO: 183419 - protein, 298 aa, Unknown
  Bacterial polypetide isolated from the Sargasso Sea
GLDAVRKRPGMYIGDTDDGSGLHHMVFEVIDNSIDEALAGHCKNIIVKINPDNTICVEDDGRGIPVDIHKDEKISAAEVIMTQLHAGGKFDHDSYKVSGGLHGVGVSVVNALSEKLELNIFRDGKEYVINFKDGKSVKPIKKIGQTKKRGTKVTFLPSKEIFSSIKFSPSILEKRIRELAFLNKGISIKLLDSSSKKTKEFCHKYDGGIVEFVKYINNKKPLLINKNEKEVFKKPVYVTASKNNVIVECSFEWNAGYSEEVLPFTNNIHQKDGGTHLLGFRSALTKVINKYANDRNSK

SEQ ID NO: 183420 - protein, 156 aa, Unknown
  Bacterial polypetide isolated from the Sargasso Sea
MKNNNTYQADSIKVLKGLEAVRKRPGMYIGDTDDGTGLHHMVYEVVDNSIDEALAGYCNNIEIYINSDGSITVRDDGRGIPVDLHKGEKKSAAEVIMTQLHAGGKFDHDSYKVSGGLHGVGVSVVNALSEKLKLEINREGKKYFIEFKDGKSIAPL

SEQ ID NO: 183421 - protein, 281 aa, Unknown
  Bacterial polypetide isolated from the Sargasso Sea
MEKNSLETNKSFKPIFVQDEMSSSYLSYAMSVIVSRALPDVRDGLKPVHRRIIYAMYKGGYDWSKPFRKSARIVGDVIGKYHPHGDQSVYDALVRLVQDFSMSVPLINGQGNFGSIDGDPPAAMRYTETKLGRIAQHLTEDLEKNTVLFRSNYDETEKEPEVLPSQYPNILVNGAGGIAVGMATSIPPHNLGEVINATIAYIKNKEITISQLMKYVPGPDFPTGGVIIGKDIIKQGYNKGRGSFKIRGEIEFEERKGGREILVIKSIPYQVNKSIFIEKIA

SEQ ID NO: 183422 - protein, 269 aa, Unknown
  Bacterial polypetide isolated from the Sargasso Sea
LVSSEVRNTVETIISEKLSIWFDQNPSIAKIILTKIIQAAVARDVARKARENVRRKGALELTGLPGKLADCQNSKQEGTELFIVEGDSAGGSAKQGRNRENQAVLPLRGKILNTFTEINGYKKNGNSNDLRTKTLSKMISSNEIVTLINALGLDPKNEEIDLKDLRYGKIIIMTDADVDGSHIRALLLTFFNNKPFNKLIENGHIYLAQPPLFKINKGSKGIYIKNEKELENYIIKNSKEFKKLNKGSKEYDKFIQIEKSRLNIQRFKG

SEQ ID NO: 183423 - protein, 305 aa, Unknown
  Bacterial polypetide isolated from the Sargasso Sea
DFLDEKREKLQNKNGNDLFRKPIYIEGKKNNIELECSLKWNAGYTEDIFSYTNNIYQKDGGTHLLGFRSALTRVVNKYANENNLLKKNKLAISGDDIKEGLTCVLSTKIPDPKFSSQTKDKLVSSEVRMIVETLVNEKLSIWFDQNPSVAKIILAKVIQAAMARDVARKARENVRRKGALELSGLPGKLADCQIGKQDGTELFIVEGDSAGGSAKQGRNRANQAVLPLRGKILNTYVEDLKIKKNGNGNGNGSDQRTKALSKMISSNEIVTLINALGLDPKVEEIDEKDIRYGKNIIMTDADVDG

SEQ ID NO: 183424 - protein, 220 aa, Unknown
  Bacterial polypetide isolated from the Sargasso Sea
MTYTSSPPTDPQNPTISISEEMRKSYLDYAMSVIVSRALPDVRDGLKPVHRRILYAMMEGNYDWSKPPRKSARIVGDVMGNYHPHGDSSIYEAMVRMAQDFSMRLPLVDGQGNFGSVDGDPPAAMRYTESRLARAAESVLRDIDKDTVDFAENYDETQLEPTVLPAEYPNLLVNGANGIAVGMATNVPPHNPAEVISACEAYIRNPDITVEELIEIVPGA

SEQ ID NO: 183425 - protein, 264 aa, Unknown
  Bacterial polypetide isolated from the Sargasso Sea
AAYAREAARKAKEMTRRKGLLDIGGLPGKLADCQEKDPALSELFLVEGDSAGGSAKQGRDRSFQAILPLKGKIINVQKARLDKVLSSNEIGTLITALGTGIGIDEFSLEKLRYHRVIIMTDADVDGSHIRTLLLTFFYNQMFDLLEKGHIYLALPPLYKIKKGGKTHYAKDEEEKDAILKELRKEATEGSRPPEIQRYKGLGEMNPEQLWETTFDPKHRRLVQITLDEARELVDDIFETLMGDQVQPRREFIKDNALRAENIDF

SEQ ID NO: 183426 - protein, 237 aa, Unknown
  Bacterial polypetide isolated from the Sargasso Sea
MVDFNRDNTLPRDIVDEMRESYLNYSMSVIVSRALPDVRDGLKPVHRRILYGMSELGSSWNRPYKKSARIVGDVLGKYHPHGDSSVYDALVRMAQDFSMRYELVDGQGNFGSIDGDNAAAMRYTESRMTRLTSEMLRDLDKDTVNWTENFDETLKEPSVLPSAVPTLLINGSEGIAVGMATKIPPHNLVEVINGLVAMIEDENIDLDELMTHIKGPDFPTAGLILGQDGLRQAYETG

SEQ ID NO: 183427 - protein, 293 aa, Unknown
  Bacterial polypetide isolated from the Sargasso Sea
IKITADDIWKNCSSIVSAKLRDPQFTGQTKERLSSKEFTNFSSAIIKDAFSLWLNQHTSEGEEIALLSIENAQARQKASKKVSRKKITAGPALPGKLSDCTSNDVEEGELFLVEGDSAGGSAKQARNRNFQAVLPLGGKILNTWEVETSEILSSQGINDIAVALGVEPGSNDLEGLRYGKVCILADADPDGLHIATLLCALFLRHFRPLVEKGRIYVAMPPLFRIDQGKEVFYALDEKERDALVEKLKKKNKRAKIEIQRFKGLGEMNASQLRETTMLPESRRLVQLTINRAT

SEQ ID NO: 183428 - protein, 314 aa, Unknown
  Bacterial polypetide isolated from the Sargasso Sea
FMPDIEIFKTIDYSYKNITTRLKEMAYLNPGLTIRFRSDYHQDLWPTNQITYMFTGGVQSFVRSLNRSRNPIHANIASINGKLSPDDAKSKVETPVIVDIAFQYNETFQENVLSFANCIVTPEGGTHLTGFRRSLTRAINNYGKKNGILKDDLKDVSGEDVREGLMAVISVKLGEPQFEGQTKAKLGNPEIESAVTSLMTQQLTEYLEDNPNDAKTILEKASTAARAREAAKKARDLVIRKNAMEGGALPGKLADCSEKDPAKSELFLVEGDSAGGSAKQGRDRNFQAILPLRGKILNVEKARPDKMLGHAEIA

SEQ ID NO: 183429 - protein, 258 aa, Unknown
  Bacterial polypetide isolated from the Sargasso Sea
LTFVNNINTIEGGTHLSGFRSALTRSMNNHASKNNLIKSKKNEKISLTGEDFREGLTAIISVKVAEPQFEGQTKTKLGNGDIKGIVDKIVYEGILDFLEQNPSIGRKVVEKALLAARSRSAAKKARELIRRKSALGSSSLPGKLADCSNRDPNFCELYLVEGDSAGGSAKQGRDRRTQAILPLRGKVINSEKARIDKLLSNNEVQSIITALGTGFGGSLDEEGERSAGDFNIEKLRYHKIIIMTDADVDGSHIRTLLL

SEQ ID NO: 183430 - protein, 237 aa, Unknown
  Bacterial polypetide isolated from the Sargasso Sea
LHAGGKFDHDSYKVSGGLHGVGVSVVNALSEKLELEIYRDGKKYYVEFNNGKSKSPLKITGKSKESGTKITFVPSREIFSSVKFSSQIIEKRMRELAFLNKGLKISVEDKTQKKNKKIEFKYDGGIVEFVEHIDKKREKLNNKNGNDLFKKPIYIQGKKENIELECSLKWNAGYSEDVLPFTNNIYQKDGGTHLLGFRSALTRVVNKYANENNLLKKNKLSISGDDIKEGLTCIISI

SEQ ID NO: 183431 - protein, 267 aa, Unknown
  Bacterial polypetide isolated from the Sargasso Sea
RRILYAMYRGGYDWSKQFRKSARIVGDVIGKYHPHGDQSVYDALVRMVQDFSMSLPLIDGQGNFGSVDGDPPAAMRYTETKLSKISQFLIDDLDKKTVNFKSNYDETEKEPSVLPAQYPNLLVNGAGGIAVGMATSIPPHNLNEIINGTLALIENKEVKLNELMKHIPGPDFPTGGIIIGKNIIKEGYKTGRGSFKIRGEINIEQTKNNRERLVITSIPYQINKSALNERIAELVREKKIEGIRDIRDESNREGIRVAIDLRSNVNP

SEQ ID NO: 183432 - protein, 264 aa, Unknown
  Bacterial polypetide isolated from the Sargasso Sea
NSASWNDAYSENVLCYTNNIPQKDGGTHLSGFRSSLTRVMKTFIRKEELNKKSPVELLGEDVREGLTAIVSVKIPDPKFSSQTKEKLVSSEVESVVSNVFNKNFNEYLLENPKEAMSILTKISEAALAREAARKAREMTRRKGVLEVAGLPGKLADCQEKDPALSEIYIVEGDSAGGSAKQGRNRQNQAILPLKGKILNVEKARLDKVLSSQEIGTLVTALGCGIGTDEFDADKLRYHRIIIMTDADVDGSHIRTLLLTFFFRQ

SEQ ID NO: 183433 - protein, 258 aa, Unknown
  Bacterial polypetide isolated from the Sargasso Sea
YFSKKKQMNKNTNQNYQADSIKVLKGLEAVRKRPGMYIGDTDDGTGLHHMIYEVVDNSIDEALAGFCKKIEISMNSNGSITVTDDGRGIPVDIHKGEKKSAAEVIMTQLHAGGKFDHDSYKVSGGLHGVGVSVVNALSEKLELTIERDGKEYFIEFKNGEAKAPLKSTGKSKKTGTQITFFPSKEIFSSIKFNFNIIQKRLRELAFLNKGISIILNDLTQKKNKSLEFKYDGGIIEFVNFLDEKRDYLKNKNGNNLLK

SEQ ID NO: 183434 - protein, 303 aa, Unknown
  Bacterial polypetide isolated from the Sargasso Sea
MYLLNLGPKSQFKKSARVVGDVIGKFHPHGDQSVYDALVRLAQDFLTKYPLVYGQGNFGNIDGDNAAAMRYTEAKLTSVAESILKDIEYDTVNFKKTYDGELEEPEILPSQFPNILANGSSGIAVGMATNIPPHNITELCNGIKIINDKPNTKLNDLLKIIKGPDFPTGGVLNNNKKEIQRAYKTGKGFFEIRASYKIEELGRGLYQIVVTQIPYQVNKSKLIEKIASLILEKKNKLLDNIIDESDEKVRIILRPKNRNVDPNILMESLFKSTDLSTKFFLNMNILNDKQQPCVMPLIDVLKI

SEQ ID NO: 183435 - protein, 223 aa, Unknown
  Bacterial polypetide isolated from the Sargasso Sea
MVNKNTNNYQADSIKVLKGLEAVRKRPGMYIGDTDDGTGLHHMVYEVVDNSIDEALAGYCKKIEVNINLDGSITVQDDGRGIPVDFHKQEKKSAAEVIMTQLHAGGKFDHDTYKVSGGLHGVGVSVVNALSQKLELYVERDGKKYFVEFINGEAKTPLKVTGKSKNTGTKINFLPSKDIFSSTNFSFTIIQKRMRELAFLNKGVKIVLNDLSQKKKRTSEFKF

SEQ ID NO: 183436 - protein, 264 aa, Unknown
  Bacterial polypetide isolated from the Sargasso Sea
KKTGKSKKFKNTGGLSSYVTHLKGRKQTVSEIFECSATENDVGVEIAMQWTDSYSENVLCYTNNIPQKDGGTHLAGFRGSLTRVLKSFIKKENAKKTPTDLLGEDVREGLIAIISVKVADPKFSSQTKEKLVSSEVEGVVSTIFSKYFNEFLLENPKDAMSIVGKVSEAALAREAARKAREMTRRKGVLEIAGLPGKLADCQEKDPTLSEIYIVEGDSAGGSAKQGRNRKNQAILPLKGKIINVEKARIDKVLGSAEVGTLIKA

SEQ ID NO: 183437 - protein, 288 aa, Unknown
  Bacterial polypetide isolated from the Sargasso Sea
VYDALVRMVQDFSMSLPLVDGQGNFGSIDGDPAAAMRYTETRLSKVSQYLIDDIEKNTISFKSNYDETEKEPSVLPAQFPNLLVNGAGGIAVGMATSIPPHNLGEVINGTLALIENKDIKIKDLMKHIPGPDFPTGGVIIGKDIIKQGYNKGRGSFKIRGEISIESLKNGRERLVITSIPYQVNKSVLNERIAQLVREKKIEGIRDIRDESNREGIRVSIDLRSGVEPETVKRQLYKNTQIESSFGFNTLAIVDGKPQTCNLKEFLSNFLNFREDVVIKKTKFDLNKA

SEQ ID NO: 183438 - protein, 284 aa, Unknown
  Bacterial polypetide isolated from the Sargasso Sea
ARDRRHQAILPLRGKILNVERARFDKMIGSAEIGTLIAALGTGVGREDFNPDKTRYHKIIIMTDADVDGSHIRTLLLTFFYRQMPELIERGYLYIAQPPLYRVQKGKSEVYLKDDGAMEEFLMREALGNCTLSIGEGEEVGSDELLEIMELSRQAKRAMEPLTRKVGNSDVVEQTAIAGALNAEVLADTVQAQQAAEYVAKRLDALADPLERGWNSIPQDGGGLIFSRTLRGVAQACIIDGATVRSAEGRRLDSMTPTLQRYFVRYPALRAKDEEFRISGPISL

SEQ ID NO: 183439 - protein, 260 aa, Unknown
  Bacterial polypetide isolated from the Sargasso Sea
MRYHKIIIMTDADVDGSHIRTLLLTFFYRHMKPIIESGRLYIAQPPLYRIKKGNSTVYKKDEKDLEDYLIEEGLKNTSLKTTQNDQIAGNQLKELIYLSKKTKNLITPLMRRIDNSDIIENAAIVRGLNLNNLRDKKIGDEIAKYLQQRLNIISNISEKNWKVSYKNNAIILERNIRGFNQKFVIDENFVITPESKALNELRNELMENFYRIKENGTGILKNKDIEYSIFGPISLIDRILDLGKSGIQINRYKGLGEMNS

SEQ ID NO: 183440 - protein, 313 aa, Unknown
  Bacterial polypetide isolated from the Sargasso Sea
DKKTGKSKKFSNSGGLSSYVKFLKGRKQNISEIFHCEGEQDGLSVEIALQWNDAYSENVLCYTNNIPQKDGGTHLSGFRSSLTRVMKTFIRKEELNKKSPVELLGEDVREGLTAIVSVKIPDPKFSSQTKEKLVSSEVESVVSNVFNKNFNEYLLENPKEAMSILTKISEAALAREAARKAREMTRRKGVLEVAGLPGKLADCQEKDPALSEIYIVEGDSAGGSAKQGRNRQNQAILPLKGKILNVEKARLDKVLSSQEIGTLVTALGCGIGTDEFDADKLRYHRIIIMTDADVDGSQHKNFAFNILLQANVE

SEQ ID NO: 183441 - protein, 296 aa, Unknown
  Bacterial polypetide isolated from the Sargasso Sea
SSFKKSARIVGDVMGKFHPHGDQAIYHSLVRLAQDFSSRVTLIEGQGNFGNIDGDNAAAMRYTEARLEEITELFFDGIEEDSTTFSENYDGQNLEPDVLPSKLPNILLNGATGIAVGMATNIPPHNLLELNECIIQLIKKPNSLDSELLKFIKGPDLPTGGEIILSSIEKKSIYKKGFGSFLIKSKWHQEKIKNGMYEIVITEIPFQVNKIKIIEQLANLIHLKKIPLDDVRDESDENIRIVLKPRNRNIDKSKLVDLCFKLTDLSIKYSCNFNVLEKGRIPKQLGLKSILTQFID

SEQ ID NO: 183442 - protein, 298 aa, Unknown
  Bacterial polypetide isolated from the Sargasso Sea
MGSQKEPDILPAQLPFLLLNGSSGIAVGMATNIPPHNLGEIVDGLVALVKNKDISDKKLSKIIKGPDFPTGGELIYSRAIEELYETGKGSLTIRGVINTEEVNLGKGKHKRNALIITELPYQINKAGWIEKLAELVNSGKIDGISDIRDESDRDGMRIVIELKKDSNSELVISNLYKKTTLQTNYGAIFLALIKGKPIQLNLKKYLNYFLEFREETIRKRTHYFLKNTLEKLEISEGLSKTTKNIKKVIEIIEESQNFVEAKSKLIENFSLSEKQANSVLEMPLRKLTNLEKKQIVEK

SEQ ID NO: 183443 - protein, 317 aa, Unknown
  Bacterial polypetide isolated from the Sargasso Sea
QTGKPFKKGTTICFKPDKTIFSGGIEFEYALLSSRLRELAYLNGGVKIVFRDERNQLSDGSYKEEIYLYQGGIKEYVEYMNAEKESIHPEIIYVDSQKENVYVEAALQWCSDVYSDNILGFANNIRTIDGGTHIEGLKTVLTRTFNNLAKKRGKRKDIEKNLAGENIREGLTVVLSVKVPDPEFEGQTKTKLGNTEVRGIVDSLIGDALTKYMEFNPGILDLILEKAIQSFNAAEAARRARELVRRKSVLESSTLPGKLADCSSRDPSESEIYIVEGDSAGGSAKQGRDRNFQAILPSRGKILYIEKTDDTRIYKNT

SEQ ID NO: 183444 - protein, 277 aa, Unknown
  Bacterial polypetide isolated from the Sargasso Sea
EKNGVPVEVAMIYNTSFSENLHSYVNNINTHEGGTHLSGFRRGLTTTLKKYADSSGLLDKLKFEISGDDFREGLTAIVSVKVAEPQFEGQTKTKLGNRDVTSAVSQSVSEMLENYLEENPNDAKIIVQKVILAAQARHAARKAREMIQRKTVMSGGGLPGKLSDCSEQDPSLCEVFLVEGDSAGGTAKQGRDRNFQAILPLRGKILNVEKAMQHKVFENEEIRNIYTALGVSIGTEDDTKALNLEKLRYHKIVIMCDADVDGSHISTLILTFFFRYM

SEQ ID NO: 183445 - protein, 294 aa, Unknown
  Bacterial polypetide isolated from the Sargasso Sea
QLLLENVARKARESVRRKGALELTGLPGKLADCQNSKQEGTELFIVEGDSAGGSAKQGRNREFQAVLPLRGKILNTFTETNGKNGKFTDYKTKSLSKMMSSNEIVTLINALGLDPKADELDLKDLRYGKIIIMTDADVDGSHIRALLLTFFNNKPFNKLIENGNVYLAQPPLFKISKGSKGIYIKDEADLEKYLINNSKELKKINKKSKEFQIKLSEEKSKISIQRFKGLGEMNPIELWNTTLNPDTRNLLQVEYSKKNPKKDQDLIYTLMGNDVSLRKDFIVENAINVANLDI

SEQ ID NO: 183446 - protein, 294 aa, Unknown
  Bacterial polypetide isolated from the Sargasso Sea
MNEAGYVSGKPSRKSARIVGDVMGKYHPHGDSAIYDAMVRLAQDFSMRVPLIDGQGNFGSMDGDSAAAMRYTEAKLSSISSFLVNDINHETVTFKENYDGTTLEPDLLPAEFPNLLINGSEGIAVGMATKIPPHCPSEVIAACCKFVENPDVSDEDLLSLVEGPDFPTGGIIVGRAGIRSAYLTGKGSILIRGKTNIETTKKGKDSIVISEIPFAVKKSNLIETIAKVSRDKIIEGISELRDESNREGVRIVIDLKRDAQSEVILNQLFKFTPLQTSFGINMLALNKGVPELLN

SEQ ID NO: 183447 - protein, 319 aa, Unknown
  Bacterial polypetide isolated from the Sargasso Sea
EGLTAILSVKMPDPKFSSQTKDKLVSSEIRNIVESIVTDKVTIWFDQNPSVIRIVLDKVLQAAIARDLARKARDSVRRKGSLELSGLPGKLADCQISSMEGTELFIVEGDSAGGSAKQGRKREFQAVLPLRGKILNTYVNENKKRNGANGSTENKTLSKMMSSNEIVTLINALGTGSTNFNLEDLRYEKIIIMTDADVDGSHIRTLLLTFFNNKPFNELIEKGHLYLAQPPLFKVTKGSKSVYIKNEKDLEKYILKSKENGLKKVKKSEFEKFINEEKQKLNIQRFKGLGEMNPEELWDTTLNPENRTLLRVEYSKGTK

SEQ ID NO: 183448 - protein, 106 aa, Unknown
  Bacterial polypetide isolated from the Sargasso Sea
MTKNNNSKYQADSIKVLKGLEAVRKRPGMYIGDTDDGTGLHHMVYEVVDNSIDEALAGYCNKIEVFMNKDGSISVKIMGRGYTTDLHKTEKNQLLKLYDTLHAGGK

SEQ ID NO: 183449 - protein, 189 aa, Unknown
  Bacterial polypetide isolated from the Sargasso Sea
MTKNNSNNYQADSIKVLKGLEAVRKRPGMYIGDTDDGTGLHHMVYEVVDNSIDEALAGYCKKIEISINDDNSVTVIDDGRGIPVDIHKGEKKSAAEVIMTQLHAGGKFDHNSYKVSGGLHGVGVSVVNALSERLKLTINRDNKKYYIEFKNGDAKTSLKQVGKSKTSGTEINFVPSKDIFTSIKFSFSV

SEQ ID NO: 183450 - protein, 266 aa, Unknown
  Bacterial polypetide isolated from the Sargasso Sea
MVNKNQANVFKRPIYISGEKDNVIVECSLKWNAGYSEDVLPFANNIHQSDGGTHLLGFRSALTRVINKYAASTNLLKKNKISLEGNDIREGLTGVLSIKIPDPKFSSQTKDKLVSSEVRFIVESIISDKLSTWFDQNPGVTKIVLLKIVQAAIARDVARKARESVRRKGSLELSGLPGKLADCQMGKSEGTELFIVEGDSAGGSAKQGRDRKFQAVLPLRGKILNTFIDTNSIKTKNGNGEDFQNKVFSKMMSSNEIVTLINALGT

SEQ ID NO: 183451 - protein, 165 aa, Unknown
  Bacterial polypetide isolated from the Sargasso Sea
ALGCGIGEEDFDINNLRYHRIIIMTDADVDGSHIRTLLLTFFYRQMYEIVDKGHIYIALPPLYKITKGKEFFYASDEKEKDKAIKSLSKSGTRGLEVQRYKGLGEMNPEQLWTTTMDPQNRRMMRVDIKDVQDANESFEILMGDDVEPRREFIDKNALTVKELDI

SEQ ID NO: 183452 - protein, 216 aa, Unknown
  Bacterial polypetide isolated from the Sargasso Sea
MPKNSKKIKNQAYAADSIKVLKGLDAVRKRPGMYIGDTDDGSGLHHMVFEVVDNSIDEALVGYCKNISVTMNKDNSITVEDDGRGIPVDMHKGEKMSAAEVIMTQLHAGGKFDHDSYKVSGGLHGVGVSVVNALSEDLELNIYREGKEYSISFKDGNSVKPLKSIGKTKKTGTKITFLPSKKVFSSIKFSSTILQRRMQELAFLNKGISINLFDKT

SEQ ID NO: 183453 - protein, 287 aa, Unknown
  Bacterial polypetide isolated from the Sargasso Sea
QSVYDALVRMVQDFSMSLPLVDGQGNFGSIDGDPAAAMRYTETRLSKVSQYLTDDIEKNTILFKSNYDETEREPTVLPAQFPNLLVNGAGGIAVGMATSIPPHNLAEVINGTLALIDNKDIKIKELMKHIPGPDFPTGGVIIGKDIIKQGYNKGRGSFKIRGEISIENLKNGRERLVITSIPYQVNKSVLNERIAQLVREKKIEGIKDIRDESNREGIRVSIDLRNGVEPETVKRQLYKNTQIESSFGFNTLAIVDGKPQTCNLKDFLYNFLNFREDVVLKKTKFDL

SEQ ID NO: 183454 - protein, 301 aa, Unknown
  Bacterial polypetide isolated from the Sargasso Sea
ALPDVRDGLKPVHRRILYAMYKGGYDWSKQFRKSARIVGDVIGKYHPHGDQSVYDALVRMVQDFSMSLPLIQGQGNFGSIDGDPAAAMRYTETRLSKVSQYLIDDIEKNTISFKSNYDETEKEPSVLPAQFPNLLVNGAGGIAVGMATSIPPHNLGEIIDGTLALIENKDIKIRELMKHIPGPDFPTGGLIIGKDIIKQGYNNGRGSFKIRGEISIEQQKNGRERLVITSIPYQVNKSVLNERIAQLVREKKIEGIRDIRDESNREGIRVAIDLRNGVEPETIKRQLYKNTQIESSFGFIL

SEQ ID NO: 183455 - protein, 247 aa, Unknown
  Bacterial polypetide isolated from the Sargasso Sea
RNKDKDGNDVHEEFYSKDGLVEFIKFLDDTREPIMKDVIAFEGEKNGVPVEVAMVYNTSYSENLHSYVNNINTHEGGTHLSGFRRGLTHTLKKYSESSGMLDKLKFDISGDDFREGLTAIISVKVAEPQFEGQTKTKLGNKEVSASVSQAVSEMLRDYLEEHPDDAKTIVQKVILAAQARHAAQKAREMVQRKSVMSIGGLPGKLSDCSEQDPAKCEVFLVEGDSAGGTAKQGRDRAFQAILPLRGK

SEQ ID NO: 183456 - protein, 213 aa, Unknown
  Bacterial polypetide isolated from the Sargasso Sea
WRIGKQGRDRSFQAILPLKGKIINVQKARLDKVLSSNEIGTLITALGTGIGTDEFSLEKLRYHRVIIMTDADVDGSHIRTLLLTFFYNQMFALLEKGHIYLALPPLYKIKKGGKTHYAKDEEEKDAILKELRKEAAEGSRPPEIQRYKGLGEMNPEQLWETTFDPKHRRIVQITAEDTRDIIDEIFETLMGDQVQPRRKFIDDNALRAENIDF

SEQ ID NO: 183457 - protein, 240 aa, Unknown
  Bacterial polypetide isolated from the Sargasso Sea
MTDFAKQILPINIEDELKTSYLSYAMSVIHGRALPDVRDGLKPVHRRILYAQHVLRNTYRQPYKKSARVVGDVIGKYHPHGDSAVYEAMVRMAQDFSMRYTLVEGQGNFGSIDGDSPAAMRYTEVRMAKITDMILNDIEKETVSYSPNYDGTEQIPDVMPTRIPALLVNGSSGIAVGMATNVPPHNLTEVLNGCLLLLDKPKASIDEIIQIITGPDFPTGGTIDGRIGIYEGYKTGRGII

SEQ ID NO: 183458 - protein, 287 aa, Unknown
  Bacterial polypetide isolated from the Sargasso Sea
IKVLKGLDAVRKRPGMYIGDTDDGTGLHHMVFEVVDNSVDEALAGFCTHIEVIIHEDDSITVKDNGRGIPVDKHKTEKTSAAEVIMTVLHAGGKFDDDSYKVSGGLHGVGVSVVNALSETLNLRIHKNGHTYEQDYVHGVPQKPLKKGSKTDRSGSTVTFKPSSKTFTNTTYSFDILSKRLRELSFLNSGLSIKLTDTRSGKEEEFYFEGGISAFVSHLNKVQSPVHESVINFSKTIDDITVDIAMQWNESYRENMYCFANTIRQKDGGTHLAGFRGALTRTINTYI

SEQ ID NO: 183459 - protein, 307 aa, Unknown
  Bacterial polypetide isolated from the Sargasso Sea
RNPSEIKKVIDKIIEASNAREAARKARELTRRKTGLENTSLPGKLADCQEKNPELSELFIVEGDSAGGSAKQGRDRKNQAILPLRGKILNVERANDKQVLTSNEIGALITAIGAGVGNPTDDNAQNKIEGKFDVSKMRYHKIVIMTDADVDGSHIRTLLLTFFYRHMKPIIDSGRLFIAQPPLYRLKKGNSTVYKKDDNDLEDYLIEEGLKNTIFENTQKSQIAGEELKQIIYLSKKTKNLVLPLLRRVDNSDIIEHAAIVRGLDLRNLKDNKIGQELAKYLQQRLNLISNIAQKNWIVNHTNNSIL

SEQ ID NO: 183460 - protein, 241 aa, Unknown
  Bacterial polypetide isolated from the Sargasso Sea
MNQEELDSNKKAAQEKAAQYSAENIKVLEGLDAVRKRPGMYIGSTGPDGLHHMVYEIVDNSIDEAMAGFCSEIEIKIHIDGSISIKDNGRGIPVSEHATEKKSALEVVMTVLHAGGKFDDSVFSFSGGLHGVGASVVNALSEWTQVEVRQKGKVYAQAYKQGTPDEAVKEVGETEETGTYTHFKPDATIFSETKFQFDVLQRRFRELSFLNKGIKIILIDGRSDDKAEFFFEGGLLSFGEY

SEQ ID NO: 183461 - protein, 119 aa, Unknown
  Bacterial polypetide isolated from the Sargasso Sea
MIKNTKNKDYQADSIKVLKGLDAVRKRPGMYIGDTDDGTGLHHMVYEVVDNSIDEALAGHCKNIQVDINSNGTITVKDDGRGIPTDIHKGEKKSAAEVIMTQLHAGGKFDHDSYKVSGG

SEQ ID NO: 183462 - protein, 207 aa, Unknown
  Bacterial polypetide isolated from the Sargasso Sea
IVGDVIGKYHPHGDQSVYDALVRMVQDFCMSLPLIQGQGNFGCIDGDPAAAMRYTETRLSKVSQYLIDDIEKNTISFKSNYDESEKEHSVLPAQFPNLLVNGAGGIAVGMATSIPPHNLGEIIDGTLALIDNNDIKIRELMKHIPGPDFPTGGVIIGKDIIKQGYTNGRGSFKIRGEILVEQQKNGRERLVITSIPYQVNKSVLNER

SEQ ID NO: 183463 - protein, 300 aa, Unknown
  Bacterial polypetide isolated from the Sargasso Sea
KRQFKNKNENDLFKKPIYIEGLKNNIDVQCSLKWNAGYSEDVLPYTNNIYQKDGGTHLLGFRSALTRVVNKYANEQNLLKKNKVSLSGDDVKEGLTSVLSIKIPDPKFSSQTKDKLVSSEVRNIVETIINEKLSIWFDQNPSISKIILTKIIQAAVARDVARKARENVRRKGALELTGLPGKLADCQNSKQDGTELFIVEGDSAGGSAKQGRNRENQAVLPLRGKILNTFTDLNESKKNGNANDLRTKSLSKMISSNEIVTLINALGLDPKNEDIDLKDLRYGKIIIMTDADVDGSHIRA

SEQ ID NO: 183464 - protein, 173 aa, Unknown
  Bacterial polypetide isolated from the Sargasso Sea
MSDASKVQNAYGAEQIQVLEGLEPVRKRPGMYIGSTGPRGLHHLVYEVVDNSVDEALAGHCDRIVVVLGEDGSASVSDNGRGIPTDVHPRTGKSALETVLTVLHAGGKFGAGGYKVSGGLHGVGVSVVNALSEWVQVTVRRQGQVHRQRFERGAAIGGLASESQPASESGETG

SEQ ID NO: 183465 - protein, 315 aa, Unknown
  Bacterial polypetide isolated from the Sargasso Sea
KMAKKYNSYQADSIKVLKGLEAVRKRPGMYIGDTDDGTGLHHMVYEVVDNSIDEALAGHCKNISVDINQDGSVSVRDDGRGVPVDIHKGEKKSAAEVIMTQLHAGGKFDHDSYKVSGGLHGVGVSVVNALSERLELTINRDGKKHFIEFKNGDAKSPLRVVGKSKNTGTEIKFLPSKEIFSLNKFSFLTLQKRMRELAFLNKGIKIILTDLSQKKPKSVEFKFNGGIVEFVEFLDEKREKLKNKSDNDLFRRPIYIEGLKNKIDVQCSLKWNAGYNEDVFPYTNNIYQKDGGTHLLGFRSALTRVINKYASEQNL

SEQ ID NO: 183466 - protein, 160 aa, Unknown
  Bacterial polypetide isolated from the Sargasso Sea
MSDSESYNSDSIKVLKGLEAVKKRPGMYIGDTEDGTGLHHMVHELVDNSIDEALAGYCDEIIVIIHKEEAVTVKDNGRGIPVDMHPEEKVSAAEVIMTTLHAGGKFDDNSYKVSGGLHGVGISVVNALSEKLVLRISREGSLYEQEYRDGAPIAPIEKVA

SEQ ID NO: 183467 - protein, 294 aa, Unknown
  Bacterial polypetide isolated from the Sargasso Sea
MRYHKVIIMTDADVDGSHIRTLLLTFFYRHMKPIIDEGRLYIAQPPLYRAKKGTSIQYLKDELQLEDFLINEGTKNLVLEIPNAKNKFKAISGIELLNIINLARKAKKLIMPLTRRIDNQKVIEQASIIRAINKENLNSDEIGNEIAKYLQLRLNTIETKSWEVKYSPGKLLINKNERGVSHSYEINNEFLITPEAKSLNKLRDDLMENFGILKNGCAGIIKNSNNEYKINGPIDLIEKILEIGKSGIQVNRYKGLGEMNPDQLWETTLDKNFRSLLLVKIDEVNEANSLFETL

SEQ ID NO: 183468 - protein, 249 aa, Unknown
  Bacterial polypetide isolated from the Sargasso Sea
MTKNNTYQADSIKVLKGLEAVRKRPGMYIGDTDDGTGLHHMVYEVIDNSIDEALAGHCKNINVRINADGTVTVSDDGRGIPVDIHKTEKKSAAEVIMTQLHAGGKFDHDSYKVSGGLHGVGVSVVNALSKKLQLEINRDSKKYFIEFEDGEAKAPLKAIGKSKQSGTKITFLPSTEIFSSISFSANILIKRMRELAFLNKGIKIIFIDASLKKEKISEFKFDGGVIEFVDFLDEKREKLQNKNGNDLLE

SEQ ID NO: 183469 - protein, 152 aa, Unknown
  Bacterial polypetide isolated from the Sargasso Sea
MGKNLQSNYGADSIKVLKGLDAVRKRPGMYIGDTDDGSGLHHMIFEVVDNSIDEALAGHCDKIRISLNSNGSVTVEDNGRGIPTEIHPEENISAAEVIMTQLHAGGKFDQDSYKVSGGLHGVGVSVVNALSENLNLKIYRDSNEYEINFKNG

SEQ ID NO: 183470 - protein, 275 aa, Unknown
  Bacterial polypetide isolated from the Sargasso Sea
LSYAMSVIISRALPDVRDGLKPVHRRIIYAMHKGGFDWTKQFRKSARIVGDVIGKYHPHGDQAVYDALVRMVQEFSMSLPLIDGQGNFGSIDGDPPAAMRYTEARLAKISQYLIDDIDKETIVFKSNYDETEKEPTVLPSQFPNLLVNGAGGIAVGMATSIPPHNLGEVIDGTLALIKNKDIKINELMKFIPGPDFPTGGTIIGKDIIKQGYKTGRGSFKIRGEIGVENLKNGRDRIVISSIPYQINKSILNERIAELVREKKIEGIRDIRDESN

SEQ ID NO: 183471 - protein, 250 aa, Unknown
  Bacterial polypetide isolated from the Sargasso Sea
YDELKRPVVLPAQYPNLLVNGAGGIAVGMATSIPPHNLGEIIDGTLALINNKDIKINELMKHIPGPDFPTGGIIIGKDIIKQGYKTGRGSFKIRGEINVENLKNGRDRIVITSIPYQVNKSVMSERIAELVRDKKIEGIRDIRDESNREGIRLAIDLRTNVEPETIKRQLYKFTSIESSFGFNTLAIVDNKPKTCNLKDFLENFLKFREDVVIKKTKYDFKKAEERAHILIGVFCSVENLDKVIKIIRGI

SEQ ID NO: 183472 - protein, 279 aa, Unknown
  Bacterial polypetide isolated from the Sargasso Sea
LGFRSSLTRIINKYASEKNLTKKNKVTIGGEDIKEGLTAILSIKMPDPKFSSQTKDKLVSSEIRNIVETIVSDKVSVWFDQNPSIVRSVLDKVLQAAIARDLARKARDSVRRKGTLELSGLPGKLADCQISTMEGTELFIVEGDSAGGSAKQGRKREFQAVLPLRGKILNTYVNETKKTNGANGAHETKTLSKMMSSNEIVTLINALGTGSKDFNIENLRYEKIIIMTDADVDGSHIRTLLLTFFNNRPFNQLIEKGHLYLAQPPLFKVTKGTKSAYIK

SEQ ID NO: 183473 - protein, 143 aa, Unknown
  Bacterial polypetide isolated from the Sargasso Sea
MTDADVDGSHIRTLLLTFFYRKMKEIIDGGYLYLALPPLYRVSQGKKEYYAYDDNERDLMIERMQKENKNTKVSIQRYKGLGEMNPGQLWETTMDPETRTLMQVTVESAAEAAETFQNLMGSDVEARRTFIEKNAKFVVNLDI

SEQ ID NO: 183474 - protein, 97 aa, Unknown
  Bacterial polypetide isolated from the Sargasso Sea
MPRDIVDEMKESYLNYSMSVIVSRALPDVRDGLKPVHRRILYGMSELGSSWNRPYKKSARIVGDVLGKYHPHGDSSVYDALVRMAQEFSMRYELVDG

SEQ ID NO: 183475 - protein, 289 aa, Unknown
  Bacterial polypetide isolated from the Sargasso Sea
PIYVTATKNNVTVECSLEWNAGYAEEVLPFTNNIPQKDGGTHLLGFRTALTRIINKYTADRNNKKSKINLSGEDIKEGLTAVLSIKMPDPKFSSQTKDKLVSSEIRNIVEHVISEKVSTWFDQNPSIAKVIIEKITQAAMARDVARKARDSVRRKGTFELSGLPGKLADCQIQKREGTELFIVEGDSAGGSAKQGRVREYQAVLPLRGKILNTYVNGKSNGEDQSTKALSKIMSSNEIVTLINALGTGSKDFNIQNLRYDKIIIMTDADVDDSHIRTLLLTFFNNFPFN

SEQ ID NO: 183476 - protein, 278 aa, Unknown
  Bacterial polypetide isolated from the Sargasso Sea
KDSYLSYSLSVIIGRALPDVRDGLKPVHRRLLYGMKDLGLDFNKSYKKSARVVGDVMGKFHPHGDTALYEALVRMAQDFSLRYPLVEGQGNFGSIDGDPAAAMRYTEVKLSRLSSQILEDLEKETVDFAENYDGSTKEPKVLPSKIPTLLLNGASGIAVGMSTNIPPHNFKELSSAIIEQIKKPEITIDQLLQIMPGPDFPTGGIVHGSKDVIQQAYKTGKGIIKLRGVANIEPESNKIVITEIPYQVNKSKLIEKIADLVREEKLKGISDIRDESNR

SEQ ID NO: 183477 - protein, 313 aa, Unknown
  Bacterial polypetide isolated from the Sargasso Sea
RALPDVRDVLKPVHRRILYAMHKGGFDWSKQFRKSARIVGDVIGKYHPHGDQAVYDALVRMVQDFSMSLPLIDGQGNFGSIDGDPPAAMRYTETRLAKIAQFLLDDIEKDTVSFKSNYDETEQEPDVLPAQYPNLLVNGAGGIAVGMATSIPPHNLGEVVDATLALIKNKDIKLSELMKHVPGPDFPTGGIIIGKDIIKQGYKSGRGSFKIRGDIKIEQAKGGRERLVITSIPYQVNKSILNERIAELVREKKIEGIRDIRDESNREGIRVAIDLRSSVEPETIKRQLYKYTSIESSFGFNTLAIVDNKPKDL

SEQ ID NO: 183478 - protein, 276 aa, Unknown
  Bacterial polypetide isolated from the Sargasso Sea
RKSARIVGDVIGKYHPHGDQSVYDALVRLVQDFSMSVPLISGQGNFGSIDGDPPAAMRYTETKLGRIAQFLTEDLEKNTVEFRSNYDETEREPEVLPSQYPNILVNGAGGIAVGMATSIPPHNLGEVINATIALINNKDITISQLMKHLPGPDFPTGGVIIGKDIIKQGYNKGRGSFKIRGEIEFEEKKGGRDLLIIKSIPYQVNKSILIEKIAQLVRDKKIEGIRDLRDESNREGIRVVIELRKGIEPESVRRQLYKLTNIESSFWFNTLAIVEN

SEQ ID NO: 183479 - protein, 289 aa, Unknown
  Bacterial polypetide isolated from the Sargasso Sea
KENVYVEAALQWCSDVYSDNILGFANNIRTIDGGTHIEGLKTVLTRTFNNLAKKRGKRKDIEKNLAGENIREGLTVVLSVKVPDPEFEGQTKTKLGNTEVRGIVDSLIGEALTKYMEFNPGILDLILEKAIQSFNAAEAARRARELVRRKSVLESSTLPGKLADCSSRDPSESEIYIVEGDSAGGSAKQGRDRNFQAILPLRGKILNIEKTDDTKIYKNTEIQSLITALGLGIKGEEFDESSLRYHRVVIMTDADVDGAHIRTLLLTFFYRYQRELVEKSFIYIACPPL

SEQ ID NO: 183480 - protein, 262 aa, Unknown
  Bacterial polypetide isolated from the Sargasso Sea
GIPVDVHKKEGVSAAQLIMTTLHSGGKFDDNSYKVSGGLHGVGVSVVNALSKKLTLEVHRDGGEYYQEYNEGKPKAKLKKIKKSSKTGTIITFFPSKEIFTSTKFEIEKIYKRIQELSFLNAGVSINVEDKKTGKSKKFKNNGGLSSYVTHLKGRKQGLSDIFECSATENEVGVEISMQWTDSYSENVLCYTNNIPQKDGGTHLAGFRGSLTRVLKTFIKKENAKKTPTDLLGEDVREGLIAIISVKVPDPKFSSQTKEKLV

SEQ ID NO: 183481 - protein, 290 aa, Unknown
  Bacterial polypetide isolated from the Sargasso Sea
LQEEMQRSYLEYAMSVIVGRALPDARDGLKPVQRRIIFAMYELGLTPDKPFRKCARVVGDVLGKYHPHGDQAVYDALVKLVQNFSTKYPTLDGHGNFGSVDNDPPAAMRYTETRLAPIAHKGFLEEIGSETVSFSNNFDGSQKEPDVLPAQLPFLLLNGSSGIAVGMATNIPPHNLGEIVDGLVALVKNKDISDKKLSNIIKGPDFPTGGELIYSRSIEELYETGKGSITIRGVINSEEVNLGKRKHKKNALIITELPYQINKAGWIEKLAELVNSGKINGISDIRDESD

SEQ ID NO: 183482 - protein, 279 aa, Unknown
  Bacterial polypetide isolated from the Sargasso Sea
SDIKVIINKNGSVTIEDNGRGIPVDVHKKEGVSAAQLIMTTLHSGGKFDDNSYKVSGGLHGVGVSVVNALSKKLTLEVHRDGGEYFQEYSDGKPKAKLKKVKKSDRTGTKITFFPSEKIFTSIDFEVDRIYKRIQELSFLNAGVSINVEDKKSGKSKKFKNNGGLSSYVTHLRGRKQTVSDIFECSATDNDVGVEIAMQWTDSYTENVLCYTNNIPQKDGGTHLAGFRGSLTRVLKSFIKKENAKKTPTDLLGEDVREGLIAIISVKVPDPKFSSQTKE

SEQ ID NO: 183483 - protein, 297 aa, Unknown
  Bacterial polypetide isolated from the Sargasso Sea
KRNKITLSGEDIKEGLTAVLSIKMQDPKFSSQTKDKLVSSEIRLIVESIINDKISTWFDQNPSIAKTVLEKITQAAMARDVARKARDNVRRKGTFELSGLPGKLADCQIQRKEGTELFIVEGDSAGGSAKQGRVREFQAVLPLRGKILNTYVNGKSNGNDHATKALSKMMSSNEIVTLINALGTGSKDFNIDNLRYDKIVIMTDADVDGSHIRTLLLTFFNNHPFNQLIENGHIYLAQPPLFKVTKSNKSVYIKDEKALEEYMLKAAGKNDKKIKKGSAEYNKFIQDQREKLSIQKI

SEQ ID NO: 183484 - protein, 206 aa, Unknown
  Bacterial polypetide isolated from the Sargasso Sea
MSDKTSKIDNSENLEKISSISLIEEMKKSYLDYAMSVIVSRALPDARDGLKPVHRRILYAMNESGYNYNKSYKKSARIVGEVMGKYHPHGDSAIYDSMVRMCQSFSMRLELVDGQGNFGSLDGDPPAAMRYTEARLAKISERMVNDLEKQTISFQENYDDTTIEPSVLPAQFPNLLVNGASGIAVGMATNIAPHNLREVIDATLYT

SEQ ID NO: 183485 - protein, 241 aa, Unknown
  Bacterial polypetide isolated from the Sargasso Sea
VKFLKGRKQNISEIFHCEGEQDGLSVEIALQWNDAYSENVLCYTNNIPQKDGGTHLSGFRSSLTRVMKTFIRKEELNKKSPVELLGEDVREGLTAIVSVKIPDPKFSSQTKEKLVSSEVESVVSNVFNKNFNEYLLENPKEAMSILTKISEAALAREAARKAREMTRRKGVLEVAGLPGKLADCQEKDPALSEIYIVEGDSAGGSAKQGRNRQNQAILPLKGKILNVEKARLDKVLSSQEI

SEQ ID NO: 183486 - protein, 197 aa, Unknown
  Bacterial polypetide isolated from the Sargasso Sea
MTSNQKNTSSQEYKADSIKVLKGLEAVRKRPGMYIGDTDDGSGLHHMVFEVVDNSIDEAIVGFCKNISVTVHKNNSITVVDDGRGIPVDLHKGEKKSAAEVIMTQLHAGGKFDQNSYKVSGGLHGVGVSVVNALSEKLDLTIFRDGKEYFISFKNGKSLNSIKFVKKTKQSGTKINFLPSKEIFSNIKFSLNTLQKK

SEQ ID NO: 183487 - protein, 133 aa, Unknown
  Bacterial polypetide isolated from the Sargasso Sea
MPKQNNYDSSNIKVLKGLEAVQKRPGMYIGDTDDGSGLHQMVYEVMDNSIDEALAGHCSNITVTVHEDNAVTVEDNGRGIPVDEHPTEKKSAAEVIMTVLHAGGKFDDNSYKVSGGLHGVGVSVVNACQKHRA

SEQ ID NO: 183488 - protein, 145 aa, Unknown
  Bacterial polypetide isolated from the Sargasso Sea
MPEYPQIKLDDEMRHSYIEYAMSVIVGRALPDVRDGLKPVHRRVLYSMHELNNGYNKAYKKSARIVGDVIGKYHPHGDTAVYDTIVRLAQPFSMRYPLVDGQGNFGSIDGDSPAAMRYTEVRMSRLSHELLSDIDKNTVDFNPNY

SEQ ID NO: 183489 - protein, 255 aa, Unknown
  Bacterial polypetide isolated from the Sargasso Sea
MDKKNFTSISLQEEMQRSYLEYAMSVIVGRALPDARDGLKPVQRRILFAMYELGLTPDRPFRKCARVVGDVLGKYHPHGDQAVYDALVRLVQNFSTKYPTLDGHGNFGSVDNDPPAAMRYTETRLAPIAHKGFLEEIGSETVNFSNNFDGSQKEPDVLPAQLPFLLLNGSSGIAVGMATNIPPHNLGEIVDGLIALVKNKDISNKKLSNIIKGPDFPTGGELIQSKAIEELYETGKGSINIRGVIKTEEINIRKR

SEQ ID NO: 183490 - protein, 123 aa, Unknown
  Bacterial polypetide isolated from the Sargasso Sea
MDKSQTEIKNNIKPIEMYDEMSSSYLSYAMSVIVSRALPDIRDGLKPVHRRIIYAMHKGGFDWSKQYRKSARIVGDVIGKYHPHGDQAVYDALVRMVQDFSMSLPLIDGQGNFGSVDGDPPAA

SEQ ID NO: 183491 - protein, 288 aa, Unknown
  Bacterial polypetide isolated from the Sargasso Sea
VDNSVDEALAGHCDHIEIVLKADGSALISDNGRGIPTDIHPRTGKSALETVLTVLHAGGKFGSGGYKVSGGLHGVGISVVNALSEWVEVTVFRDGSEFNQRFEKGVSKGELQTSKQSGKPFKKGTTICFKPDKTIFSGGIEFEYSLLSSRLRELAYLNGGVKIVFRDERKKLSDDSFKEEIYLYQGGIKEYVQYMNAEKESIHPEIIYVDSQKENVYVEAALQWCSDVYSDNILGFANNIRTIDGGTHIEGLKTVLTRTFNNLAKKRGKRKDVEKNLAGENIREGLTV

SEQ ID NO: 183492 - protein, 114 aa, Unknown
  Bacterial polypetide isolated from the Sargasso Sea
MTKNNKYQADSIKVLKGLEAVRKRPGMYIGDTDDGTGLHHMVYEVVDNSIDEALAGYCSNIFVKINNDGTITVKDDGRGIPVDVHKTEKKSAAEVIMTQLHAGGKFDHDSYKVS

SEQ ID NO: 183493 - protein, 295 aa, Unknown
  Bacterial polypetide isolated from the Sargasso Sea
GYSEEVLPFTNNIPQKDGGTHLLGFRSALTRVINKYSNDRNNKKNKISLSGEDIKEGLTAVLSIKMPDPKFSSQTKDKLVSSEIRNIVEHIIGEKVSTWFDQNPSAAKTVIEKITQAAMARDLARKARDSVRRKGTFELSGLPGKLADCQIQKREGTELFIVEGDSAGGSAKQGRVREFQAVLPLRGKILNTFVNGKKNGEDQSTKALSKMMSSSEIVTLINALGTGSKDFNIENLRYDKIVIMTDADVDGSHIRTLLLTFFNNHPFNQLIENGHVYLAQPPLFKVTKANKSIYI

SEQ ID NO: 183494 - protein, 283 aa, Unknown
  Bacterial polypetide isolated from the Sargasso Sea
NLVSSEVRNIVENFMNEKLSIWFDQNPNIIKIVLLKIIQAAQARDVARKARESVRRKGALELTGLPGKLADCQNSKRDGTELFIVEGDSAGGSAKQGRNREFQAVLPLRGKILNTYVEEVNSKRNGNSNDSKTKALSKMISSNEIVTLINALGLDPKAEEIDLDDLRYGKIIIMTDADVDGSHIRALLLTFFNNKPFNKLIENGNIFLAQPPLFKINKSGKSIYIKDEKSLEHFILNNSKNSKKLKKGSKEFEKMLSEEKSKLNIQRFKGLGEMNPDELWNTT

SEQ ID NO: 183495 - protein, 283 aa, Unknown
  Bacterial polypetide isolated from the Sargasso Sea
QLSLVSCRKARELTRRKTALDVNYLAGKLKDCAEKDPSKTEVFLVEGDSAGGSAQTGRDRRTQAILPLRGKILNVERARFDRMLNSQEIGNLVMALGTGIGRDEFDISKLRYHKIVIMTDADVDGAHIRTLLLTFFYRQMPELVEGGYLYIAQPPLYKVSRGKSEVYLKDQSALDDYLVQQGIEGAVLKVGSNADIAGQDLARIVDEARQLDRVLEAFPTQYPRHILEQAAIAGAFVPGAVDEDLQGTADSIAKRLNLIALEYEAGLVRKDYTGPRYSLSKSG

SEQ ID NO: 183496 - protein, 318 aa, Unknown
  Bacterial polypetide isolated from the Sargasso Sea
MHKGRGFDWSKQFRKSARIVGDVIGKYHPHGDQAVYDALVRMVQDFSMSLPLIDGQGNFGSIDGDPPAAMRYTETRLAKIAQFLLDDIEKDTVSFKSNYDETEQEPDVLPAQYPNLLVNGAGGIAVGMATSIPPHNLGEVVDATLAIIKNKDIKLSELMKHVPGPDFPTGGIIIGKDIIKQGYKSGRGSFKIRGDIKIEQAKGGRERLVITSIPYQVNKSVLNERIAELVREKKIEGIRDIRDESNREGIRVAIDLRSSVEPETIKRQLYKYTSIESSFGFNTLAIVDNKPKTCNLKDFLENFLKFREDVVIKKTKYD

SEQ ID NO: 183497 - protein, 102 aa, Unknown
  Bacterial polypetide isolated from the Sargasso Sea
MSEYSQIKLDDEMRHSYIEYAMSVIVGRALPDVRDGLKPVHRRVLYSMHELNNGYNKAYKKSARIVGDVIGKYHPHGDTAVYDTIVRLAQPFSMRYPLVDGQ

SEQ ID NO: 183498 - protein, 254 aa, Unknown
  Bacterial polypetide isolated from the Sargasso Sea
IKDRGTTSIHELPFVLSKKHATTAARIELVLHWTEATDEHLRSYVNGIPTGSGGTHENGTRSGIGKAIRNFVDTHNLSPKGVTITAEDIREGLTGVLSVFVQDPQFQGQTKDRLNNPEIASILDSTIRPALEQWLNHNISVAEGIVARIVLAARAREASRVAQQAVSRKSATSTRLNLPGKLSDCTGKNPNESEIFIVEGDSAGGSAKQGRDRHRQAILPLRGKVLNVESAPASKVLANKELSDVVTALGCGVG

SEQ ID NO: 183499 - protein, 219 aa, Unknown
  Bacterial polypetide isolated from the Sargasso Sea
GVSVVNALSEELKLTIRREGKVYEQYYQHGVPKAPLSVVGETTSTGTECFFKPSDETFSNVEFHYDILAKKLRELAFLNAGVSIKLIDERSGKEELYKYDGGLKAFVNYLNKNKNTVNKLFHFVSSREEDGITVEVALQWNDSYQEAIYPYTNNIPQRDGGTHLAGFRGALTRVLKSYIDKELANKKGKEVNTTGDDAREGLTAIISVKVPDPKFSSQT

SEQ ID NO: 183500 - protein, 65 aa, Unknown
  Bacterial polypetide isolated from the Sargasso Sea
MTKNSYSSESIKVLKGLEAVRKRPGMYIGDTDDGSGLHQMIYEVVDNSIDEALAGYCDKIEVHLN

SEQ ID NO: 183501 - protein, 223 aa, Unknown
  Bacterial polypetide isolated from the Sargasso Sea
MPAKKKAAKSKTPKTPKKESKQASKKAASKPIKKQAKKKQEDSYDSSSITVLKGLEAVKKRPGMYIGDTDDGTGLHHMVYEVVDNSIDEALAGHCDEITVKILSDDSVTVIDNGRGIPTDKHEEGVSAAEVIMTKLHAGGKFDDNSYKVSGGLHGVGVSVVNALSEDLKLTIHRGGKIHEQAYSDGKPKNKIKVVGKTDKTGTEVTFTPSPTTFSNILFDYEV

SEQ ID NO: 183502 - protein, 182 aa, Unknown
  Bacterial polypetide isolated from the Sargasso Sea
MKSIDNSTESIKQNIKPIAVYDEMSSSYLSYAMSVIVSRALPDIRDGLKPVHRRILYAMYKGGYDWSKQFRKSARIVGDVIGKYHPHGDQSVYDALVRMVQDFSMSLPLVEGQGNFGSVDGDPPAAMRYTETKLAKVSQFIIDDLDKKTIDFKSNYDETEKEPSVLPAQYPNLLVNGAGGIA

SEQ ID NO: 183503 - protein, 256 aa, Unknown
  Bacterial polypetide isolated from the Sargasso Sea
LTAVLSIKMPDPKFSSQTKDKLVSSEIRLIVESIISDKVSTWFDQNPSIAKTVLEKITQAAMARDVARKARDSVRRKGAFELSGLPGKLADCQIQKKEGTELFIVEGDSAGGSAKQGRVREYQAVLPLRGKILNTYVNGKSNGDDHATKALSKMMSSNEIVTLINALGTGSKDFNIENLRYDKIVIMTDADVDGSHIRTLLLTFFNNYPFNQLIENGHIYLAQPPLFKVTKSNKSVYIKDEKTLEEYILKTSDKKD

SEQ ID NO: 183504 - protein, 279 aa, Unknown
  Bacterial polypetide isolated from the Sargasso Sea
IRFLPSREIFSNTKFNFNIIQKRMRELAFLNKGIKIVINDLSQKKTKEIIFKFDGGLLEFVDFLDAKREKLKNKSGNDLFRKPIFIEGKKDTVEIECALKWNAGYGEDVYPFTNNIFQKDGGTHILGFRSALTRIINKYATENNLLKKNKLTISGDDIKEGLTCVLSVKIPDPKFSSQTKDKLVSSEVRPIVETVINEKLSIWFDQNPSISKIIISKVIQAALARDVARKARENVRRKGALELTGLPGKLADCQISKQEGTELFIVEGDSAGGSAKQGR

SEQ ID NO: 183505 - protein, 281 aa, Unknown
  Bacterial polypetide isolated from the Sargasso Sea
MSEDQRSNTVSNDYGAEQIQVLEGLEPVRKRPGMYIGSTGPRGLHHLVYEVVDNSVDEALAGHCDHIEIVLRADGSALISDNGRGIPTDIHPRTGKSALETVLTVLHAGGKFGSGGYKVSGGLHGVGISVVNALSEWVNVTVYRDGSEFNQRFEKGISKGELETKKQTGKPFKKGTTICFKPDKTIFSGGIEFEYALLSSRLRELAYLNGGVKIVFRDERNQLSDGSFKEEIYLYQGGIKEYVEYMNAEKDCIHPEIIYVDSQKKNVYVEAALQWCSDVYS

SEQ ID NO: 183506 - protein, 302 aa, Unknown
  Bacterial polypetide isolated from the Sargasso Sea
RNIVEHIISEKVSTWFDQNPSIAKTVLEKITQAAMARDVARKARDSVRRKGTFELSGLPGKLADCQIQKREGTELFIVEGDSAGGSAKQGRVREYQAVLPLRGKILNTYVNGKSNGEDQSTKALSKMMSSNEIVTLINALGTGSKDFNIENLRYDKIVIMTDADVDGSHIRTLLLTFFNNYPFNQLIENGHVYLAQPPLFKVTKANKSVYIKDEIELENYILDVGKFDKKIKKGSAEYKKIMQEQREKLSIQRFKGLGEMNPEELWETTLNPENRTILKVQYSKGTKDKSKEDQKMIKVLMG

SEQ ID NO: 183507 - protein, 271 aa, Unknown
  Bacterial polypetide isolated from the Sargasso Sea
PSKEIFSSIKFSSSILDKRIRELAFLNKGISITLIDNSGKKSKEFAHKYDGGIIEFVRHINNKKPKLVNKNEKEVFKKPVFVTSTKNNVIVECSFEWNAGYSEEVLPFTNNIPQKDGGTHLLGFRSALTRVINKYSNDRNNKKNKVSLSGEDIKEGLTAVLSIKMPDPKFSSQTKDKLVSSEIRNIVEHIIGEKVSTWFDQNPSAAKTVIEKITQAAMARDLARKARDSVRRKGTFELSGLPGKLADCPIQKREGTELFIVEGDSAGGSAK

SEQ ID NO: 183508 - protein, 272 aa, Unknown
  Bacterial polypetide isolated from the Sargasso Sea
GKLADCQIGKQEGTELFIVEGDSAGGSAKQGRNRANQAVLPLRGKILNTYVEDFNIKKNGNGNGNGSDQRTKALSKMISSNEIVTLINALGLDPKAQEIDLKDLRYGKIIIMTDADVDGSHIRALLLTFFNNKPFNKLIENGHVYLAQPPLFKINKGSKGIYIKDEKELEDYIINNSKELKKIKKGSKDYSKKIDEEKSKMNIQRFKGLGEMNPEELWSTTLDPETRNLLQVQYSKDLKKDQSLIHTLMGNDVALRKDFIVSNAINVRNLDI

SEQ ID NO: 183509 - protein, 167 aa, Unknown
  Bacterial polypetide isolated from the Sargasso Sea
MGKKSTYNAKDIEVLEGLEPVRKRPGMYIGSTNQDGLHHLVNEVLDNSIDEVLAGHATDINFHYKKDGSIKIKDNGRGIPVDFHPKYKNKRALEVVLTTLHAGGKFNSDAYKTSGGLHGVGISVVNALSSLLQVQVFKDGKVYQQDYSKGKIKTKIKIDKCSKKLKG

SEQ ID NO: 183510 - protein, 190 aa, Unknown
  Bacterial polypetide isolated from the Sargasso Sea
MNSNYSSDSIKVLKGLEAVRKRPGMYIGDTDDGSGLHQMIYEVLDNSIDEALAGYCDKIEVILNADGTATVTDNGRGIPVDLHKTEKIPAAQLIMTELHAGGKFDQNSYKVSGGLHGVGVSVVNALSENLILEINRDGKIYNIEFENGIVSKELNIIGNSNKNDDNYFTGTKITFLPTTNIFKDINFNFK

SEQ ID NO: 183511 - protein, 305 aa, Unknown
  Bacterial polypetide isolated from the Sargasso Sea
KQSEKDPGMYIGDTDDGTGLHHMVYEVVDNSIDEALAGHCKNINVKINSDGTITVNDDGRGIPVDMHKGEKKSAAEVIMTQLHAGGKFDHDSYKVSGGLHGVGISVVNALSEKLELEINRDGKKYFIEFNNGEAKSPLKVVGKSKNTGTQITFLPSKDIFSSIKFSANILIKRMRELAFLNKGIKIIFTDASQKKEKISEFKFEGGVLEFVDFLDEKREKLQNKNGNDLFRKPIYIEGKKDNIEIECSLKWNAGYAEDIFPYTNNIYQKDGGTHLLGFRSALTRVVNKYANENNLLKKNKLAISG

SEQ ID NO: 183512 - protein, 299 aa, Unknown
  Bacterial polypetide isolated from the Sargasso Sea
RSALTRVVNKYASEQNLLKKSKVLLSGDDVKEGLTCVLSVKIPDPKFSSQTKDKLVSSEVRNIVEGIVNEKLSIWFDQNPSVSKIILTKIIQAAVARDVAKRARENVRRKGALELTGLPGKLADCQNSKQEGTELFIVEGDSAGGSAKQGRNREYQAVLPLRGKILNTFTEINGSKNNGNQSDLRTKSLSKMISSNEIVTLINALGLDPKTEEIDLEDLRYGKIIIMTDADVDGSHIRALLLTFFNNIPFNKLIEKGHVYLAQPPLFKINKGSKGIYIKDEKDLENYIIKNSKDIKNVK

SEQ ID NO: 183513 - protein, 254 aa, Unknown
  Bacterial polypetide isolated from the Sargasso Sea
ITVEDDGRGIPVDMHKGEKKSAAEVIMTQLHAGGKFDQNSYKVSGGLHGVGVSVVNALSQKLDLTIYRGGKEHFISFENGKAKNSLKILKKTTKSGTKINFFPSKEIFSSTKFSSTILQKKMRELAFLNKGLKISLIDETSSKNKYYENKYDGGIQEFVSFIDQKKSALINKNEKSVFKKPLYIKGEKKEVIVECSLQWNSGFSEDVLAFTNNIHQKDGGTHLLGFRSALTRIVNKYASEKNLNKRNKVTIGGE

SEQ ID NO: 183514 - protein, 266 aa, Unknown
  Bacterial polypetide isolated from the Sargasso Sea
MSSSYLSYAMSVIISRALPDIRDGLKPVHRRIIYAMYKGGFDWAKQFRKSARIVGDVIGKYHPHGDQAVYDALVRMIQDFSMSLPLIEGQGNFGSIDGDPPAAMRYTETRLSKVSQHLVDDINKNTVDFKSNYDETEKEPEILPAQYPNLLVNGAGGIAVGMATSIPPHNLGEIIDGTLALINNRDIKIPELMKLIPGPDFPTGGLIIGKDIIKQGYKTGRGSFKIRGEISTEQLKNSKERLVISSVPYQVNKSILNERIAELVRE

SEQ ID NO: 183515 - protein, 179 aa, Unknown
  Bacterial polypetide isolated from the Sargasso Sea
MIKKNEQNNPKYSASSIKVLKGLEAVRKRPGMYIGDTDDGTGLHHMVYEVVDNSIDEALAGYCKNIKVTLNFDQSVSVEDDGRGIPIDLHKGEKKSAAEVIMTQLHAGGKFDHDSYKVSGGLHGVGVSVVNALSEKLTLRIFRDKKEYFVEFKDGKALSPLKAKNKTNKTGTLIKFLPS

SEQ ID NO: 183516 - protein, 312 aa, Unknown
  Bacterial polypetide isolated from the Sargasso Sea
RGGQEYNMSFSNGDRTSELEIVDSVGKANTGTAIRFWPNESYFDSADIRLDEIKHNLRAKAVLCPGLKIKFKDEATGEKCQWEYQEGASEYLVEMLENIECIPSIPFSGKANSDEQELEWSMTWPDRDHEGIQESYVNLIPTKHGGTHVSGFRSGLSESVKEFADYRNLLPRGVKLSPEDVWMGLSYIISVRIEDPQFSGQTKEKLSSRAVSGFVTGLIKDAFTLWLNQHPEAGDQIVARAIENAQKRAKKNVKVKRKKATGGPTLPGKLADCTSDEPDLCELFIVEGDSAGGSAKQARDRVFQAILPLRGK

SEQ ID NO: 183517 - protein, 135 aa, Unknown
  Bacterial polypetide isolated from the Sargasso Sea
MSSSYLSYAMSVIVSRALPDVRDGLKPVHRRILYAMYKGGYDWSKQFRKSARIVGDVIGKYHPHGDQSVYDALVRMVQDFSMSLPLIQGQGNFGSIDGDPAAAMRYTETRLSKVSQYLIDDIEKNTISFKSPITM

SEQ ID NO: 183518 - protein, 242 aa, Unknown
  Bacterial polypetide isolated from the Sargasso Sea
MKNIIKDNIDEILKSRYLSYAVSTIISRSLPDLRDGLKPVHRRIIYSMYLLKLYNNSPFKKSARIVGDVMGKFHPHGDQAIYQSLVRMAQDFSSRVTLIEGQGNFGNIDGDNAAAMRYTEARLEEITELFFDGIEEDSTTFNDNYDGQNLEPNVLPSKLPNILLNGSTGIAVGMATNIPPHNLIELNDCIIKLIKKPNTPDSELLKILKGPDLPTGGEIILSNAEKKKIYKTGFGSFLINSK

SEQ ID NO: 183519 - protein, 294 aa, Unknown
  Bacterial polypetide isolated from the Sargasso Sea
GVDPIQNEMRYDGGLIEFVDYLDRSKQAIHEQKIYAKGSKSGITVELAMQWNESYHESTLCFTNNIPQRDGGTHLAGFRGALTRTINSFAGQLAGIKKDKVNVTGDDAREGMTCVLSVKVPDPKFSSQTKDKLVSSEVRPVVESLVGEGLDKWFEEHPNEAKRVISKVIEAAAAREAARKARELTRRKGALDISSLPGKLADCQERDPVLSEIFIVEGDSAGGSAKQGRNRVNQAVLPLRGKILNVEKARLDKMLSSTEIGTLITALGTGIGREDFDIEKCRYHKIIIMTDADV

SEQ ID NO: 183520 - protein, 152 aa, Unknown
  Bacterial polypetide isolated from the Sargasso Sea
MEKIESNLEKKNYKPVLVYDEMSSSYLSYAMSVIVSRALPDVRDGLKPVHRRIIFAMYKGGFDWTKQFRKSARVVGDVIGKYHPHGDQAVYDALVRLTQNFSMSLPLIDGQGNFGSIDGDPPAAMRYTETKLSKVSQYLIDDIEKNTVEFRK

SEQ ID NO: 183521 - protein, 137 aa, Unknown
  Bacterial polypetide isolated from the Sargasso Sea
MKNNNSYKADSIKVLKGLEAVRKRPGMYIGDTDDGTGLHHMVYEVVDNSIDEALAGHCNNIEISINSDGSITVKDNGRGIPVDLHKGEKKSAAEVIMTQLHAGGKFDHDSYKVSGGLHGVGVSVVNALSEKLKLEIN

SEQ ID NO: 183522 - protein, 270 aa, Unknown
  Bacterial polypetide isolated from the Sargasso Sea
DQELPDIKGVSIEGEMKRSYLDYAMSVIVSRALPDVRDGLKPVHRRILFAMKEGGYDWTRPYRKSARIVGDVMGQFHPHGDSPIYDSMVRMAQDFSMRLPFIDGQGNFGSMDGDPPAAHRYTEARLAKSAEGLLRDIDKETVDFVANYDETSEEPSVLPAEFPNLLVNGAGGIAVGMATNIPPHNLGEVIDGCLAFLENRNLTIEDLINVIPGPDFPTGGIILGKMGIRDAYMTGRGSITMRAKAEIQEIRKDRLAIIVSEIPYQVNKAR

SEQ ID NO: 183523 - protein, 188 aa, Unknown
  Bacterial polypetide isolated from the Sargasso Sea
MSDNKSYSAESIKVLEGLEAVRKRPAMYIGDVGKRGLHHLVYEVVDNSIDEALAGFCNKVIVVFNKDGSVSVEDNGRGIPVDIHKEEKKPAIEVVMTVLHAGGKFDKGSYKVSGGLHGVGVSVVNALSEWMWVEVKRDGKIHKQDYKIGEPQSTLKTTGTAKTTGTKVCFYPDNKIFKTISFEYDIIA

SEQ ID NO: 183524 - protein, 292 aa, Unknown
  Bacterial polypetide isolated from the Sargasso Sea
AQKLVESSVRDHFDNWLASDSKSATAILDFLILRAEERLRRRQEKETARKSATKRLRLPGKLVDCSESTRAGTEIFIVEGDSAGGSAKMARDRKTQALLPLRGKILNVLGAASSKLGTNQEINDLTQALGTSLGSKFNIDDLRYDKVIIMTDADVDGAHIASLLMTFFFTQMRPLIDQGHLYLACPPLFRLTQGSHRVYCKDQIERDKWLSEGLGGKGKIEVSRFKGLGEMDAKDLKQTTMDPKSRKLIRVSIDEEQPGETVDLVDRLMGKKPELRYQYIQSNARFVNELDV

SEQ ID NO: 183525 - protein, 252 aa, Unknown
  Bacterial polypetide isolated from the Sargasso Sea
MPKPKKNTNTKNYDSSNIKVLKGLDAVRKRPGMYIGDTDDGTGLHHMVFEVVDNSVDEALAGFCTHIEVIIHEDDSITVKDNGRGIPVDKHKTEKTSAAEVIMTVLHAGGKFDDDSYKVSGGLHGVGVSVVNALSESLNLRIHKNGHTYEQDYVHGVPQKPLKKGSKTDRSGTTVTFKPSAKTFTNTTYSFDILSKRLRELSFLNSGLSIKLTDTRSGKEEEFYFEGGISAFVSHLNKVQSPVHESVINFSK

SEQ ID NO: 183526 - protein, 307 aa, Unknown
  Bacterial polypetide isolated from the Sargasso Sea
VTQAILPLRGKILNVIKANPHKILENNEISALITAIGAGYGNPPKDKEYNPSDFFNPDSMRYHKIVIMTDADVDGSHIRTLLLTFFYQFMRDIITTGRLYIAQPPLYKVKKGNAENYLLDDRELTKFLLLNNKDDLDFNIYNKKKIIQLKEEQLNELIDLASRANSAYQNLDLTYLDAQFFDQILNTGLFFQDFHPNKIEKSQFKIFLSNLNQVYKSENIKFTFQSMVSNELIFLQEKEGYNKIIKVALDKLLHLREFISLDSLSLYNKMGFAKSTDTYFGISKLSSKENFNCNGLVEFFTTLFEMS

SEQ ID NO: 183527 - protein, 290 aa, Unknown
  Bacterial polypetide isolated from the Sargasso Sea
IFEVVDNSIDEALAGYCDQISITLNADGSVSVEDNGRGIPTDIHPEEKISAAEVIMTQLHAGGKFDQDSYKVSGGLHGVGVSVVNALSSKLSLNIFRQGCEHYIEFNHGEAINPLSQIDKNIERNGTKITFFPDEEIFSNIEFDSKVLKQRFREMAFLNSEITIVFSDNRSADKKETSFHFEGGISEFVKYLDKSKKSLIEKPIFIEGKKNKIEFSCALWWNDSYYEQILTFTNNIRQKDGGTHLSGFRSALTRVVNGYFEGSKNSKKQSVHPKNDDIREGLTSIISVKV

SEQ ID NO: 183528 - protein, 230 aa, Unknown
  Bacterial polypetide isolated from the Sargasso Sea
GTEIFIVEGDSAGGSAKQGRNRETQAILPLKGKILNVASASSDKIQLNQEINDLKEALGCGTGAKYRDEDLRYEKVIIMTDADVDGAHIASLLMTFFFKEMPQLIENGHLFIALPPLYRLSQGGNTLYAMDDVHKDHLIEKEFSGKGKIEVSRFKGLGEMPPAQLKETAMAAETRTLLRVTVPLRHTDDEKREARETSRLVEDLMGKKPELRLAYIQNHASKIEDRMLDV

SEQ ID NO: 183529 - protein, 267 aa, Unknown
  Bacterial polypetide isolated from the Sargasso Sea
ADCQIGKQEGTELFIVEGDSAGGSAKQGRNRSNQAVLPLRGKILNTYVEDLTVKKNGNGNGSDKRTKALSKMISSNEIVTLINALGLDPKAEEIDLKDLRYGKIIIMTDADVDGSHIRALLLTFFNNEPFNKLIENGHIYLAQPPLFKINKGTKGIYIKDQKELEDYILNNNKEIKKIKKGTKEFTKALDLEKSKMNIQRFKGLGEMNPEELWSTTLDPETRNLLQVQYSKDLKKDQSLIHTLMGNDVALRKDFIVSNAINVQNLDI

SEQ ID NO: 183530 - protein, 75 aa, Unknown
  Bacterial polypetide isolated from the Sargasso Sea
MIKNNISGYKADSIKVLKGLEAVRKRPGMYIGDTDDGTGLHHMVYEVVDNSIDEALAGHCKNIIVDINDNDSITV

SEQ ID NO: 183531 - protein, 277 aa, Unknown
  Bacterial polypetide isolated from the Sargasso Sea
SSKKTKEYAHKYDGGIIEFVKHINNKKPILINKNEKEVFKKPIYVTATKNNVIVECSFEWNAGYSEEVLPFTNNIPQKDGGTHLLGFRSALTRVINKYSNDRNINKKNKINLSGEDIKEGLTAVLSIKMPDPKFSSQTKDKLVSSEIRNIVENIIGEKVSTWFDQNPSVSKVVLEKITQAAMARDVARKARDSVRRKGTFELSGLPGKLADCQIQKREGTELFIVEGDSAGGSAKQGRVREYQAVLPLRGKILNTFVNGKKNGEDQSTKTLSKHDVL

SEQ ID NO: 183532 - protein, 286 aa, Unknown
  Bacterial polypetide isolated from the Sargasso Sea
KEFCEYRSLLPKGLKLNADDVISNAIFVISSKMQNPQFAGQTKERLDSKDHTTFVSSASKDILSIWLNKHTEEGEKIAELAIMSAQTRIKASSVVERKKTFKGPALPGKLSDCNSEDLNETELFLVEGDSAGGSAKQARERSFQAIMPLRGKILNTWDLESQEIIKSQEIKNLSTAIGVLPGSSDITSLRYGKICILADADSDGLHIATLLCALFLRHFKSLVNEGRIFIAMPPLFRIDCGKEVLYALDEKHKDNVVKEFKAKKGKPKINIQRFKGLGEMNPSQLR

SEQ ID NO: 183533 - protein, 291 aa, Unknown
  Bacterial polypetide isolated from the Sargasso Sea
ALVRMAQDFSMRMPLIDGHGNFGSVDNDPPAAMRYTESRLQSLTDESLLEDIESETVDFSDNFDGSQQEPTVLPARIPQLLLNGSSGIAVGMATNIPPHNLGELINGLKSIIETPSIEDRELFELIKGPDFPTGGQILGREGIRETFKTGRGSITMRGVANIEQIKSAGRAEKDAVIITELPFQTNKAALIERIADLVNEKKLEGISDIRDESDRDGMRIVIELKRDAYPQVVLNNLFKLTPLQNNFSANILALVKGEPTTLSLRKMLDVFLDFRVETIRRRTGFLLKKAE

SEQ ID NO: 183534 - protein, 235 aa, Unknown
  Bacterial polypetide isolated from the Sargasso Sea
MSSSYLSYAMSVIVSRALPDVRDGLKPVHRRILYAMYKGGYDWTKQFRKSARIVGDVIGKYHPHGDQSVYDALVRMVQDFSMSLPLVDGQGNFGSIDGDPAAAMRYTETRLSKVSQFLIDDIEKNTIEFKSNYDETEKEPSVLPAQFPNLLVNGAGGIAVGMATSIPPHNLGEIINGTLALIENKDIKIKDLMKHIPGPDFPTGGVIIGKDIIKQGYNKGRGSFKIRGEISNETL

SEQ ID NO: 183535 - protein, 285 aa, Unknown
  Bacterial polypetide isolated from the Sargasso Sea
VRDGLKPVHRRILYAMYKGGFDWSKQFRKSARVVGDVIGKYHPHGDQAVYDALVRMVQEFSMSLPLVDGQGNFGSVDGDPAAAMRYTETKLSKISQHLIDDIEKETVKFKSNYDETEKEPVVLPSQFPNMLVNGAGGIAVGMATSIPPHNLSEVINGTLAMIENRKSNKNTTLNELMKHIKGPDFPTKGIVIGKQSIKEGYDKGKSTTSFKIRGNIDIEQMKGGRERLVITSIPYQINKAILTERIAQLVREKKIEGIKDIRDESNSEGIRLALDLKNGIEPETI

SEQ ID NO: 183536 - protein, 200 aa, Unknown
  Bacterial polypetide isolated from the Sargasso Sea
MSEYSQIKLDDEMRHSYIEYAMSVIVGRALPDVRDGLKPVHRRVLYSMHELNNGYNKAYKKSARIVGDVIGKYHPHGDTAVYDTIVRLAQPFSMRYPLVDGQGNFGSIDGDSPAAMRYTEVRMSRLSHELLSDIDKNTVDFNPNYDGSENEPTVLPTRIPNLLINGASGIAVGMATNIPPHNLNEVVDGVIAIIKDPSLA

SEQ ID NO: 183537 - protein, 296 aa, Unknown
  Bacterial polypetide isolated from the Sargasso Sea
MSSSYLSYAMSVIVSRALPDVRDGLKPVHRRILYAMYKGGYDWSKQFRKSARIVGDVIGKYHPHGDQSVYDALVRMVQDFSMSLPLIQGQGNFGSIDGDPAAAMRYTETRLSKVSQYLIDDIEKNTISFKSNYDETEKEPSVLPSQFPNLLVNGAGGIAVGMATSIPPHNLGEIIDGTLALIDNKDIKIKELMKHIPGPDFPTGGVIIGKDIIKQGYNNGRGSFKIRGEISIEQQKNGRERLVITSIPYQVNKSVLNERIAPLVREKKIEGIRDIRDESNRESIRGSIDLRNGVEP

SEQ ID NO: 183538 - protein, 172 aa, Unknown
  Bacterial polypetide isolated from the Sargasso Sea
YEKIIIMTDADVDGSHIRTLLLTFFNNYPFNELIEKNHIYLAQPPLYKITKGSKNYYIKDDKELETFLIESSEKRKNSLKKNTKEFSKFIENEKSKINIQRFKGLGEMNPDELWKTTLNPEERTLLRVKYTNNTKDKSKKDQDLIQILMGDEVGPRKDFIINRALEVSNLDI

SEQ ID NO: 183539 - protein, 145 aa, Unknown
  Bacterial polypetide isolated from the Sargasso Sea
MSEFAKQVSPVALESEMRESYLAYAMSVIVGRALPDVRDGLKPVHRRVLYAMNVLSNDYNKPYKKSARVVGDVIGKYHPHGDTAAYDTIVRMAQDFSLRYPLVDGQGNFGSIDGDAAAAMRYTEIRMAKISHDLLSDLDKETVDF

SEQ ID NO: 183540 - protein, 191 aa, Unknown
  Bacterial polypetide isolated from the Sargasso Sea
MSSSYLSYAMSVIVSRALPDIRDGLKPVHRRILYAMYKGGYDWSKQFRKSARIVGDVIGKYHPHGDQSVYDALVRMVQDFSMSLPLVDGQGNFGSIDGDPAAAMRYTETRLSKVSQFLIDDIEKNTISFKNNYDETEREPTVLPAQFPNLLVNGAGGIAVGMATSIPPHNLGEVIDGTLALIENKDIKIKD

SEQ ID NO: 183541 - protein, 296 aa, Unknown
  Bacterial polypetide isolated from the Sargasso Sea
MHAGGKFDHDSYKVSGGLHGVGVSVVNALSEKLELTINRDGKKYFIEFENGDAKAALKLVGKSKNTGTEIKFLPSKKIFSSTKFNFSIIQKRMRELAFLNKGIKISLSDFTQKKQKSLEFRFDGGIIQFVEFLDENRQSLKNKNDNDLFRKPIYIEGLKNQINLECSLKWNAGYNEDVYPYTNNIFQKDGGTHLLGFRTALTRVINKYASEQNLLKKNKVSLSGDDVKEGLTCVLSVKIPDPKFSSQTKDKLVSSEVRNIVENIISEKLSIWFDQNPSISKIILTKIIQAAVARDV

SEQ ID NO: 183542 - protein, 269 aa, Unknown
  Bacterial polypetide isolated from the Sargasso Sea
MRYHKIIIMTDADVDGSHIRTLLLTFFYRHMKPIIDSGRLYIAQPPLYRLKKGNSTVYKKDDNDLEDYLIEEGLKNTFFENTLHSQIAGEELKQIIYLSKKTKDLLMPLLRRVDNSNIIEHAAIVRALDLRNLKDKKIGEEIAKYLQQRLNLISNISQKNWKVIHRNNSIFFERTIRGFTEKYTIDENFLVSPEARALNELKDQLMENFYRLKETGCGILNHKNQEYKIFGPLNLIDQILEIGKSGLQINRYKGLGEMNPDQLWETTLD

SEQ ID NO: 183543 - protein, 164 aa, Unknown
  Bacterial polypetide isolated from the Sargasso Sea
MSSSYLSYAMSVIVSRALPDVRDGLKPVHRRIIFAMYKGGFDWSKQFRKSARVVGDVIGKYHPHGDQAVYDALVRLTQNFSMSLPLIDGQGNFGSIDGDPPAAMRYTETKLAKISQFLIDDIEKNVIDFRNNYDDTEREPTVLPSQYPNLLVNGAGGIAVGMAT

SEQ ID NO: 183544 - protein, 321 aa, Unknown
  Bacterial polypetide isolated from the Sargasso Sea
DKTIFSGGIEFEYALLSSRLRELAYLNGGVKIVFRDERNQLSDGSFKEEIYLYQGGIKEYVEYMNAEKDSIHPEIIYVDSQKENVYVEAALQWCSDVYSDNILGFANNIRTIDGGTHIEGLKTVLTRTFNNLAKKRGKRKDIEKNLAGENIREGLTVVLSVKVPDPEFEGQTKTKLGNTEVRGIVDSLIGEALTKYMEFNPGIFDLILEKAIQSFNAAEAARRARELVRRKSVLESSTLPGKLADCSSRDPSESEIYIVEGDSAGGSAKQGRDRNFQAILPLRGKILNIEKTDDTKIYKNTEIQSLITALGLGIKGEELKR

SEQ ID NO: 183545 - protein, 278 aa, Unknown
  Bacterial polypetide isolated from the Sargasso Sea
MQWCSDVYSDNILGFANNIRTIDGGTHIEGLKTVLTRTFNNLAKKRGKRKEIEKNLAGENIREGLTVVLSVKVPDPEFEGQTKTKLGNTEVRGIVDSLIGEALTKYMEFNPGILDLILDKAIQSFNAAEAARRARELVRRKSVLESSTLPGKLADCSSRDPSESEIYIVEGDSAGGSAKQGRDRNFQAILPLRGKILNIEKTDDTKIYKNTEIQSLITALGLGIKGEEFDASSLRYHRVVIMTDADVDGAHIRTLLLTFFYRYQRELVEKGYIYIACP

SEQ ID NO: 183546 - protein, 148 aa, Unknown
  Bacterial polypetide isolated from the Sargasso Sea
YHRIIIMTDADVDGSHIRTLLLTFFYRQMYEIVDKGHIYIALPPLYKITKGKEFIYASDEKQKDDAIKSLSKSGTRGLEVQRYKGLGEMNPEQLWTTTMDPDNRRMMRVDIKDVQDANESFEILMGDDVEPRREFIDKNALTVKELDI

SEQ ID NO: 183547 - protein, 227 aa, Unknown
  Bacterial polypetide isolated from the Sargasso Sea
MVKNNTTYQADSIKVLKGLEAVRKRPGMYIGDTDDGTGLHHMVYEVVDNSIDEALAGHCKNIKVEINGDGSITVEDDGRGIPVDIHKGEKKSAAEVIMTQLHAGGKFDHESYKVSGGLHGVGVSVVNALSEKLKLYIERDGKKHFIEFYNGDSQNPLKVIGKSKSTGTKINFLPSKNIFSSTKFSFAILQKRMRELAFLNKGIQISLNDLTQKKPKNINFKFDGGIL

SEQ ID NO: 183548 - protein, 301 aa, Unknown
  Bacterial polypetide isolated from the Sargasso Sea
MSSSYLSYAMSVIVSRALPDVRDGLKPVHRRIIYAMYKGGFDWTKQFRKSARVVGDVIGKYHPHGDQAVYDALVRLTQNFSMNIPLIDGQGNFGSIDGDPPAAMRYTETKLAKVSQFLIDDIEKETIDFRNNYDDTEKEPTVLPSQFPNLLVNGAGGIAVGMATSIPPHNLGEIIDGTVAYINNKDITISQLMKKIPGPDFPTGGIIIGQDNLKQGYNKGRGSIKLRGDLEVESLKNGKERLVIQSIPYQVNKSVLIERIAELARDKKIEGISDIRDESNYKGVRVVIDLRRNVEPETVKR

SEQ ID NO: 183549 - protein, 237 aa, Unknown
  Bacterial polypetide isolated from the Sargasso Sea
QYLIDDIEKNVIHFRNNYDETEKEPTVLPSQFPNLLVNGAGGIAVGMATSIPPHNLGEIVDGTIEFIKNRDITISQLMKKIPGPDFPTGGIIIGKETLKQGYNKGRGSFKIRGQIEEESLKNGKERLVIKSIPYQINKSVLNERIAELAREKKIEGISDIRDESNREGVRVVIDLRRNVEPETVKRQLYKYTSVESSFGFNTLAIVDGKPKILNLKEFITEFVNFREKTLTRKIKFD

SEQ ID NO: 183550 - protein, 304 aa, Unknown
  Bacterial polypetide isolated from the Sargasso Sea
IVVFNKDGSVTVEDNGRGIPVDIHKEEKKPAVEVVMTVLHAGGKFDKGSYKVSGGLHGVGVSVVNALSEWLWVEVSRDKKVHRQDYKIGEPQGDLKEIAKTKKTGTKVCFFPDNTVFKTIKFEYKIISERLRELAYLNKGLEIILKDEREEEGQTDTFKFDGGLSDFVKYLDENNNPLHNKIITVNKEDGETPVEVALRYGNTYNENILTFVNNINTIEGGTHLSGFRTALTRAMNNHATKNNLIKTKKNEKISLSGEDFREGLTAIISVKVAEPQFEGQTKTKLGNGDIKGTVDKIVYEGILD

SEQ ID NO: 183551 - protein, 174 aa, Unknown
  Bacterial polypetide isolated from the Sargasso Sea
MEKTIIENKKSFKPIFVQDEMSSSYLSYAMSVIISRALPDVRDGLKPVHRRIIYAMYKGGYDWSKPFRKSARIVGDVIGKYHPHGDQSVYDALVRLVQDFSMSLPLISGQGNFGSIDGDPPAAMRYTETKLGKIAQYLTEDLEKNTVNYRNNYDETEKEPEVLPSQYPNILVNR

SEQ ID NO: 183552 - protein, 332 aa, Unknown
  Bacterial polypetide isolated from the Sargasso Sea
PYKKSARVVGDVIGKYHPHGDSAAYDAMVRMAQEFSMRYMLVEGQGNFGSIDGDPPAAMRYTEVRMAKITDQVLSDIEKDTVNFSPNYDGSEMIPDILPTRVPLLLANGSSGIAVGMATNIPPHNLNEIINGCLALIENPKSTIDNLLEIISGPDFPTGGIIDGKMGIYEAYKTGKGIIYVRAKTTIEEDKSGNRSLIINEIPYMVNKAKMLEKIAELVKDKKIDGIKEIRDESDKDGLRVVIDIKKGESSDVLENNLFSQSQLEQSFGINFTVLVDGQPKVLNIKELLNEFIKHRKEVVTKRSKFELAKAKERGHVVEGLIVFISNIDEII

SEQ ID NO: 183553 - protein, 275 aa, Unknown
  Bacterial polypetide isolated from the Sargasso Sea
ILEALAVALANIDPIIALIKASPTPADAKVKLVEQGWALGHVQGMLEKAGDDAARPEWLEPEFGIRDGLYYLTEQQAQAILELRLHRLTGLEHDKIIAEYEELLEFIAGLLFILRSPERLMEVIKEELEEILAEYGDARRTVINANEIDMSLEDLINEEDVVVTLSHLGYAKYQPLSDYQAQRRGGKGKAATKVKDEDFVEKLLVANTHDTILCFSDFGKMYWLKVYQLPLASRTSRGRPIVNLLPLSDGERITAILPVREYAEDKYIIMATSNG

SEQ ID NO: 183554 - protein, 290 aa, Unknown
  Bacterial polypetide isolated from the Sargasso Sea
MGKYHPHGDAAIYESMVRLAQDFSMRVPLIDGQGNFGSIDGDPAAAMRYTEARLDKVSEFLLRDIDFETVDYTPNYDESQLEPQVLPAEYPNLLVNGAGGIAVGMATNIPPHNPAEVIDACISYVDNPEISIEDLMKILPGPDFPTGALIMGQAGIRSAYETGKGSIVMRSKAEIIENNNRSQIIISEIPYQVNKSQLLERVGELVREKTIEGIQDLRDESDRDGLRIVVEIKRDSDANVILNQLFRHTRFQTAFSVNLLALNAGKPEQMGLKEVLSAFVSFREEVIYKR

SEQ ID NO: 183555 - protein, 149 aa, Unknown
  Bacterial polypetide isolated from the Sargasso Sea
MHEKIKNHNKKNIDYDAESIKVLKGLDAVRKRPGMYIGDTDDGSGLHHMVYEVLDNSIDEALAGYCDTIDVTLLNDGSIKIADNGRGIPVDLHPEEGISAAEVIMTQLHAGGKFDNNSYKVSGGLHGVGISVVNALSDYLLLHYLQGSK

SEQ ID NO: 183556 - protein, 311 aa, Unknown
  Bacterial polypetide isolated from the Sargasso Sea
HRRILYAMIEGGYDWSKPYRKSARVVGDVMGNYHPHGDTAIYDSMVRMAQEFSMRLMLVDGQGNFGSIDGDPPAAMRYTESRLARSSESLLRDIDKDTIDFIPNYDESQLEPSVLPAEFPNMLVNGAGGIAVGMATNIPPHNPGEVIRACKALIENPNTSLEELMEIIPGPDFPTAGLIMGRAGIREAFRTGRGSVIMRSKAEIIQLGKNLDRETIIISEIPFQVNKALVLEKIGDLIRDKTIEGISDLRDESDRNGMRIVIEIKKDVQADVVLNQLWRHTRLQTSFPVNMLALDNGQPKQMGLLKFSKLS

SEQ ID NO: 183557 - protein, 239 aa, Unknown
  Bacterial polypetide isolated from the Sargasso Sea
AREAARKAREMTRKKGALDIAGLPGKLADCQEKDPSLSELFIVEGDSAGGSAKQGRDRKTQAILPLKGKILNVEKAQRAKMYSSVEIGTLITALGCGIHDEFDMDNLRYHKIIIMTDADVDGSHIRTLLLTFFYRELQDLISGGYLYIAQPPLYKLKKGKKEEYVLTDEELNSLILSNAVKGTEVRAKNKKKGIEGDGLLNTILDYSNSLSVIERIEKQAGTIAAKAISLHKPITKTEA

SEQ ID NO: 183558 - protein, 146 aa, Unknown
  Bacterial polypetide isolated from the Sargasso Sea
RVVIMTDADVDCAHIRTLLLTFFYRYQRELVEKGFIYIACPPLYKVERGKNHNYCYNENQLKDTIKGFGENANYNIQRFKGLGEMMPKQLWDTTMNPQTRMMKRVEIEDALEADRIFNILMGDKVAPRREFIETHSSHLDMATLDI

SEQ ID NO: 183559 - protein, 52 aa, Unknown
  Bacterial polypetide isolated from the Sargasso Sea
GGSAKQGRNRQNQAILPLKGKILNVEKARLDKVLSSQEIGTLVTALGCGIGT

SEQ ID NO: 183560 - protein, 326 aa, Unknown
  Bacterial polypetide isolated from the Sargasso Sea
NALSQTLSLRIHKNGNIYEQDYAHGVPKKALKKGAKTERTGTTISFQPSKKTFSNTSFSYETLSKRLREMSFLNPGLTINLNDERTNKTDSYCYEGGLKDFVRHLNKPQKPTHQSIAYINKKSKKDGDIEVEVAIQWNESYRENTFCFANTIRQKDGGTHLAGFRGALTRTINTYIDKEIPKNDTSVTGDDCREGMTAIISVKHPDPKFSSQTKDKLVSSEVKGVVESAVNKHLKEFLEENPVEAKIIVGKILDAARAREAARKAREMTRKKGALDIAGLPGKLADCQEKDPSLSELFIVEGDSAGGSAKQGRDRKTQAILPLKGK

SEQ ID NO: 183561 - protein, 260 aa, Unknown
  Bacterial polypetide isolated from the Sargasso Sea
AILPLRGKILNVIKANPHKILENNEISALITAIGAGYGNPPKDKEYNPSDYFNPDSMRYHKIVIMTDADVDGSHIRTLLLTFFYQFMRDIITTGRLYIAQPPLYKVKKGNAENYLLDDKELTKFLLLNNKEDLDFNIYNKKKKIQLKEEQLNELIDLASRANSAYLNLDLTYLDTQFFDQIINTGLFFMDFPPNKIEKSQFKVFLSNLNQVYKSQNIKFTFQSMISNELVFLQEKEGYNKIIKVPLDKLLHLREFISIEN

SEQ ID NO: 183562 - protein, 280 aa, Unknown
  Bacterial polypetide isolated from the Sargasso Sea
MPKTKKSTSKKNYDSSNIKVLKGLDAVRKRPGMYIGDTDDGTGLHHMVYEVVDNSVDEALAGYCSEISVIIHQDDSITVKDNGRGVPVDKHKGENKSAAEVIMTVLHAGGKFDDDSYKVSGGLHGVGVSVVNALSQTLSLRIHKNGNIYEQNYTHGVPVRALKKGAKTKRSGTTISFQPSKKTFSNTTFSYETLSKRLREMSFLNPGLTITLNDERTNKADSYCYEGGLKDFVRHLNKPQTPTHQSIAYINKKSKKDGDIEVEVAIQWNESYRENTFCFA

SEQ ID NO: 183563 - protein, 249 aa, Unknown
  Bacterial polypetide isolated from the Sargasso Sea
GEKKSAAEVIMTQLHAGGKFDHKSYKVSGGLHGVGVSVVNALSKKLELEINRDNKKYYIEFKDGDAKAPLKQIGKSTTTGTKITFLPSTEIFSSTKFSSSIIQKRMRELAFLNKGIKLVVIDKTQKKDKVFEYKFDGGLNEFINYLNQKKEKLKNKNGNDLFKKPISLEGNKNGIEIECSLEWNSSYSEDVYAYTNNIYQKDGGTHLLGFRSALTRVVNKYVSDNNVLKKNKLSISGDDIKEGLTALLS

SEQ ID NO: 183564 - protein, 150 aa, Unknown
  Bacterial polypetide isolated from the Sargasso Sea
MTASKTKTVPKKSTTSKAKTSKTKKNNLNGYDADDIQTLEGLEAVRKRPGMYIGGTGSQGLMHLVWELVDNAVDEAAAGFATRLDVILNRDGSVEISDNGRGIPVDIHSGKKVSALEVVLTELHAGGKFGGGAYGASGGLHGVGASVVNA

SEQ ID NO: 183565 - protein, 278 aa, Unknown
  Bacterial polypetide isolated from the Sargasso Sea
AIELSGLPGKLADCQIGKQEGTELFIVEGDSAGGSAKQGRDRSNQAVLPLRGKILNTYVEDLNVKKNGNGNGSDQRTKALSKMISSNEIVTLINALGLDPKAHEIDLKDLRYGKIIIMTDADVDGSHIRALLLTFFNNKPFNKLIEHGHVYLAQPPLFKINKGSKGIYIKDEEELENYIITNSKEIKKSKRGSKEFSKLIEMEKSKMSIQRFKGLGEMNPEELWSTTLNPETRNLLQVQYSKNSKKDQELIHTLMGNDVTLRKDFIISNAINVQNLDI

SEQ ID NO: 183566 - protein, 261 aa, Unknown
  Bacterial polypetide isolated from the Sargasso Sea
MTNKNTYQADSIKVLKGLEAVRKRPGMYIGDTDDGTGLHHMVYEVVDNSIDEALAGYCKNINVKINSDGTVTVSDDGRGIPVDIHKGEKKSAAEVIMTQLHAGGKFDHDSYKVSGGLHGVGVSVVNALSEKLQLEIHRDGKKYFIEFINGKAKSPLKALGKSKDSGTKITFLPSKEIFSSTKFSGNILIKRMRELAFLNRGIKIIFIDGSQKKEKINEFKFEGGVLEFVEYLDEKREKLQNKNGNNLFKKPIYIEGKKQNI

SEQ ID NO: 183567 - protein, 238 aa, Unknown
  Bacterial polypetide isolated from the Sargasso Sea
MIKKNQLDNLKYSAESIKVLKGLEAVRKRPGMYIGDTDDGTGLHHMVYEVVDNSIDEALAGHCKNIKISINSDQSVSVEDDGRGIPVDLHKGEKKSAAEVIMTQLHAGGKFDHDSYKVSGGLHGVGVSVVNALSEKLTLKIFRDKKEYFVEFKDGKALSPLKATGKTNKTGTFIKFLPSKKVFSDTKFNSTTLQKRMRELAFLNKGLTIILLDKTSKKEKEYKNKYDGGIPRVCGISG

SEQ ID NO: 183568 - protein, 151 aa, Unknown
  Bacterial polypetide isolated from the Sargasso Sea
MAEDSAPSPPLEPDIEHVSIADEMRKSYLDYAMSVIVSRALPDVRDGLKPVHRRILHVMNENSYDWNRPYRKSARVVGDVMGQYHPHGDQAIYDAMVRMAQDFSMRLPLIDGQGNFGSMDGDPPAAMRYTEARLERVARELLDDIDKDTVD

SEQ ID NO: 183569 - protein, 309 aa, Unknown
  Bacterial polypetide isolated from the Sargasso Sea
PGAGILDLRLHRLTGLEQDKIRNEYLEVLDRIREYLQILGDPDRLMQVIRDELTSVRDQYGDDRRTEIHERHEDLENEDLITPEDRVVTLSHEGYAKSQPVADYQAQRRGGKGRVATRTKEEDFVKTVFVANTHDTVMCFTNLGKVYWLKVYQLPLAGRQARGKPLVNLLPLSGGERVTAVLPLAHDTPGQYVCMVTRHGVIKKSLLENFARPRSVGLIAVNLLEGDELVEVSLTDGESDILIFSSAGKAIRFSEKQVRPMGRSARGVRALNMKPDQSVIAMLIRRSDGLDSKVLVATENGYGKQTAFS

SEQ ID NO: 183570 - protein, 210 aa, Unknown
  Bacterial polypetide isolated from the Sargasso Sea
MEKQNIKHNNNSKPILVRNEMSSSYLSYAMSVIVSRALPDVRDGLKPVHRRIIFAMYKGGYDWSKNFRKSARIVGDVIGKYHPHGDQAVYDALVRLVQDFSMSLPLLQGQGNFGSIDGDPPAAMRYTETKLGKISQYLTEDLEKDTVSFRNNYDETEKEPTVLPSQYPNLLVNGAGGIAVGMATSIPPHNLGEVINATNAFIENQNITIG

SEQ ID NO: 183571 - protein, 173 aa, Unknown
  Bacterial polypetide isolated from the Sargasso Sea
MSSSYLSYAMSVIVSRALPDVRDGLKPVHRRIIYAMYKGGFDWSKQFRKSARVVGDVIGKYHPHGDQAVYDALVRLTQNFSMSLPLIDGQGNFGSIDGDPPAAMRYTETKLSKVSQFLVNDIEKNVINFRSNYDESEKEPEVLPSQYPNLLVNGAGGIAVGMATSIPPHNLGE

SEQ ID NO: 183572 - protein, 131 aa, Unknown
  Bacterial polypetide isolated from the Sargasso Sea
MSKIIKNKIDKILSDKYLSYAVSTIVSRSLPDVRDGLKPVHRRIIYSMYQLKLFHDSPFKKSARIVGDVMGKFHPHGDQAIYDSLVRLAQNFSTRHTLIEGQGNFGNIDGDNPAAMRYTEARLDKISQYFF

SEQ ID NO: 183573 - protein, 286 aa, Unknown
  Bacterial polypetide isolated from the Sargasso Sea
MSSSYLSYAMSVIVSRALPDVRDGLKPVHRRIIYAMYKGGYDWSKSFRKSARIVGDVIGKYHPHGDQAVYDALVRLVQDFSMSLPLIEGQGNFGSIDGDPPAAMRYTETKLGKISQHLTEDLEKNTVEYRNNYDETEKEPTVLPSQFPNLLVNGAGGIAVGMATSIPPHNLGEVIDATIAMIENKDITISQIMKFLPGPDFPTGGVIIGKDIIKQGYNKGRGSFKIRGEIDFEEKKNGRSILLIKSIPYQINKSTLIEKIAQLAKDKKIEGISDIRDESNREGIRV

SEQ ID NO: 183574 - protein, 299 aa, Unknown
  Bacterial polypetide isolated from the Sargasso Sea
YPTLDGHGNFGSVDNDPPAAMRYTETRLAPIAYTGFLEEIGSDTVNFSNNFDGSQKEPDVLPAQLPFLLLNGSSGIAVGMATNIPPHNLGEIVDGLIALIENKDISNKKLSKIIKGPDFPTGGELIYNQAIEELYETGKGSIIIRGILNKEEINLGKGKHKRNALIITELPYQISKAGWIEKLAELVNSNKINGIADIRDESDRDGMRIVIELKKDSNTELVISNLYKKTTLQTNFGAIFLTLIKGKPVQLNLKQYLDYFLKFREETIRKRTSYFLKNTLEKLEILEGLSKATKDIKEL

SEQ ID NO: 183575 - protein, 132 aa, Unknown
  Bacterial polypetide isolated from the Sargasso Sea
MIKNNKNTYQADSIKVLKGLEAVRKRPGMYIGDTDDGTGLHHMVYEVVDNSIDEALAGHCKKIEVSINSDGSITVEDDGRGIPVDFHKEEKKSAAEVIMTQLHAGGKFDHDSDKVSGGLHGVGVSVVNVFTK

SEQ ID NO: 183576 - protein, 308 aa, Unknown
  Bacterial polypetide isolated from the Sargasso Sea
ALPDIRDGLKPVHRRIIYAMHKGGFDWSKQFRKSARIVGDVIGKYHPHGDQAVYDALVRMVQEFSMSLPLVDGQGNFGSIDGDPPAAMRYTETKLAKVSQFLIDDIEKNTVSFKSNYDETEHEPIVLPAQYPNLLVNGAGGIAVGMATSIPPHNLGEVVDGTLALIKNKDIKINELMKYIPGPDFPTGGLIIGKEIIKQGYKTGRGSFKIRGEISVENLKNGKDRLVVSSIPYQINKSNLNERIAELVRDKKIEGISDIRDESNSEGIRVSIDLRRNVEPETVKRQLYKYTSIETSFGFNSLAIVDQK

SEQ ID NO: 183577 - protein, 247 aa, Unknown
  Bacterial polypetide isolated from the Sargasso Sea
MTRRKGVLEIAGLPGKLADCQEKDPTLSEIYIVEGDSAGGSAKQGRNRKNQAILPLKGKIINVEKARIDKVLGSAEVGTLIKALGCGIGKEDFDIDNLRYHRIIIMTDADVDGSHIRTLLLTFFYRQMYEIVEKGHVYIALPPLYKITKGKEFVYASDESEKDDAIKKLSKNGTRGLEVQRYKGLGEMNPEQLWTTTMDPINRRMMRVDIKDVQDANESFEILMGDDVEPRREFIDANALSVKELDI

SEQ ID NO: 183578 - protein, 187 aa, Unknown
  Bacterial polypetide isolated from the Sargasso Sea
MSEFAKEILPINIEDELKQSYLSYAMSVIHGRALPDVRDGLKPVHRRILFAMHDLRNYYNKPYKKSARVVGDVIGKYHPHGDSAVYDAIVRMAQDFSMRYTLIEGQGNFGSIDGDPPAAMRYTEVRMQKIADEILSDLEKETVSFSENYDGSEMIPDVMPTKIPNLLVNGSSRYCCWYGNKIYHRIT

SEQ ID NO: 183579 - protein, 203 aa, Unknown
  Bacterial polypetide isolated from the Sargasso Sea
MPGKLADCQSSDNEITELFIVEGDSAGGSAKQARDRKYQAVLPLRGKILNTFVESKNGKSNDKKTFSKMLSSNEIITLINALGTGFEDFNIDKLRYGKVVIMTDADVDGSHIRTLLLTFFNNKPFNELIEKGKIYIAQPPLYKVKIGKNIKYLKSDNELLKLSITNSKSKFEFQSSSKSFQVELNTILDACLLLKDILSNIRV

SEQ ID NO: 183580 - protein, 307 aa, Unknown
  Bacterial polypetide isolated from the Sargasso Sea
RAVGEVMGKYHPHGDSAIYDSLVRMAQDFSMSVPLLDGQGNFGSMDGDSAAAMRYTEVKMEKVANSLLADIEKNTVNFQDNYDGKDREPTVLPSRFPNMLVNGAGGIAVGMATNIPPHNLGEIIDATIALIERPEMSIDDLMELVPAPDFPTGGLILGNSGAKKAYTEGRGSVIIRSRTKIEEIRKDRWAIVISQIPYQVNKSNLIEKIAEVGKDRRIEGIAHVQDESDRLGVRIVIELKRDATPEVVLNQLYKFTQLQTSFGCNMLALNGGRPEQLNLKDFLSSFVSFREEVVARRTAYDLKKARE

SEQ ID NO: 183581 - protein, 287 aa, Unknown
  Bacterial polypetide isolated from the Sargasso Sea
KSKKNTNTKNYDSSNIKVLKGLDAVRKRPGMYIGDTDDGTGLHHMVFEVVDNSVDEALAGFCTHIEVIIHEDDSITVKDNGRGIPVDKHKTEKTSAAEVIMTVLHAGGKFDDDSYKVSGGLHGVGVSVVNALSESLNLRIHKNGHTYEQDYVHGVPQKPLKKGSKTDRSGTTVTFKPSAKTFTNTTYSFDILSKRLRELSFLNSGLSIKLTDTRSGKEEEFYFEGGISAFVSHLNKVQSPVHESVINFSKTIDDITVDIALQWNESYRENMYCFANTIRQKDGGTHL

SEQ ID NO: 183582 - protein, 291 aa, Unknown
  Bacterial polypetide isolated from the Sargasso Sea
IYEVLDNSIDESLAGYCDKIEVHLNSDGSITVSDNGRGIPVDIHKTEGVPAAQLIMTELHAGGKFDQNSYKVSGGLHGVGVSVVNALSEILELIINRDGKIYKINFENGVVKNKLEIIGDSKKIDNSYFTGTSINFLPSSKTFKNTDFNFGIIEKRLRELAFLNTGVNITLKDKRSSKIKELNFKYEGGINEYVQFINKGKNTIINNPIFFKANKNNVSVECSLQWTDSYHENTLCFTNNIIQRDGGTHLAGFRGALTRSVVNYINKNSKFNANVTGDDAREGLTCIISIK

SEQ ID NO: 183583 - protein, 243 aa, Unknown
  Bacterial polypetide isolated from the Sargasso Sea
FHPHGDAAIYESMVRMAQEFALRYPLVDGQGNFGNIDGDNAAAMRYTEARMTKAAELLLLDIDKDTVDFRVTYDDEGKEPVVLPSAFPNLLANGSQGIAVGMATSIPPHNISELVDALLHLIKFPNASDTTISNYVKGPDFPTGGILVEPKSSIEESYRIGKGGFKLRARWIVEKLKSGQWQIIVTEIPYQVQKSRLLEKIAELMENKILPMLSDIRDESTENIRLVVEPKSRNLSPEMIMET

SEQ ID NO: 183584 - protein, 303 aa, Unknown
  Bacterial polypetide isolated from the Sargasso Sea
MYIGDTDDGTGLHHMVYEVVDNSIDEALAGYCKNIYVKINSDGTVTVSDDGRGIPVDIHKGEKKSAAEVIMTQLHAGGKFDHDSYKVSGGLHGVGVSVVNALSENLKLEINREGKKYFIEFKNGKAKASLKTIGKSKDTGTKITFLPSKEIFSSIKFSGNILIKRLRELAFLNKGIKIKFVDASQKKEKIEEFQYNGGILEFVEFLDEKREKLQNKNGNELFKKPIYIDGKKENIEIECSLKWNATYSEDIYPFTNNIHQKDGGTHLLGFRSALTRVVNKYANEHNLLKKNKLTISGDDIKEG

SEQ ID NO: 183585 - protein, 230 aa, Unknown
  Bacterial polypetide isolated from the Sargasso Sea
LADCSSSSTENTELFLVEGDSAGGSAKQARDRITQAVLPLKGKILNIASAGISKSYENQEVLNILQALGCGVKDKYREDKLRYEKIIIMTDADVDGDHISALLMTCFFSLMPKLIENNHLFIACPPLYRIVMGDKIFYAMDENQKNKIISKFKSNRKYEINRFKGLGEMMPKQLKDTTMDPSTRKLKKIIIPNKKYIQTENFVEQIMGKKPEKRLEFIKKNSENVNNLNL

SEQ ID NO: 183586 - protein, 211 aa, Unknown
  Bacterial polypetide isolated from the Sargasso Sea
MSRLLEDEMRESFIDYSMSVIVQRALPDVRDGLKPVHRRILYAMSQAGMNPGRAYKKSATVVGEVLGKYHPHGDSAVYDSMVRMVQDFSLRYPLVDGQGNFGSVDGDSAAAYRYTEARLKQLATELLADIEKETVDYADNFDGSHQEPTVLPARVPNLLINGSSGIAVGMATNIPPHNLREIVAATTALIDDPDLGQEELESIVTGPDFPT

SEQ ID NO: 183587 - protein, 171 aa, Unknown
  Bacterial polypetide isolated from the Sargasso Sea
MVNKLQNSSYKADSIKVLKGLEAVRKRPGMYIGDTDDGTGLHHMIYEVVDNSIDEALAGYCKNIKIELNKDGTATITDDGRGIPVDLHKGEKKSAAEVIMTQLHSGGKFDHDSYKVSGGLHGVGVSVVNALSEKLKLTINRDNKTYYMEFQEDKAISSLKSMEKVKSQELK

SEQ ID NO: 183588 - protein, 267 aa, Unknown
  Bacterial polypetide isolated from the Sargasso Sea
MTQLHAGGKFDHDSYKVSGGLHGVGVSVVNALSEKLELTIERDGKKHFAEFKNGDVTKSLKVIGKSNLTGTQINFLPSKDIFSDTNFSFSIIQKRMRELAFLNKGTKIRINDLSQKKSKNVEFNFEGGILEFVQFLDEKREKLKNRNDNDLFRKPIFIEGKKNNLDMECSLKWNAGYNEDIYSYTNNIFQKDGGTHLLGFRSALTRVINKYANEQNLLKKNKLSISGDDIKEGLTCVLSIKIPDPKFSSQTKDKLVSSEVRNIVETI

SEQ ID NO: 183589 - protein, 184 aa, Unknown
  Bacterial polypetide isolated from the Sargasso Sea
MTKNINTYQADSIKVLKGLEAVRKRPGMYIGDTDDGTGLHHMVYEVVDNSIDEALAGHCKKIEVSINSDGSITVQDDGRGIPVDFHKEEKKSAAEVIMTQLHAGGKFDHDSYKVSGGLHGVGVSVVNALSQKLELFVERDGKKYFVEFINGETKTPLKVAGKSNTTGTRINFLPSKDIFSTTKF

SEQ ID NO: 183590 - protein, 319 aa, Unknown
  Bacterial polypetide isolated from the Sargasso Sea
MPAQKAKALLRERKGALSGGGLPGKLRDCTSKDVDKCELYLVEGDSAGGSAEGGRLREYQAILPLRGKIINAYKSREDKVLANEEVRSVISAIGAGIGPEADLTKRRYDKVVIMTDADVDGSHIRTLLLTFFYRQMYQLVVSGHVYVAQPPLFRVRNKKHVYYVQTEEEMKQQLLDQGLGEGVFLPGDGRELAGEEMQRLCRTLAGLEDALVALERRGISLRDHAARRDSETKKLPMYHVFFGAEEHWFTSRDQLESFVESKEKITGGELEAGKADENKPGGGGAADPESAEHQLIVIDLHEVRSINAGLTELDSMGFG

SEQ ID NO: 183591 - protein, 294 aa, Unknown
  Bacterial polypetide isolated from the Sargasso Sea
EIIYVDSQKDNVYLEAALQWCSDVYSDNILGFANNIRTIDGGTHIEGLKTVLTRTFNAIAKKRGKRKEADKNLSGENIREGLTVVLSVKVPEPEFEGQTKTKLGNTEVRGIVDSLIGEALTKYMEFNPNVFDLILEKAIQSFNAAEAAKRARDLVRRKSVLESSTLPGKLADCSSRDPSGSEIYIVEGDSAGGSAKQGRDRKFQAILPLRGKILNIEKTDDTKIYKNTEIQSLITALGLGIKGEEFDVNSLRYHRVVIMTDADVDGAHIRTLLLTFFYRYQRELVERGFIYIAC

SEQ ID NO: 183592 - protein, 282 aa, Unknown
  Bacterial polypetide isolated from the Sargasso Sea
RILYSMSESGYNFNLPYKKSARIVGDVMGKYHPHGDSAIYNSMVRMAQDFSMRLELIDGQGNFGSLDGDPPAAMRYTEARLAKVSERLVEDIDKNTITFQPNYDDTTKEPSVLPSQFPNLLVNGASGIAVGMATNIAPHNLGEVIDASLFLIKNPDCNINDLQKYIFGPDFPTGGQIIGKKGITEAFETGKGSCVVRSKTSIENFKKDREAIILHEIPYQVNKSKLLERIAEIVKNGIVEGISDLRDESDRNGVRVVIELKKDVDSNIILNQLYKHTLIQTT

SEQ ID NO: 183593 - protein, 253 aa, Unknown
  Bacterial polypetide isolated from the Sargasso Sea
CKKARELTKRKSILETSGLPGKLADCSSTDPTESELFIVEGDSAAGPAKQARDSRVQAILPIRGKIINVQKVTENRALQNEEISTLIKAIGTGIKTQFNEEESRYDKIIFLTDADVDGAHIRTLLLTFFFKFMPGLITSGKVWISEPPLYRLKAASGITYLKDDEALNAFKKENKNKKFDISRFKGLGEMNAGELWDTAMNPETRTLIKVTLADAKGAMAKASDMFEVLMGNDVSKRKLFIEKNAKDVRFLDV

SEQ ID NO: 183594 - protein, 284 aa, Unknown
  Bacterial polypetide isolated from the Sargasso Sea
NSQADSQVYGADSIKVLKGLEAVRKRPGMYIGDTDDGSGLHHMVYEVVDNGIDEALAGHCDKVTVTLHNDNSVSVSDNGRGIPTEKHQEEGISAAEVIMTQLHAGGKFDQNSYKVSGGLHGVGVSVVNALSSKLELRIWRDNKEHYVEFKNGETTSPLAEMGSADGKKGTEVRFWASEETFSNIKYEFETLEQRLRELAFLNSGVAIDLIDLREGVEKTVSLSYQGGVREFVKYLDRSKAPLISEPIFISGTKEGISLEIALWWNNAYNEVVLPFTNNIPQSDG

SEQ ID NO: 183595 - protein, 228 aa, Unknown
  Bacterial polypetide isolated from the Sargasso Sea
MPKQNNYDSSNIKVLKGLEAVQKRPGMYIGDTDDGSGLHQMVYEVMDNSIDEALAGHCSNITVTVHEDNAVTVEDNGRGIPVDEHPTEKKSAAEVIMTVLHAGGKFDDNSYKVSGGLHGVGVSVVNALSETLELTIYKNGKEYYQEYKDSKPLSEINELGNTKLSGTKITFRPSKKYFSLTSFNSDILKKRFKELAFLNSGIEINFVHENKSISQTFKYEGGIIEYVK

SEQ ID NO: 183596 - protein, 270 aa, Unknown
  Bacterial polypetide isolated from the Sargasso Sea
ALVRMVQDFSMSLPLIDGQGNFGSIDGDPPAAMRYTETKLAKVSQFLLDDIDKNTVSFKSNYDETEDEPVVLPAQYPNLLVNGAGGIAVGMATSIPPHNLGEIIDGTLALIKNKDIKINELMKHIPGPDFPTGGLIIGKDIIKQGYKTGRGSFKIRGEIKVENLKNGKDRLVISSIPYQINKSNLNERIAELVREKKIEGISDIRDESNSEGIRVSIDLRRNIEPETVKRQLYKYTSIESSFGFNSLAIVDNKPKTCSLKDFLENFLKFR

SEQ ID NO: 183597 - protein, 314 aa, Unknown
  Bacterial polypetide isolated from the Sargasso Sea
TKKGVALELAMQWNETYQESIYCFTNNIPQKDGGTHLSGFRGALTRSLNQYMEKQNTTAKNKINITGEDAREGLTAVLSLKVADPKFSSQTKDKLVSSEVKPVVESSVMEKLQEFLLEKPAEAKLICSKIVEAASAREAARKARELTRRKTALDIAGLPGKLADCQEKDPSISELFLVEGDSAGGSAKQGRDRRTQAILPLKGKILNVEKARVDKILSSAEIGTLIKALGCGFGKDEFNIEKLRYHRIIIMTDADVDGAHIRTLLLTFFYRKMPELVTRGHIFIAEPPLYQVKKGKQERYLRDDSAKEAYVQQL

SEQ ID NO: 183598 - protein, 307 aa, Unknown
  Bacterial polypetide isolated from the Sargasso Sea
GLTAIISVKVAEPQFEGQTKTKLGNGDVKGIVDKAVYEGILDFLEQNPSIGRRIIEKALLAARSRSAARKARELIRRKSALGGSSLPGKLSDCSNRDPVFCELYLVEGDSAGGSAKQGRDRRTQAILPLRGKVINSEKARVDKLLSNNEVQSMITALGAGFGGSDDESGEKSPGDFDLEKLRYHKIIIMTDADVDGSHIRTLLLTFFYRKMKEVIDGGYLYLALPPLYRVSQGKKESYAYDDNERDLLIERMKKDNKNTKVGIQRYKGLGEMNPGQLWETTMDPEKRTLMKVTVESAAEAAETFKTL

SEQ ID NO: 183599 - protein, 181 aa, Unknown
  Bacterial polypetide isolated from the Sargasso Sea
KDFNIENLRYEKIVIMTDADVDGSHIRTLLLTFFNNYPFNELIEKNHLYLAQPPLYKITKNNKNYYIKNEQELENFLINISDKSKKGIKKNQSEFKKFLENEKSKVNIQRFKGLGEMNPGELWETTLNPLKRTLLQVKYSNSTKLKSKKDQELIQILMGDEVSPRKDFIINRALEVSNLDI

SEQ ID NO: 183600 - protein, 291 aa, Unknown
  Bacterial polypetide isolated from the Sargasso Sea
MSFSNGDRISELEIVDSVGKANTGTAIRFWPNESYFDSADIRLDEIKHNLRAKAVLCPGLKIKFKDEATGEKCEWEYQEGASEYLVEMLENIECIPSIPFSGKANSDEQELEWSMTWPDRDHEGIQESYVNLIPTKHGGTHVSGFRSGLSESVKEFADYRNLLPRGVKLSPEDVWMGLSYIISVRIEDPQFSGQTKEKLSSRAVSGFVTGLIKDAFTLWLNQHPEAGDQIVARAIENAQKRAKKNVKVKRKKATGGPTLPGKLADCTSDEPDLCELFIVEGDSAGGSAKQA

SEQ ID NO: 183601 - protein, 276 aa, Unknown
  Bacterial polypetide isolated from the Sargasso Sea
DGLKPVHRRIIFSMYQLKLFNNSSYKKSARIVGDVMGKFHPHGDQAIYDSLVRMAQDFSTRIKLIDGQGNFGNIDGDNPAAMRYTEAKLQKYTNYFFDGLEENSVDYKENYDGQNLEPVVLPSQLPNILINGAMGIAVGMATNIPPHNVKELIDCLKILIENPKTNHSKLLKFLNGPDFPTGGQIILDQENKKDIYTKGKGSFIINSNWIKEELKNGLYQIIINEIPYQVNKIKIIEQLANLINTKKIPLDDVIDESDENIRIVLRPKSRNIDSQN

SEQ ID NO: 183602 - protein, 226 aa, Unknown
  Bacterial polypetide isolated from the Sargasso Sea
MANKNTYQADSIKVLKGLEAVRKRPGMYIGDTDDGTGLHHMVYEVVDNSIDEALAGYCKNINVRLNSDGTVTVNDDGRGIPTDIHKGEKKSAAEVIMTQLHAGGKFDHDSYKVSGGLHGVGVSVVNALSEKLFLEINRDGKRYFIEFRNGEAKAPLKISGKSKQTGTQITFLPSKEVFSSTKFSANILIKRMRELAFLNKGIKITFIDDSQKKEKVLEFKYDGGLT

SEQ ID NO: 183603 - protein, 272 aa, Unknown
  Bacterial polypetide isolated from the Sargasso Sea
DVLPAQLPFLLLNGSSGIAVGMATNIPPHNLGEIVDSLVALVKNKDISDKKLSNIIKGPDFPTGGELIYSPAIDELYETGKGSLTIRGVINLEEVNLGKGKHKKNALIITELPYQINKAGWIEKLAELVNAGKIDGISDIRDESDRDGMRIVIELKKDSNSELVISNLYKKTTLQTNFGAIFLALIKGKPVQLNLKKYLNYFLEFREETIRKRTYYFLKNTLEKLEISEGLSKATKNIKKIIEIIEESENSVEAKSKLIENFFLSEKQANSV

SEQ ID NO: 183604 - protein, 265 aa, Unknown
  Bacterial polypetide isolated from the Sargasso Sea
MHQMIYEVLDNSIDEALAGFCDNVEVVLNVDGTVTVSDNGRGIPVDLHKTEKISAAQLIMTELHAGGKFDQNSYKVSGGLHGVGVSVVNALSEFLILEINRDGKIYNLEFSNGIVTKQLNVVGDSIKKEKKFFTGTKITFLPTKDIFNNIEFNFKTIEKRLRELAFLNTGVSIDLIDKRQSNEIKINFKYDGGIQEYVKYINDGKNVINIKPISFNGEKNNITIECALQWTESYHENTICFTNNIIQRDGGTHLAGFRGALTRSI

SEQ ID NO: 183605 - protein, 254 aa, Unknown
  Bacterial polypetide isolated from the Sargasso Sea
MIKKNQKENQSYSAESIKVLKGLEAVRKRPGMYIGDIDDGTGLHHMVYEVVDNSIDEALAGYCKNIKVTINSDQSVSVEDDGRGIPVDLHKGEKKYAAEVIMTQLHAGGKFDHDSYKVSGGLHGVGVSVVNALSERLTLKIFRDKKEYFVEFKDGQAKFPLKVKGKTNKTGTFINFLPSREVFCDTKFSSTTLQKRMRELAFLNKGLSIILLDKTGKKEKEYKNKYEGGIQEFVEFLDKNKTILVNKNDQSLFK

SEQ ID NO: 183606 - protein, 163 aa, Unknown
  Bacterial polypetide isolated from the Sargasso Sea
MKIKNINFTDALEEKYLAYALSTITHRALPDIRDGLKPVHRRLLFAMFQLRLNSSSGFKKSARIVGDVIGKFHPHGDQSVYEALVRLAQNFSTRYPLVDGQGNFGNIDGDNAAAMRYTEARLTALAELMLKDISEDTIDYINTYDGIDHEPVVLPSAFPNLLA

SEQ ID NO: 183607 - protein, 207 aa, Unknown
  Bacterial polypetide isolated from the Sargasso Sea
MAKKSQEAKYDSSNIQVLKGLEAVKKRPGMYIGDTDDGSGLHHMVFEVLDNCIDEAMAGYCSDIKVIINKNGSVTIEDNGRGIPVDVHKKEGVSAAQLIMTTLHSGGKFDDNSYKVSGGLHGVGVSVVNALSKKLTLEVHRDGGEYFQEYSDGKPKAKLKKVKKSDKTGTKITFFPSEKIFTSIDFEVDRIYKRIRELSFLNARSFN

SEQ ID NO: 183608 - protein, 297 aa, Unknown
  Bacterial polypetide isolated from the Sargasso Sea
SAAMARDVARKARENVRRKGALELSGLPGKLADCQIGKQEGTELFIVEGDSAGGSAKQGRNRANQAVLPLRGKILNTYVEDLNFKKNGNGKENGSDQRTKALSKMISSNEIVTLINALGLDPKAQEIDLKDLRYGKIIIMTDADVDGSHIRALLLTFFNNKPFNKLIENGHVYLAQPPLFKINKGSKGIYIKDEKELEDYIINNNKELKKIKKGSKDYPKALDLERSKMNIQRFKGLGEMNPEELWSTTLDPETRNLLQVQYSKDLKKDQNLIHTLMGNDVSLRKDFIVSNAINVQN

SEQ ID NO: 183609 - protein, 304 aa, Unknown
  Bacterial polypetide isolated from the Sargasso Sea
GDDIKEGLCAVLSIKMPDPKFSSQTKDKLVSSEVRNIVENFMNEKLSIWFDQNPSIIKIVLLKIIQAAQARDVARKARESVRRKGALELTGLPGKLADCQNSKREGTELFIVEGDSAGGSAKQGRNREFQAVLPLRGKILNTYVEDSNSKRNGSSNETKTKALSKMISSNEIVTLINALGLDPKAEEIDLDDLRYGKIIIMTDADVDGSHIRALLLTFFNNKPFNKLIENGNIFLAQPPLFKINKSGKSIYIKDEKSLENFISSSSKSLKKLKKGNKEFEKILLEEKSKLNIQRFKGLGEMNPR

SEQ ID NO: 183610 - protein, 276 aa, Unknown
  Bacterial polypetide isolated from the Sargasso Sea
GTHENGFKTGIFKAFKEFSKLKYEKKSSQINQEDLFGSSASILSVFLENPEFQGQTKEKLSSIEPGRKIENKVKILFEQWLTSKTKSAEELFLYAFNRSQMRLQNRSNQIIDKNIKRKKTTLPGKLADCSIDGNKGTEIFLVEGDSAGGSAKQARDRKTQAILPLRGKILNVVSAGREKINANQEIIDLVQAIGCKRGEKFNSKDIRYEKIIIMTDADVDGAHISTLLMAFFYKEFPKLIDEGHLYLSVPPLYRITKGSKILYAVNDKHKDEIIKK

SEQ ID NO: 183611 - protein, 315 aa, Unknown
  Bacterial polypetide isolated from the Sargasso Sea
WSLRYMLVDGQGNFGSIDGDSPAAMRYTEARLKKISEEMVEDLDKDTVDFQLNYDDSIKEPTVLPTKIPSLLVNGASGIAVGMATNMPPHNLSEVIDGTVAYIQNNDIKVDELINHVKAPDFPTGGVIYGYDGVKQAFETGRGRVVMRGKASFEEVNGRECIVVTEIPYQVNKADMIQRTAELVNDKKIEGISNIRDESDRKGMRIVYILKRDAIPNIVLNTLYKYTALQSSFSVNNIALVNGRPKLLNLKEMISYFVEHRHDVVVRRTKFDLKKAEERAHILEGLIIASDNIDKVIEIIKKSSNADDARKNLIK

SEQ ID NO: 183612 - protein, 270 aa, Unknown
  Bacterial polypetide isolated from the Sargasso Sea
MSKLFKKNIDDILSQKYLSYAISTIVSRSLPDVRDGLKPVHRRIIYSMYQLKLFDSSSYKKSARIVGDVMGKFHPHGDQAIYDSLVRMAQDFSTRIKLIDGQGNFGNIDGDNPAAMRYTEARLEHYTNYFFDGLEENAVDFKENYDGQNLEPEVLPSKLPNILINGSMGIAVGMATNIPPHNISELIDCLILLIKNPKTNFTQINKLLNGPDFPTGGEVILTNNEKKEIYSKGKGSFIYNSKWKKEDLKNGMYKIIIYEIPYQGNKIKII

SEQ ID NO: 183613 - protein, 312 aa, Unknown
  Bacterial polypetide isolated from the Sargasso Sea
GLHHMIYEVVDNSIDETLAGYCKNIIVSINSDGSVTVKDDGRGIPVDMHKGEKKSAAEVIMTQLHAGGKFDHDSYKVSGGLHGVGVSVVNALSKTLKLNISRGGKNYFIEFENGKAKAPLKQLGKAKVNSGTEINFIPSEDVFSSIKFSFSILEKRLRELAFLNKGVQIILQDFSQKKTKILEFKYDGGILEFVEFLDKKRDFLKNKNGNELFKKPIYLEENKNNLNIQCSLKWNAGYGEDVYPFTNNIYQKDGGTHLLGFRSALTRVINKYASDLNLLKKNKLSISGDDVKEGLTCVLSIKVPDPKFSFKQ

SEQ ID NO: 183614 - protein, 267 aa, Unknown
  Bacterial polypetide isolated from the Sargasso Sea
MVNKNTYQADSIKVLKGLEAVRKRPGMYIGDTDDGTGLHHMVYEVVDNSIDEALGGFCKNINVKINADGTITVRDDGRGIPIDTHKGEKKSAAEVIMTQLHAGGKFDHDSYKVSGGLHGVGVSVVNALSEKLELEIDRDGKKYFIEFRNGEARSPLKLIGKSRSTGTQITFLPSKDIFSSIKFTPNILIKRMRELAFLNKGIKIIFIDGSQNKEKIYEFQYEGGVLEFVDYLDEKREKLKIRMVMICLKNQFILRVKRKHRDRMFLK

SEQ ID NO: 183615 - protein, 231 aa, Unknown
  Bacterial polypetide isolated from the Sargasso Sea
VDCSSRSRNNTEIFIVEGDSAGGSAKQARNRELQAILPLRGKILNVYNVGLSKIADNNEIQNLIQALGCGIGKNFDIKKLRYDKIILMTDADVDGSHIATLLITFFYKYMKNLIDENKLYIAMPPLFKIYDKNKHFYAFDEKEKNHIVKKEFKSDNYNITRFKGLGEMPAEQLKDTTMDQDKRKLISINTEKAKKDIKSTERLFETLMGKQADLRFQFIQKNANFIKNLDI

SEQ ID NO: 183616 - protein, 271 aa, Unknown
  Bacterial polypetide isolated from the Sargasso Sea
YMEFNPGILDLILEKAIQSFNAAEAARRARELVRRKSVLESSTLPGKLADCSSRDPSESEIYIVEGDSAGGSAKQGRDRNFQAILPLRGKILNIEKTDDTKIYKNTEIQSLITALGLGIKGEEFDVSSLRYHRVVIMTDADVDGAHIRTLLLTFFYRYQRELVEKGFIYIACPPLYKVERGKKHNYCYNENQLKDTIQGFGENANYNIQRFKGLGEMMPKQLWDTTMNPQTRMMKRVEIEDALEADRIFNILMGDKVAPRREFIETHSSNL

SEQ ID NO: 183617 - protein, 182 aa, Unknown
  Bacterial polypetide isolated from the Sargasso Sea
MKNNNYQADSIKVLKGLEAVRKRPGMYIGDTDDGTGLHHMVYEVVDNSIDEALAGHCKNIDVTINNDGTVSVEDDGRGIPVDIHKGEKKSAAEVIMTQLHAGGKFDHDSYKVSGGLHGVGVSVVNALSEKLELEINRDGKKYFIEFKNGKAKSPLKSVGKSKETGTRITFLPSKEVFSSIKV

SEQ ID NO: 183618 - protein, 207 aa, Unknown
  Bacterial polypetide isolated from the Sargasso Sea
MSDFAKEILPVNIEDELKQSYLSYAMSVIHGRALPDVRDGLKPVHRRILYAMHDLKNNYNKPYKKSARVVGDVIGKYHPHGDSAAYDAIVRMAQDFSMRYMLVEGQGNFGSIDGDPPAAMRYTEVRMQKISDEILADLEKETVPFSENYDGSEQMPDVMPTKIPNLLINGSSGIAVGMATNVPPHNLTEVINGSLKLLENQKYLLTR

SEQ ID NO: 183619 - protein, 73 aa, Unknown
  Bacterial polypetide isolated from the Sargasso Sea
MIKKSQTNNKKYSAESIKVLKGLEAVRKRPGMYIGDTDDGTGLHHMVYEVVDNSIDEALAGYCKNIKVIINSD

SEQ ID NO: 183620 - protein, 100 aa, Unknown
  Bacterial polypetide isolated from the Sargasso Sea
MQKTETNLEKNNYKPIFVYDEMSSSYLSYAMSVIVSRALPDVRDGLKPVHRRIIYAMYKGGFDWSKQFRKSARIVGDVIGKYHPHGDQAVYDALVRLTQN

SEQ ID NO: 183621 - protein, 155 aa, Unknown
  Bacterial polypetide isolated from the Sargasso Sea
MTKNNTNTYQADSIKVLKGLEAVRKRPGMYIGDTDDGTGLHHMVYEVVDNSIDEALAGHCKKIEVSINSDGSITVEDDGRGIPVDFHKEEKKSAAEVIMTQLHAGGKFDHDSYKVSGGLHGVGVSVVNALSQKLELYVERDGKKYFVEFINGETK

SEQ ID NO: 183622 - protein, 263 aa, Unknown
  Bacterial polypetide isolated from the Sargasso Sea
IGKQEGTELFIVEGDSAGGSAKQGRNRANQAVLPLRGKILNTYVEDLNIKKNGNGNGSDQRTKALSKMISSNEIVTLINALGLDPKAQDIDTKDLRYGKIIIMTDADVDGSHIRALLLTFFNNKPFNRLIENGHVYLAQPPLFKINKGSKGIYIKDEKELEDYIINNNKELKKIKKGSKEYSKALDLEKSKMNIQRFKGLGEMNPEELWSTTLDPATRNLLQVQYSKDIKKDQSLIHTLMGNDVALRKDFIVSNAINVRNLDI

SEQ ID NO: 183623 - protein, 296 aa, Unknown
  Bacterial polypetide isolated from the Sargasso Sea
SIFFTNYDGSEHIPDVLPTKIPNLLVNGSSGIAVGMATNIPPHNLTEVINGCVNLINNPKISIDELIKHISGPDFPTGGTIDGKAGIYEAYKTGRGIIHIRSNTSIEEDKSGKQSLIINEIPYMVNKAKMLEKIAELVKEKKIEGITEIRDESDKDGLRVVIEIRKGDSADVLENNLFAQTQLEQSFGINFTVLSEGQPKEVNLKEMLQAFVKHRKDIITKRTKYDLKRAKDRGHVVEGLMVAIANIDEIIAIIKKSKDPKIAAVALTKKIWKSGPVEALLKKVGSDACKPKSLSK

SEQ ID NO: 183624 - protein, 217 aa, Unknown
  Bacterial polypetide isolated from the Sargasso Sea
MANKNTYQADSIKVLKGLEAVRKRPGMYIGDTDDGTGLHHMVYEVVDNSIDEALAGYCKNINVKLNSDGTVTINDDGRGIPTDMHKGEKKSAAEVIMTQLHAGGKFDHDSYKVSGGLHGVGVSVVNALSEKLFLEINRDGKKHSIEFRNGEAKAPLKIAGKSKQTGTQITFLPSKEVFSSIKFSANILIKRMRELAFLNKGIKITFTDNSQKKEKIL

SEQ ID NO: 183625 - protein, 154 aa, Unknown
  Bacterial polypetide isolated from the Sargasso Sea
MNKNNTNYYQADSIKVLKGLEAVRKRPGMYIGDTDDGTGLHHMVYEVVDNSIDEALAGYCKKIEVSMNSDGSITVEDDGRGIPVDFHKEEKKSAAEVIMTQLHAGGKFDHDSYKVSGGLHGVGVSVVNALSQKLELYVERDGKKHFVEFANGET

SEQ ID NO: 183626 - protein, 263 aa, Unknown
  Bacterial polypetide isolated from the Sargasso Sea
HLLGFRSALTRVINKYSNEHNKKNKLSLTGEDIKEGLTVVLSIKMPDPKFSSQTKDKLVSSEIRLIVENIINDKISMWFDQNPSIIRNVLEKIVQAAVARDVARKARDNVRRKGSFEITGLPGKLADCQISKKEGTELYIVEGDSAGGSAKQGRNREFQAVLPLRGKILNTYVNTNGRNAGKNSENETKALSKMMSSSEIVTLINALGTGSKDFDINNLRYDKIIIMTDADVDGSHIRTLLLTFFNNHPFNQLIENGHLYLAQ

SEQ ID NO: 183627 - protein, 301 aa, Unknown
  Bacterial polypetide isolated from the Sargasso Sea
FGSIDGDPPAAMRYTETRLSKVSQHLVDDINKDTVEFKSNYDETEKEPEILPAQYPNLLVNGAGGIAVGMATSIPPHNLGEIINGTLALIENREIKIPELMKLIPGPDFPTGGLIIGKDIIKQGYKTGRGSFKIRGEISTEQIKNGKERLIISSVPYQVNKSILNERIAELVRGKKIEGISDIRDESNREGIRVVIDLRRGVEPETIKRQLYKHTSIESSFGFNTLAIVDKKPKTCNLKDFLESFLLFREKVIVKRTKYDLKKAEDRAHILIGLSVSIDNLDKIIKVIRNSKTPEEAKNKL

SEQ ID NO: 183628 - protein, 64 aa, Unknown
  Bacterial polypetide isolated from the Sargasso Sea
MNKNSNYQADSIKVLKGLEAVRKRPGMYIGDTDDGTGLHHMVYEVVDNSIDEALAGYCKNIRIE

SEQ ID NO: 183629 - protein, 265 aa, Unknown
  Bacterial polypetide isolated from the Sargasso Sea
TTDLTNPTISISDEMRKSYLDYAMSVIVSRALPDVRDGLKPVHRRILYAMMEGSYDWSKPHRKSARIVGDVMGNYHPHGDSSIYEAMVRMAQDFSMRLPLVDGQGNFGSVDGDPAAAMRYTESRLARAAESLLRDIDKDTVEFTANYDETQLEPTVLPAEYPNLLVNGANGIAVGMATNIPPHNPGEVIAACEAFIKDPEISTEALTGIIPGPDFPTGGLIMGRQGIREAYATGRGSIIMRAKAEVQTNAKDREAIIIHEIPYPV

SEQ ID NO: 183630 - protein, 291 aa, Unknown
  Bacterial polypetide isolated from the Sargasso Sea
WRNHIEGLKTVLTRTFNAIAKKRGKRKEVEKNLSGENIREGLTVVLSVKVPEPEFEGQTKTKLGNTEVRGIVDSLIGESLTKYMEFNPSVFDLILEKAIQSFNAAEAAKRARDLVRRKSVLESSTLPGKLADCSSRDPSGAEIYIVEGDSAGGSAKQGRDRNFQAILPLRGKILNIEKTDDTKIYKNTEIQSLITALGLGIKGEEFDVNSLRYHRVVIMTDADVDGAHIRTLLLTFFYRYQRELVERGFIYIACPPLYKVERGKIINIVITKFSLRNHRRFWRKSYYTFQD

SEQ ID NO: 183631 - protein, 282 aa, Unknown
  Bacterial polypetide isolated from the Sargasso Sea
VIKIVLEKVLQAAIARDLARKARDSVRRKGSLELSGLPGKLADCQISNMEGTELFIVEGDSAGGSAKQGRKREFQAVLPLRGKILNTYVNENKKKNGSNNGHETKALSKMMSSNEIVTLINALGTGSTTFNIEDLRYEKIIIMTDADVDGSHIRTLLLTFFNNKPFNELIEKGHLYLAQPPLFKVTKGSKSTYIKNEKELEEYIIKTKDGAKKKLKKSELEKFINSERQKLNIQRFKGLGEMNPEELWQTTLNPENRTLLRVEYSKGTKEKSKEDQNIIKIL

SEQ ID NO: 183632 - protein, 316 aa, Unknown
  Bacterial polypetide isolated from the Sargasso Sea
NNDKNDKIKIPSRLYKSLKGLEAVRKRPGMYIGDTDDGTGLHHMVYEVVDNSIDEALAGYCKNIDIFINSNGTVTVKDDGRGIPVDLHKGEKKSAAEVIMTQLHSGGKFDHDSYKVSGGLHGVGVSVVNALSESLKLEISRDGKKYIIEFKNGDVKSNLKAVGNSKETGTQITFLPSKEIFSSIKFNPSIIQKRMRELAFLNKGIKISIHDLTSKKSKINVFKFEGGILEFVSFLDEKREKLNNKNGNLLFKKPILIEGKKDDIEIECALQWNAMYGEDVYPYTNNVYQKDGGTHLLGFRSALTRVVNKYASELNL

SEQ ID NO: 183633 - protein, 272 aa, Unknown
  Bacterial polypetide isolated from the Sargasso Sea
MTNKNTYQADSIKVLKGLEAVRKRPGMYIGDTDDGTGLHHMVYEVVDNSIDEALGGYCKNINVKINSDGTITVSDDGRGIPVDIHKTEKKSAAEVIMTQLHAGGKFDHDSYKVSGGLHGVGVSVVNALSEKLKLEINRDEKKYFIEFQDGEAKAPLKVIGKSKQTGTEITFLPSKQIFSSIKFSADTLIKRMRELAFLNKGIKIIFTDASQKKEKVSQFKYDGGVIEFVDFLDEKREKLQNKNGNDLFKKPIYIEGKKDNIEIECSLKWNAG

SEQ ID NO: 183634 - protein, 277 aa, Unknown
  Bacterial polypetide isolated from the Sargasso Sea
VSVVNALSEKLELQINIDGKIYFMDFAHGSVKTSLKELSKSELSDQGDFNTGTKITFLPSSKTFTNIDFNFNTIENRLRELAFLNTGVKINLIDKRSSKEKKIEFKYEGGINEYVKFLNQSKTAIHTQPIYFSSQKNNVTVECSLQWTDSYHENTLCFTNNITQRDGGTHLAGFRGALTRSIVSYINSKAKNNVNITGDDAREGLTCIISVKLPDPKFSSQTKDKLVSSEVRPVVESVSLSKLEQWMEENPSEIKKIIDKIIEASNAREAARKAREL

SEQ ID NO: 183635 - protein, 266 aa, Unknown
  Bacterial polypetide isolated from the Sargasso Sea
DKLVSSEVKGVVESIVNKHLKEFLMENPVEAKIIIQKILDSARAREAARKAREMTRKGALSMTGLPGKLADCQEKDAKLCEIFLVEGDSAGGSAKQGRDRKTQAILPLKGKILNVQKAQKDKIFSSTEIATLITALGCGIGEDEFDIDKLRYHKIIIMTDADVDGSHIRTLLLTFFFNELLELVQQGHVYIAQPPLYKVKRGKKEEYVNSDEELNNLIINNAITGLRLTQPGKKKGLEGDGLFNILMQQIQTSTLIDKLAIQIGDS

SEQ ID NO: 183636 - protein, 281 aa, Unknown
  Bacterial polypetide isolated from the Sargasso Sea
NFDTKELKTSYLDYAMSVIVSRAIPDLRDGLKPVHRRILYAMHETGNTHEKSYRKSARPVGDVMGKYHPHGDSAIYDALVRMAQPFSMSLPLLDGQGNFGSMDGDNPAAMRYTEVRMDKPAAFLLSDIDKDTVDFQDNYDGKDREPSVLPARFPNMLVNGAGGIAVGMATNIPPHNLGEVVDATLALIQTSDMSSEDLIQYVPGPDFPTGGMMLGRSGARKAYLEGRGSVIIRAKTKIEELRKDRYAIIIEEIPYQVNKASMIEKIAEQVRDKKVEGISHV

SEQ ID NO: 183637 - protein, 314 aa, Unknown
  Bacterial polypetide isolated from the Sargasso Sea
NPEESGVAPIDINDEMKKSYLEYAMSVIVGRALPDVRDGLKPVHRRILYSMHDSGFTAGRAYKKCARIVGDVLGRYHPHGDTAVYDSLVRMAQDFSLRYPLIDGQGNYGSVDGDNAAAMRYTEARMSKISMTLLEDIDKDTVDFSPNFDESLEEPSVLPARIPGLLLNGTSGIAVGMATNIPPHNLSELVDGICALVDNPDIDIDDLMMHIKGPDFPTAGIICGDEGIRKAYATGKGSVVIRAKVSFEETKKGREAIIVEELPYQVNKANLIVKIAELVGDKKIPGISDLRDESDRKGMRIYIELKRDASRDIV

SEQ ID NO: 183638 - protein, 253 aa, Unknown
  Bacterial polypetide isolated from the Sargasso Sea
FLNAGLKITIVDQRGSEAHTSEHLYEGGLSEYVSQLNERREVLHEEVIKIKGEKEIEKGDVEVEVALQWSDAFSESIRCYTNIIRNKDGGAHMSGLRTALTSSVNLYAKKKNLLKGDALSGDDVREGLAAVVSVKHPDPSFSSQTKDKLVSSEVTGIVQTIVYDKLGEFFEENPSVARQIVEKALLASKAREAARKARELTRRKGVLEGGGLPGKLADCQSRDPSECEVYLVEGDSAGGSAKTGRDRRIQAIL

SEQ ID NO: 183639 - protein, 279 aa, Unknown
  Bacterial polypetide isolated from the Sargasso Sea
DVQCSLKWNAGYNEDVYLYTNNIYQKDGGTHLLGFRSALTRVINKYASEQNLLKKNKFTLSGDDVKEGLTCVLSVKIPDPKFSSQTKDKLVSSEVRNIVETIVSEKLSIWFDQNPSISKVILTKIIQAAVARDVARKARENVRRKGALELTGLPGKLADCQNSKQEGTELFIVEGDSAGGSAKQGRNRENQAVLPLRGKILNTFTEINGSKNNGKSNDLRTKTLSKMISSNEIVTLINALGLDPKDEEIDIKDLRYGKIIIMTDADVDGSHIRALLLTF

SEQ ID NO: 183640 - protein, 161 aa, Unknown
  Bacterial polypetide isolated from the Sargasso Sea
MSKQLQSNQKNDYSASSIKVLKGLDAVRKRPGMYIGDTDDGTGLHHMVFEVLDNSIDEALGGYCKNILVTMNPNNTITVEDDGRGIPVDLHKGERMSAAEVIMTQLHAGGKFDHNSYKVSGGLHGVGVSVVNALSEKLELKIFRDGVEYFIEFKNGKSLKP

SEQ ID NO: 183641 - protein, 134 aa, Unknown
  Bacterial polypetide isolated from the Sargasso Sea
MSNNYGADKISVLKGLEAVRKRPAMYIGDVGKRGYHHLVSEVVDNSIDEALAGFCSSIIVTIKNDGFISIEDNGRGIPVEIHKTEGKPALEVVMTVLHAGGKFDKNTYKVSGGLHGVGVSVVNALSESLIAEVH

SEQ ID NO: 183642 - protein, 75 aa, Unknown
  Bacterial polypetide isolated from the Sargasso Sea
MSSSYLSYAMSVIVSRALPDVRDGLKPVHRRILYAMYKGGYDWSKQFRKSARIVGDVIGKYHPHGDQSVYDALVR

SEQ ID NO: 183643 - protein, 254 aa, Unknown
  Bacterial polypetide isolated from the Sargasso Sea
EGQTKTKLGNTEVRGIVDSLIGEALTKYMEFNPGILDLILEKAIQSFNAAEAARRARELVRRKSVLESSTLPGKLADCSSRDPSESEIYIVEGDSAGGSAKQGRDRNFQAILPLRGKILNIEKTDDTKIYKNTEIQSLITALGLGIKGEEFDESSLRYHRVVIMTDADVDGAHIRTLLLTFFYRYQRELVEKGFIYIACPPLYKVERGKNHNYCYNENQLKDTIQGFGENANYNIQRFKGLGEMMPKQLWDTTM

SEQ ID NO: 183644 - protein, 303 aa, Unknown
  Bacterial polypetide isolated from the Sargasso Sea
MKKLSIWFDQNPSISKIILAKIIQAAVARDVARKARESVRRKGSLELSGLPGKLADCQNSKQEGTELFIVEGDSAGGSAKQGRNREFQAVLPLRGKILNTFTELNGKNGKLSDYKTKSLSKMMSSNEIVTLINALGLDPKTEEIDIKDLRYGKIIIMTDADVDGSHIRALLLTFFNNKPFNKLIENGNIYLAQPPLFKINKGSKGIYIKDEVDLEKYILSNSKELKRQNKKSKGYQNILSEEKSKLSIQRFKGLGEMNPIELWNTTLNPETRNLLQVQYSKNQKKDQDLIYTLMGNDVSLRKD

SEQ ID NO: 183645 - protein, 241 aa, Unknown
  Bacterial polypetide isolated from the Sargasso Sea
PGKLADCSARDTNETEIFIVEGDSAGGSAKSARNRSTQAILPMRGKILNVASASSDKLSQNQELSDLLQALGVKAKNQFDLADLRYGKVIIMTDADVDGAHIAALLMTFFYQEMPQLIEAGRLFIAQPPLYRMMQGSKTFYAQDDKHREHLLLTEFNQGAKVEISRFKGLGEMPPSQLKETTMNPSTRRLLRVNLPKRDLDGADKRREADRLVTTLMGKKPELRFGYIREHSEDVLSQLDI

SEQ ID NO: 183646 - protein, 183 aa, Unknown
  Bacterial polypetide isolated from the Sargasso Sea
MTDKISEINLEDEMKKSYLDYAMSVIIGRALPDVRDGLKPVHRRVLYAMKVLGNDHTKPYKKSARIVGDVIGKYHPHGDSAVYETIVRMAQDFSLRYTLVDGQGNFGSIDGDRAAAMRYTEVRMEKITQELLADIDKDTVDFIPNYDESEEEPAVLPTRLPNLLINGSAGIAVGMATNIPPHN

SEQ ID NO: 183647 - protein, 267 aa, Unknown
  Bacterial polypetide isolated from the Sargasso Sea
MIYEVLDNSIDEALAGFCDDISVFLNPDGTISVEDNGRGIPTDIHKSEGVPAAQLIMTELHAGGKFDQNSYKVSGGLHGVGVSVVNALSEKLELEINRDGFVYYMEFSNGSVTKNLKQIGKSKLDDKGKPFTGTKITFLPASTTFTNIEFNFSTIEKRLRELAFLNTGIKINLIDKRSSKEKIIEFKYDGGINEYVKYLNQSKSPIHNNPIYFTSQKNDVTVECSLQWTDAYHENTLCFTNNITQRDGGTHLAGFRGALTRSIVNYI

SEQ ID NO: 183648 - protein, 245 aa, Unknown
  Bacterial polypetide isolated from the Sargasso Sea
MTNNKTKNSEQNYKADSIKVLKGLDAVRKRPGMYIGDTDDGSGLHHMVFEVVDNSIDEALVGFCKNISVIMHSDNSITVEDDGRGIPVDIHKGEKKSAAEVIMTQLHAGGKFDQNSYKVSGGLHGVGVSVVNALSERLKLTIFRDQKEYFISFSNGKADKPIKFVKKTKKSGTKINFIPSKDIFSSIKFSAATLQKKMRELAFLNRGLQINLLDETKSKSKIYENKYDGGISEFVTYIDNNKSIL

SEQ ID NO: 183649 - protein, 278 aa, Unknown
  Bacterial polypetide isolated from the Sargasso Sea
MKNYSIWFDQNPSISKIILAKVIQAAMARDVARKARENVRRKGALELSGLPGKLADCQIGKQDGTELFIVEGDSAGGSAKQGRNRSNQAVLPLRGKILNTYVEDLKVKKNSNGNGSDYRTKALSKMISSNEIVTLINALGLDPKAQEIDLKDLRYGKIIIMTDADVDGSHIRALLLTFFNNKPFNKLIENGHIYLAQPPLFKINKGTKGIYIKDEQELEEYIVNNNKELKKIKKKSKEYLIAIDSEKSKLNIQRFKGLGEMNPEELWNTTLDPETRNL

SEQ ID NO: 183650 - protein, 149 aa, Unknown
  Bacterial polypetide isolated from the Sargasso Sea
MSSSYLSYAMSVIVSRALPDIRDGLKPVHRRILYAMYKGGYDWSKQFRKSARIVGDVIGKYHPHGDQSVYDALVRMVQDFSMSLPLVQGQGNFGSIDGDPAAAMRYTETRLSKVSQFLIDDIEKNTISFKSNYDETEKEPSVLPAQFPN

SEQ ID NO: 183651 - protein, 109 aa, Unknown
  Bacterial polypetide isolated from the Sargasso Sea
MAEEHIYDSSSIKVLKGLDAVRKRPGMYIGDTDDGSGLHHMVFEVVDNSIDEALAGHCTDVWVTIHTDNSVSVRDNGRGIPTDMHEEGVSAAEVIMTVLHAGGKFDDNS

SEQ ID NO: 183652 - protein, 174 aa, Unknown
  Bacterial polypetide isolated from the Sargasso Sea
MNTFVNGKSNGNDHATKALSKMMSSNEIVTLINALGTGSKDFNIENLRYDKIVIMTDADVDGSHIRTLLLTFFNNYPFNQLIENGHIYLAQPPLFKVTKSNKSVYIKDEKTLEEYILKSSDKADKKIKKGSSEYNKFMKEQREKLSIQRFKGLGEMNPEELWETTLNPENRTML

SEQ ID NO: 183653 - protein, 163 aa, Unknown
  Bacterial polypetide isolated from the Sargasso Sea
MTNPTISISDEMRKSYLDYAMSVIVSRALPDVRDGLKPVHRRILYAMMEGNYDWSKPPRKSARVVGDVMGNYHPHGDSSIYEAMVRMAQDFSMRLPLVDGQGNFGSVDGDPAAAMRYTESRLARTAESLLRDIDKDTVEFTANYDETQLEPTVLPAEYPNLLG

SEQ ID NO: 183654 - protein, 316 aa, Unknown
  Bacterial polypetide isolated from the Sargasso Sea
MTKKNTYQADSIKVLKGLEAVRKRPGMYIGDTDDGTGLHHMVYEVVDNSIDEALAGYCKNIYVKINSDGTITVNDDGRGIPVDIHKVEKKSAAEVIMTQLHAGGKFDHDSYKVSGGLHGVGVSVVNALSQKLQLEIFRDGKKHYIEFQNGEAKAPLKVVGKVKQTGTQITFLPSKEIFSSTKFSANILIKRMRELAFLNKGIKIIFTDASQKKEKISEFKFDGGVIEFVDFLDEKREKLQNKNGNDLFRKPIYIEGKKNNIELECSLKWNAGYSEDIFPYTNNIYQKDGGTHLLGFRSALTRVVNKYANENNLLKK

SEQ ID NO: 183655 - protein, 77 aa, Unknown
  Bacterial polypetide isolated from the Sargasso Sea
MPKSKKNTNTKNYDSSNIKVLKGLDAVRKRPGMYIGDTDDGTGLHHMVFEVVDNSVDEALAGFCTHIEVIIHEDDSI

SEQ ID NO: 183656 - protein, 267 aa, Unknown
  Bacterial polypetide isolated from the Sargasso Sea
YEVVDNSIDEALAGHCKNIKVTINTDGSVTVEDDGRGIPVDLHKGEKKSAAEVIMTQLHAGGKFDHDSYKVSGGLHGVGVSVVNALSESLTLKIYRDKKEYFIEFEDGKALAPLKVKGKTNKTGTLINFLPSRVVFSDTKFSSSTLQKRMRELAFLNKGLSINLLDKSGKKDKEYKNKYEGGIQEFVDFLDKNKQTLVNKNDLSLFKKPIYISGSKDNVEVECALKWNAAYSEEMLPFANNIHQKDGGTHLLGFRSALTRVVNKYAS

SEQ ID NO: 183657 - protein, 240 aa, Unknown
  Bacterial polypetide isolated from the Sargasso Sea
FRKSARIVGDVIGKYHPHGDQSVYDALVRMVQDFSMSLPLVDGQGNFGSIDGDPPAAMRYTETRLSKVSQFLIDDIEKNTIEFKSNYDETEKEPSVLPAQYPNLLVNGAGGIAVGMATSIPPHNLGEVIDGTLALIENKDITVSQLMKFIPGPDFPTGGVIIGKDMIKQGYKNGRGSFKVRGQISVEQGKNGRERLVITSIPYQVNKSVLNERIAQLVREKKIEGIRDIRDESNREGIRV

SEQ ID NO: 183658 - protein, 280 aa, Unknown
  Bacterial polypetide isolated from the Sargasso Sea
ALTRSLNAHATKYNLMKSEKFTLSGEDTREGLTAVISTKVPEPQFEGQTKQKLGNSEVRGVVESLVSEKLNEFFEENPAVVKKILTKAIEAARAREAARKARELVRRKGLLEGGGLPGKLLDCSSNEKDETEVFLVEGDSAGGSAAQGRNREFQAILPLWGKMLNVEKARIDRVLTNDKLQPMILALGAGVGEDFDIEKLRYGKIIVMADADVDGSHIRCLLLTFFFRYMRHMIDDGRVYIAQPPLFLVKKGKDENYAFNEDERDEFLTNYGEEAKGVMV

SEQ ID NO: 183659 - protein, 269 aa, Unknown
  Bacterial polypetide isolated from the Sargasso Sea
MTSEENTNEDLSIKNENILNHTLNKEMKTSYINYAMSVIIGRALPDVRDGLKPVHRRVLYGMYEGGHTSDRKYSKSARSVGEVMGKYHPHGDLSIYDTMVRMAQEFSLRYPLVDGQGNFGSIDGDPPAAMRYTESRLDKISKHMLEDIEKKTVDFQPNFDDSEMEPTVLPARLPNLLLNGSDGIAVGMATRMPPHNLMEVAGAVRMHVDHILQEGAESKEIPNIPIEEYMSHIKGPDFPTGATIHGIDGILDMYSTGKGRFHVRSKCDV

SEQ ID NO: 183660 - protein, 199 aa, Unknown
  Bacterial polypetide isolated from the Sargasso Sea
MMSSNEIVTLINALGTGSKDFSLENLRYDKIIIMTDADVDGSHIRTLLLTFFNNSPFNSLIENGHLYLAQPPLFKVTKGSKSAYIKDEKSLEEYIIKNSDNNFKRNKKNKKELQSLIDEYKQNFTIQRFKGLGEMNPEELWDTTLNPDNRTLLKVQYSKGTKEKSKEDQKIIQILMGDEVAPRKDFITSKALDVTNLDI

SEQ ID NO: 183661 - protein, 113 aa, Unknown
  Bacterial polypetide isolated from the Sargasso Sea
MKNSQNTITNKNYRADSIKVLKGLDAVRKRPGMYIGDTDDGSGLHHMVFEVLDNSIDEAIVGFCKNITVTMHKNNSVTVEDDGRGIPVDTHKGEKKSAAEVIMTQLHAGGKFD

SEQ ID NO: 183662 - protein, 233 aa, Unknown
  Bacterial polypetide isolated from the Sargasso Sea
MSSSYLSYAMSVIVSRALPDVRDGLKPVHRRILYAMYKGGYDWSKQFRKSARIVGDVIGKYHPHGDQSVYDALVRMVQDFSMSLPLVDGQGNFGSIDGDPAAAMRYTETRLSKVSQFLIDDIEKNTIQFKNNYDETEKEPTVLPAQFPNLLVNGAGGIAVGMATSIPPHNLGEIINGTLALIENKDIKIKELMKHIPGPDFPTGGVIIGKDIIKQGYNKGRGSFKIRGEISIE

SEQ ID NO: 183663 - protein, 223 aa, Unknown
  Bacterial polypetide isolated from the Sargasso Sea
KILNTYVNENKKNNGANGSHENKTLSKMMSSNEIVTLINALGTGSTNFNIEDLRYEKIIIMTDADVDGSHIRTLLLTFFNNKPFNELIEKGHLYLAQPPLFKITKGGKTSYIKNEKDLEKYILKSLDNVKKLSKKELEKIIDEERQKLNIQRFKGLGEMNPEELWQTTLNPDNRVLLKVEYSKGTKEKSKEDQNIIKILMGDEVAPRKDFITEKALEVENLDI

SEQ ID NO: 183664 - protein, 195 aa, Unknown
  Bacterial polypetide isolated from the Sargasso Sea
MYIGDTDDGSGLHHMVFEVIDNAIDEALAGYCKNIYVVMNKDNSVTVEDDGRGIPVDIHKSEKVSAAEVIMTQLHAGGKFDHDSYKVSGGLHGVGVSVVNALSEKLDLNIYRDGKEYSITFNNGNAIKKLKEIGKTKKRGSRINFLPSKQIFSSTKFSASILEKRIRELAFLNKGICITLSDKTSKKDSEFVHKY

SEQ ID NO: 183665 - protein, 243 aa, Unknown
  Bacterial polypetide isolated from the Sargasso Sea
MTKINSNNYQADSIKVLKGLEAVRKRPGMYIGDTDDGTGLHHMVYEVVDNSIDEALAGYCKKIEISINDDNSVTVIDDGRGIPVDIHKGEKKSAAEVIMTQLHAGGKFDHNSYKVSGGLHGVGVSVVNALSERLKLTINRDNKKYYIEFKNGDAKTSLKQVGKSKSSGTEINFVPSKDIFSSIKFSFSILEKRMRELAFLNKGIKIVLSDLRQKKPKTLEFKFDGGITEFVQFIDEKKDSLKN

SEQ ID NO: 183666 - protein, 246 aa, Unknown
  Bacterial polypetide isolated from the Sargasso Sea
IEENPSEIKKVIDKIIEASNAREAARKARELTRRKTGLENTSLPGKLADCQEKNPELSELFIVEGDSAGGSAKQGRDRKNQAILPLRGKILNVERANDKQVLTSNEIGALITAIGAGVGNPTDDIDQNKLDGKFDVSKMRYHKIIIMTDADVDGSHIRTLLLTFFYRHMKPIIDESRLYIAQPPLYRLKKGNSTVYKKDDTDLEDYLIEEGLKNTIFENTQNSQIAGEELKQIIYLSKKTKNLIYP

SEQ ID NO: 183667 - protein, 241 aa, Unknown
  Bacterial polypetide isolated from the Sargasso Sea
MGDTDDGSGLHQMIYEVLDNSIDEALAGFCDKIEVILNADGTATVTDNGRGIPVDLHKTEKIPAAQLIMTELHAGGKFDQNSYKVSGGLHGVGVSVVNALSENLILEINREGKLYNIEFSNGIVTKELNVIGNSEKNNNKFLTGTKITFLPTTKIFKNINFNFKTIEKRLRELAFLNTGISIFLTDKRQAEDKKIHFRYEGGIKEYVKYLNEGKNLINSNPIFFHGEKNNISIECALQWTD

SEQ ID NO: 183668 - protein, 130 aa, Unknown
  Bacterial polypetide isolated from the Sargasso Sea
MEKEKLIPIKIEDEMKSAYIDYSMSVIVSRALPDVRDGLKPVHRRVLFGMNEMGVRSSSSYKKSARIVGDVMGKYHPHGDSSVYDTMVRMAQEWSLRYNLVDGQGNFGSVDGDSPAAMRYTEARSKRYQK

SEQ ID NO: 183669 - protein, 252 aa, Unknown
  Bacterial polypetide isolated from the Sargasso Sea
HKGEKKSAAEVIMTQLHAGGKFDHDSYKVSGGLHGVGVSVVNALSEKLDLTIDRDGKKYFIEFKDGNAVKPLKLIGKSKKNGTKIKFLPSKEVFSSTKFNFNTIQKRMRELAFLNKGIKITIVDSSVKKIKTVEFKFDGGLLEFIEYLDQDREKLKNKNGNDLFKKSIFIEGKKDNVEIECSLKWNAGYSEDVYPYTNNIFQKDGGTHILGFRSALTRVINKYANEQNLLKKNKITISGDDVKERSNMCIVN

SEQ ID NO: 183670 - protein, 301 aa, Unknown
  Bacterial polypetide isolated from the Sargasso Sea
GDVIGKYHPHGDQSVYDALVRMVQDFSMSLPLVDGQGNFGSIDGDPAAAMRYTETRLSKVSQFLIDDIDKETIEFKSNYDETEKEPSVLPAQYPNLLVNGAGGIAVGMATSIPPHNLGEVIDGTLALIGNKDIKLNELMKHIPGPDFPTGGIIIGKNIIKEGYKTGRGSFKIRGEIKIEQLKNGRERLVISSVPYQVNKSSLNERIAELVREKKIEGIRDIRDESNREGIRVAIDLRSNTEPETVKRQLFKFTSIESSFGFNTLAIVDNKPKTCNLKEFLENFLKFREDVVIKKTKYDLKK

SEQ ID NO: 183671 - protein, 88 aa, Unknown
  Bacterial polypetide isolated from the Sargasso Sea
KARELTRRKTALEITNLPGKLADCQEKDPSLSEIFIVEGDSAGGSAKQGRDRKFQAILPLRGKILNTWKSRTDKILRSTEIGTLITAL

SEQ ID NO: 183672 - protein, 274 aa, Unknown
  Bacterial polypetide isolated from the Sargasso Sea
GGKFDHNSYEVSGGLHGVGVSVVNALSEKLSLRIFRDKKEYFVEFKDGKALSPLKVKGKINKTGTFINFLPSREVFSDTKFNSSVLQKRMRELAFLNKGLCIILIDKTGKKDKEYKNKYEGGIQEFVEFLDKNKTSLVNKNDLSLFKKPIYISGSKDNVEVECSLKWNADYSEEMLPFANNIHQKDGGTHLLGFRSALTRVINKYAIDSNLLKKNKITLTGDDTREGLTGVLSIKIPDPKFSSQTKDKLVSSEVRFIVESIVNDKLSTWFDQNP

SEQ ID NO: 183673 - protein, 258 aa, Unknown
  Bacterial polypetide isolated from the Sargasso Sea
QNPSIVKSVLDKVLQAALARDLARKARDSVRRKGTLELSGLPGKLADCQISSMEGTELFIVEGDSAGGSAKQGRKREFQAVLPLRGKILNTYVNENKRVNGANGTNEMKALSKMMSSNEIVTLINALGTGSKDFDIENLRYEKIIIMTDADVDGSHIRTLLLTFFNNKPFNELIEKGHLYLAQPPLFKVTKGTKSTYIKNEKDLEKYILKSSENGAKKLKKSDLEKFLNDEKQKLNIQRFKGLGEMNPEELWQTTLNP

SEQ ID NO: 183674 - protein, 268 aa, Unknown
  Bacterial polypetide isolated from the Sargasso Sea
MYDIAKEIIPINISEEMKASYMDYAMSVIVGRALPDARDGLKPVHRRTLFAMDILNNDWNRSHKKSARIVGDVIGKYHPHGDSAVYETIVRMAQDFALRYPLIDGQGNFGSMDGDGAAAMRYTEIRMSKISRELMADLNKETVNFVENYDGTEFIPEVLPTKIPNLLINGSSGIAVGMATNMLPHNLTESINAAIAILESPEISTEDILKIIPAPDFPTGGIINGTQGVEEAAKTGRGKVILRAKTDIETDSKERSKIIVTEIPYQIN

SEQ ID NO: 183675 - protein, 278 aa, Unknown
  Bacterial polypetide isolated from the Sargasso Sea
MSSSYLSYAMSVIVSRALPDVRDGLKPVHRRIIYAMYKGGYDWSKSFRKSARIVGDVIGKYHPHGDQAVYDALVRLVQDFSMSLPLIEGQGNFGSIDGDPPAAMRYTETKLGRISQHLTEDLEKNTVEYRNNYDETEKEPTVLPSQFPNLLVNGAGGIAVGMATSIPPHNLGEVIDATIAMIENKDITISQIMKFLPGPDFPTGGVIIGKDIIKQGYNKGRGSFKIRGEIDFEEKKNGRSILLIKSIPYQINKSTLIEKIAQLAKDKKIEGISDIRDE

SEQ ID NO: 183676 - protein, 293 aa, Unknown
  Bacterial polypetide isolated from the Sargasso Sea
RDRKNQAILPLRGKILNVERANDKQVLTSNEIGTLITAIGAGVGNPTDDINQNKVEGKFDLTKMRYHKIIIMTDADVDGSHIRTLLLTFFYRHMKPIIDAGRLYIAQPPLYRIKKGNSTVYKKDENDLEEYLIEEGLKNTTLRNTQNDQIGGKQLKEIIYLSKKTKNLVIPLMRRIDNSDIIEHAAIVRALDLRNLQDKKIALEIAKYLQQRLNLISNISEKNWIVSHSNNSINLQRTIRGFTEKFVIDENFIVTPEAKALNEIRDDLMENFYRLKEQGSGIMKIKMKNIVYM

SEQ ID NO: 183677 - protein, 171 aa, Unknown
  Bacterial polypetide isolated from the Sargasso Sea
MAEERVESIALHQEMQRSYLEYAMSVIVGRALPDARDGLKPVQRRILYAMQELGLTPDRPYRKCARVVGDVLGKYHPHGDQAVYDALVRLVQTFASRHPLLDGHGNFGSVDDDPPAAMRYTETRLAPIAHQALLEEIGDDTVDFAPNFDGSQQEPTVLPAQLPFLLLNGCS

SEQ ID NO: 183678 - protein, 186 aa, Unknown
  Bacterial polypetide isolated from the Sargasso Sea
MTKNNSNNYQADSIKVLKGLEAVRKRPGMYIGDTDDGTGLHHMVYEVVDNSIDEALAGFCKKIEISINDDNSVTVIDDGRGIPVDIHKGEKKSAAEVIMTQLHAGGKFDHNSYKVSGGLHGVGVSVVNALSERLKLTINRDNKKFYIEFKDGDVKTSLKQVGKSKTSGTEINFVPSKEYFHPLNLV

SEQ ID NO: 183679 - protein, 245 aa, Unknown
  Bacterial polypetide isolated from the Sargasso Sea
KKNLHKNMIYILSEKYLSYAISTIISRSLPDVRDGLKPVHRRIIYSMYQLKLFNSSSYKKSARIVGDVMGKFHPHGDQAIYDSLVRMAQDFSTRIKLIDGQGNFGNIDGDNPAAMRYTEARLDSYTDYFFDGIQENSVNFKENYDGQNLEPEVLPSQLPNILINGAMGIAVGMATNIPPHNIKELVDCLILLIKDPKTNITKLLKILKGPDFPTGGEVILNQKEKKDIYSSGKGTFIINSKWLKE

SEQ ID NO: 183680 - protein, 294 aa, Unknown
  Bacterial polypetide isolated from the Sargasso Sea
NFDIDKINKRVQELSFLNAGVNILVEDKKTGKSKKFSNSGGLSSYVKFLKGRKQNISEIFQCEGEQDGLSVEIALQWNDAYSENVLCYTNNIPQKDGGTHLSGFRSSLTRVMKTFIRKEELNKKSPIELLGEDVREGLTAIVSVKIPDPKFSSQTKEKLVSSEVESVVSNVFNKNFNEYLLENPKEAMSILTKISEAALAREAARKAREMTRRKGVLEVAGLPGKLADCQEKDPALSEIYIVEGDSAGGSAKQGRNRQNQAILPLKGKILNVEKARLDKVLSSPRNRNACNSFR

SEQ ID NO: 183681 - protein, 121 aa, Unknown
  Bacterial polypetide isolated from the Sargasso Sea
MRGKILNTWKSRTDKILSSNEIGTLISALGTGIGNQEFDINKLRYHKVVIMTDADVDGSHIRTLLLTFFFKEMRELIINDNLYIARPPLYKVKRGKEELYLMDDDELYRALVNYGSKDITF

SEQ ID NO: 183682 - protein, 134 aa, Unknown
  Bacterial polypetide isolated from the Sargasso Sea
MSPDQQQKRYSAESIKVLEGLEAVRKRPAMYIGDVGKRGLHHLVYEVVDNSIDEALAGFCTRVIVTFNPDGSVTVEDNGRGIPVDMHKEEKKPALEVVMTVLHAGGKFDKGSYKVSGGLHGVGVSVVNALSEWL

SEQ ID NO: 183683 - protein, 197 aa, Unknown
  Bacterial polypetide isolated from the Sargasso Sea
MTSDIEKNKKEDNQIPPNKTGITSVSLENEMRKSYLDYAMSVIVARSVPDIRDGLKPVHRRILYSMNESNYVFNKPYRKSARIVGDVMGKYHPHGDAAIYDAMVRMAQDFSMRLELIDGQGNFGSMDGDPPAAMRYTEARLAKIANYLVDDLDKETVDFNANYDETAFEPVVLPAKYPNILINGAVGIAVGMATSIP

SEQ ID NO: 183684 - protein, 257 aa, Unknown
  Bacterial polypetide isolated from the Sargasso Sea
PVDVHKKEGVSAAQLIMTTLHSGGKFDDNSYKVSGGLHGVGVSVVNALSKKLTLEVHRDGGEYFQEYSEGKPKAKLKKLKKSDKTGTIITFHPSNKIFTSTEFDIEKIYKRIQELSFLNAGVSINVEDKRTGKSRKFKNNGGLSSYVTHLRGRKQIVSDIFECSAEENEVGVEIAMQWTDSYSENVLCYTNNIPQKDGGTHLAGFRGSLTRVLKSFIKKENAKKTPTDLLGEDVREGLIAIISVKVPDPKFSSQTKE

SEQ ID NO: 183685 - protein, 201 aa, Unknown
  Bacterial polypetide isolated from the Sargasso Sea
MSEDSSQKGNYSADNIQVLEGLEAVRKRPAMYIGDVGVKGLHHLVYEVVDNSIDEALAGHCDKITVIINEDNSISVSDNGRGIPTAIHSKENKSALEVVMTVLHAGGKFDKDTYKVSGGLHGVGVSCVNALSSHLKATVKREGKVFEQEYEIGKPQYDVRVVGESTDNGTEVTFLPDASIFEVKVYNFDTLAARMRELAFL

SEQ ID NO: 183686 - protein, 297 aa, Unknown
  Bacterial polypetide isolated from the Sargasso Sea
TFLPSEEIFSTTKFSSSVIQKRMRELAFLNKGIKLLVLDKTQKKDKVYEYKFDGGLSEFINHLNQKKEKLKNKNGNDLFRKPIYLEGNKNGIEIECSLEWNSTYSEDVNAYTNNIHQKDGGTHLLGFRSALTRVVNKYVSDNNVLKKNKLSISGDDIKEGLTAILSIKMPDPKFSSQTKDKLVSSEIRNIVETFVNEKLSMWFDQNPAVIKIVLLKIIQAAQARDVARKARESVRRKGALELTGLPGKLADCQNPKRDGTELFIVEGDSAGGSAKQGRNREFQAVLPLRGKILNTYV

SEQ ID NO: 183687 - protein, 266 aa, Unknown
  Bacterial polypetide isolated from the Sargasso Sea
MNSNYSSDSIKVLKGLEAVRKRPGMYIGDTDDGSGLHQMIYEVLDNSIDEALAGYCTDIEVILNADGTVTITDNGRGIPVDLHKTEKVPAAQLIMTELHAGGKFDQNSYKVSGGLHGVGVSVVNALSENLILEINRDGKIYNLEFSNGIVTKELNIIGTSKKVKDKYFTGTKITFLPTTDIFKDINFNFKIIEKRLRELAFLNTGINIDFIDRRYSEETKINFNYEGGIQEYVKYLNNEKNVINSKPISFLGNKNNISVECAFQWT

SEQ ID NO: 183688 - protein, 247 aa, Unknown
  Bacterial polypetide isolated from the Sargasso Sea
ILAHRLRELAFLNRGITISIRDNRSERFQEFKYDGGISSFIKHINENKNVLHEEPVYFSGKSEDVEIEVAFQYNDSYTERIYSFVNTINTIDGGTHLTGFKGALTRTLNNYMTSNNIANDSKENFSGEDVREGMAAVISTRVPEPQFESQKKIKLTNVEIKGKVETLVSEYLGAYLEENPSVSKKIVAKAIDAQRARLAAKKARELTRRKNVLEFSTLPGKLADCQESDPSLSELFLVEGDSAGGSA

SEQ ID NO: 183689 - protein, 285 aa, Unknown
  Bacterial polypetide isolated from the Sargasso Sea
QTLSLRIHKNGNIYEQDYAHGAPKKPLKKGAKTKRTGTTISFQPSKKTFSNTSFSYETLSKRLREMSFLNPGLTINLNDERTNKADSYCYEGGLKDFVRHLNKPQKPTHQSIAYINKKSKKDGDIEVEVAIQWNESYRENTFCFANTIRQRDGGTHLAGFRGALTRTINTYIDKEIPKNDTSVTGDDCREGMTAIISVKHPDPKFSSQTKDKLVSSEVKGVVESAVNKHLKEFLEENPVEAKIIVGKILDAARAREAARKAREMTRKKGALDIAGLPGKLADCQE

SEQ ID NO: 183690 - protein, 143 aa, Unknown
  Bacterial polypetide isolated from the Sargasso Sea
MPTKKKTSASKSSKYPSKQSKKVVKKDNTESYDSSNITVLKGLEAVKKRPGMYIGDTDDGTGLHHMVYEIVDNSIDEALAGHCDEITVRIISDDRVSVADNGRGIPTDMHEEGMSAAEVIMTKLHAGGKFDDNSYKVSGGLHG

SEQ ID NO: 183691 - protein, 306 aa, Unknown
  Bacterial polypetide isolated from the Sargasso Sea
KKKAGPSKKGRANNGLDKYDSSNIKILKGLEAVKKRPGMYIGDTDDGTGLHHMVYEVVDNSIDEALAGHCDKIEVTILSDDTVLVKDNGRGIPVDIHKEEGVSAAEVIMTKLHAGGKFDENSYKVSGGLHGVGVSVVNALSKDLHLVIHREGKKYEQRYSNGNPKAKLKQTGKTETTGTEVQITPSEETFSNIVFQYETLAAKLRDLSFLNAGLEIVLEDKRTGKKKTFLHKGGLAEFVEHLNSKRNTINSIFHFSVESKDGIAVEVALQWNDGYQENVNCYTNNIIQRDGGTHLVGFRTALTRSL

SEQ ID NO: 183692 - protein, 138 aa, Unknown
  Bacterial polypetide isolated from the Sargasso Sea
MEKNEIPKINRNIKPISMYDEMSSSYLSYAMSVIVSRALPDIRDGLKPVHRRIIYAMHKGGFDWSKQFRKSARIVGDVIGKYHPHGDQAVYDALVRMVQEFSMSLPLIDGQGNFGSIDGDPPAAMRYTETKLAKVSQF

SEQ ID NO: 183693 - protein, 221 aa, Unknown
  Bacterial polypetide isolated from the Sargasso Sea
DGDSPAAMRYTEVRMAKITDMILNDIEKETVSYSPNYDGTEQIPDVMPTRIPALLVNGSSGIAVGMATNVPPHNLTEVLNGCLLLLDNPKASIDEIIQIITGPDFPTGGTIDGRIGIYEGYKTGRGIIHVRAKTSVEEDKSGKSSLIINEIPYMVNKAKMLERIAEMVKDKKIDGISEIRDESDKDGLRVVIEVKRGESVEVLENNLFAQSQLEQSFGINF

SEQ ID NO: 183694 - protein, 301 aa, Unknown
  Bacterial polypetide isolated from the Sargasso Sea
MSLPLVEGQGNFGSIDGDPAAAMRYTETRLSKVSQFLIDDIEKNTIEFKSNYDETEKEPTVLPAQFPNLLVNGAGGIAVGMATSIPPHNLGEIINGTLALIDNKDIKIKELMKHIPGPDFPTGGIVIGKDIIKQGYNKGRGSFKIRGEILNETQKSGRDRLVINSIPYQVNKSVLNERIAQLVREKKIEGIRDIRDESNREGIRVSIDLRTGVEPETVKRQLYKNTQIESSFGFNTLAIVDGKPKTCNLKDFLENFLAFREDVVLKKTKFDLKKAEERAHILIGLSVSVENLDKVIKIIRG

SEQ ID NO: 183695 - protein, 94 aa, Unknown
  Bacterial polypetide isolated from the Sargasso Sea
MAKNNTTYQADSIKVLKGLEAVRKRPGMYIGDTDDGTGLHHMVYEVVDNSIDEALAGHCKNINVQINGDGSITVEDDGRGIPVDIHKDEKKSAA

SEQ ID NO: 183696 - protein, 275 aa, Unknown
  Bacterial polypetide isolated from the Sargasso Sea
DGGSHENALKNSVIRSIKIFGQKNQLSKINNININDIFDFSDSIISVFINNPSFEGQTKKRILMPSMQKKIEEELQNNFLLWLNANKKGSIKILNILIERSLLRTDLTKIKELERKSVKEKNRLPGKLVDCSSKQIEGTELFIVEGDSAGGSAKQARSRETQAILPLRGKILNVYSVSLSKVADNSEIQNLIQALGCGIAKNFQLSKLRYEKIIIMTDADVDGSHITTLLITFFYKYMRKIILNGSLYLAMPPLFKIVSKNSVFFAYDEKEKDNI

SEQ ID NO: 183697 - protein, 324 aa, Unknown
  Bacterial polypetide isolated from the Sargasso Sea
EGGTHLSGFRSALTRALNSYANKNDLIKTKKNEKFSLSGDDFREGLTVVISVKVQEPQFEGQTKTKLGNGEVKGLVDNVVYDGIQTFLEQNPKVGKRIIEKAAEAARARIAAKKARELVRKKSGLGSTTLPGKLADCSNKDPMQCELFLVEGDSAGGTAKQGRDRRTQAILPLRGKVINSEKAREDKLLANNEIQSMITALGCGFGEDEDDPNSFNPEKLRYHKIVIMTDADVDGSHIRTLLLTFFWRKMKSLVQGGYLYMAMPPLYKLKQGKKERYAYTDEERDNILRRLESENKTKIDIQRYKGVRRDERRNTLGNHMNAET

SEQ ID NO: 183698 - protein, 245 aa, Unknown
  Bacterial polypetide isolated from the Sargasso Sea
MSKSSNLKNTPSYGADSIKVLKGLDAVRKRPGMYIGDTDDGSGLHHMVFEVIDNSIDEALAGHCKNINVSINPDNTVTVDDDGRGIPVDMHKGEKMSAAEVIMTQLHAGGKFDHDSYKVSGGLHGVGVSVVNALSEELRLNIFRDGNEYEIKFKDGNTIKPLKKVGKTKKKGTRICFLPSKKIFSSIQFSTTTLEKRIRELAFLNKGIAIKLIDNTSKKPKEFLHKYDGGILEFVKHINNKKPIL

SEQ ID NO: 183699 - protein, 267 aa, Unknown
  Bacterial polypetide isolated from the Sargasso Sea
LEFVDHLDEKREKLKNKSGNDLFKKPIYIEGKKQNIEIECSLKWNASYSDDVYPYTNNIFQKDGGTHILGFRSALTRVINKYATENNLIKKNKVSISGDDIKEGLTVVLSLKIPDPKFSSQTKDKLVSSEVRLIVENIINEKLSIWFDQNPSIAKIILAKIIQAAVARDVARKARENVRRKGALELTGLPGKLADCQISKQEGTELFIVEGDSAGGSAKQGRNRENQAVLPLRGKILNTYVDENGTKRNGNKNEYRTKTLSKMISSN

SEQ ID NO: 183700 - protein, 270 aa, Unknown
  Bacterial polypetide isolated from the Sargasso Sea
GTHLSGFRTALTRVVNSFAKKYDLVKDKKSNFSGADLKEGLTAIISVKLRDPQFEGQTKTKLGNSEVKGIVDSLVDKGLADFIETNPKIGKLIVNKALMAQRVREAARKAQDLVRRKSSLESTTLPGKLADCSDRNPENCEVYIVEGDSAGGSAKQGRDRNFQAILPLRGKVLNVEKARLDKILANEEIRTLITAIGPNAVSGLSEESRVEVKNGDEDDLGDEDPRKILEKLRYHKIVIMTDADVDGAHIRTLLLTFFFRYARDIISVGG

SEQ ID NO: 183701 - protein, 291 aa, Unknown
  Bacterial polypetide isolated from the Sargasso Sea
LDGQGNFGSMDGDRAAAMRYTEVRMAKIASFLLEDIEKETVDFRPNYDETESEPSVLPAKYPNLLVNGAGGIAVGMATNILPHNLGEVIDASIAYLKNTDVTFEEINQIIKGPDFPTGGKIIGIKGIKDSQSSGRGSIIVQAKSNIEEFKTDREAIVFTEVPYQVNKSSLLEKIAELVRDKKIDGISDLRDESDRQGVRVVVELKKGVISQVVLNKLYKFTALQSSYGVNSLALVNGKPKLMNIKEFIHHFIEFRKEIIRNRTRHDLGKARDRAHVLIGLAVAVANVDQII

SEQ ID NO: 183702 - protein, 282 aa, Unknown
  Bacterial polypetide isolated from the Sargasso Sea
MTDYFAENPSDSQLIISKCLQAFQAREAAKKARDLTRRKGILEGGGLPGKLADCQSKDPAISEIFIVEGDSAGGTAKQGRDRATQAILPLRGKILNVEKSRIDKILANTEVMALITAMGCSITGVEGEDEEFEIEKARYHKLIIMTDADVDGAHIRTLLLTFFYRHMQGLIDAGYVYVAQPPLYKVTKGKKLEYAYDDVQLERLMSEFGSGYSISRYKGLGEMNAQQLWDTTMDPNQRTLLQVTIEDAEAADKAFVELMGDDVQKRREFIEANATLVANLDI

SEQ ID NO: 183703 - protein, 235 aa, Unknown
  Bacterial polypetide isolated from the Sargasso Sea
GKLVDCSSKKIQGTELFIVEGDSAGGSAKQARNRELQAILPLRGKILNVFSVSLSKIADNNEIQNLIHSLGCGVGKNFELSKLRYEKIILMTDADVDGSHIATLLITFIYKYMRPIIDNNRLFLAMPPLFKIQYKDKNFYAYDEEEKDKIIKKEFGKNISPALSRYKGLGEMPANQLKSTTMDPENRKLLNININLGKKELKETENLFESLMGKKAEYRFKFIQENANFTEQIDI

SEQ ID NO: 183704 - protein, 315 aa, Unknown
  Bacterial polypetide isolated from the Sargasso Sea
SDSEPFGHGSSGIAVGMATNIPPHNLNEVINAAIALLDNPDAEIDDLMEYIQGPDFPTGAIINGRAGIIKAYKEGRGKIYVRAKAQVLSDKASGRETIIVSEIPYQLNKSKLIEKIAELVKDKKIEGISELRDESDKDGLRIVIELRKGELGEVVLNNLYAQTQMQSVFGINIVALVDGEPRLLNLKEVLDAFVRHRREVVSRRTKYLLRKAREKGHILEGLAVALANIDEVIELIKKSPTSAEAKEGLLNRSWESDSVLKMLGESGSDACRPDGLGDNYGLKGNQYFLTPEQAQAILDLRLHRLTGMEQEKLFM

SEQ ID NO: 183705 - protein, 271 aa, Unknown
  Bacterial polypetide isolated from the Sargasso Sea
DESLAGHCDLIQVKLLKDGSVTISDNGRGIPVDIHPEEGVSAAEVIMTQLHAGGKFDNNSYKVSGGLHGVGISVVNALSETLVLTIYRNEKIYEINFKNGVATDRLRIVGEENQKTGTEINFKPSKVTFTKCNFDYQTLEHRIRELAFLNSGVHIDLIDQRETDEKKVSFFYEGGLKAYIEYLNRSRNAIHEVIATTHEKEGITVDISMEWTDGYHETTLCFTNNIPQRDGGTHLAGFRAALTRVINSYSINSGIAKKEKLQLSGEDCREG

SEQ ID NO: 183706 - protein, 242 aa, Unknown
  Bacterial polypetide isolated from the Sargasso Sea
MNSEYSSDSIKVLKGLEAVRKRPGMYIGDTDDGSGLHQMIYEVLDNSIDEALAGFCDKIEVILNTDGTATITDNGRGIPVDLHKIEKIPAAQLIMTELHAGGKFDQNSYKVSGGLHGVGVSVVNALSESLILEINRDGKVYNIEFENGIVTKELNIIGDSNKINNKYFTGTKITFLPTSKIFKDINFNFKVIEKRLRELAFLNTGISIFLSDKRQSEEKNINFKYDGGIKEYVKYLNEGKNV

SEQ ID NO: 183707 - protein, 107 aa, Unknown
  Bacterial polypetide isolated from the Sargasso Sea
MDKSQTEIKNNIKPIKMYDEMSSSYLSYAMSVIVSRALPDIRDGLKPVHRRIIYAMHKGGFDWSKQYRKSARIVGDVIGKYHPHGDQAVYDALVRMVQDFSMSLPLI

SEQ ID NO: 183708 - protein, 166 aa, Unknown
  Bacterial polypetide isolated from the Sargasso Sea
MDLGRDNILDKQLVKELEESYLNYSMSVIMSRALPDARDGLKPVHRRILFSMSEMSAMWNRPYKKSARVVGEVLGKYHPHGDSSIYDALVRMAQEFSMRHELVQGQGNFGSVDGDRAAAMRYTESRMSRIGSELLRDIEKETIPWTTNFDETLKETAVLPAVYPTF

SEQ ID NO: 183709 - protein, 151 aa, Unknown
  Bacterial polypetide isolated from the Sargasso Sea
RYHKIVIMTDADVDGSHIRTLLLTFFWRKMKSLVQGGYLYMAMPPLYKLKQGKKERYAYTDEERDNILRRLESENKTKIDIQRYKGLGEMNAEQLWETTMNAETRTLIQVTVDHIMEEETNVRFRELMGSEVEHRRKFITERAKFATNIDI

SEQ ID NO: 183710 - protein, 205 aa, Unknown
  Bacterial polypetide isolated from the Sargasso Sea
STKALSKMMSSSEIVTLINALGTGSKDFNIENLRYDKIVIMTDADVDGSHIRTLLLTFFNNYPFNQLIENGHLYLAQPPLFKVTKANKSTYIKDDNALEDYILNLSENKNKLKKGTAEFKKFIVDQKEKLSIQRFKGLGEMNPEELWNTTLNPENRTMLRVQYSKGTKDKSKDDQKMIEVLMGDEVAPRKDFITNNALEVVNLDI

SEQ ID NO: 183711 - protein, 259 aa, Unknown
  Bacterial polypetide isolated from the Sargasso Sea
EGTELFIVEGDSAGGSAKQGRNRLNQAVLPLRGKILNTYVEDLTIKKNGNGNGSDKRTKALSKMISSNEIVTLINALGLDPKAEEIDLKDLRYGKIIIMTDADVDGSHIRALLLTFFNNEPFNKLIENGHIYLAQPPLFKINKGNKGIYIKDEKELEDYILNSNKEIKKIKKGTKEFSKALDLEKSKMNIQRFKGLGEMNPEELWSTTLDPETRNLLQVQYSKDLKKDQSLIHTLMGNDVALRKDFIVSNAINVQNLDI

SEQ ID NO: 183712 - protein, 274 aa, Unknown
  Bacterial polypetide isolated from the Sargasso Sea
FTNNIPQRDGGTHLAGFRAALTRVINNYSINSGIAKKEKIQLSGEDCREGLTTILSLKIPDPKFSSQTKDKLVSSEVRPVVEQLVSESLNQWFDEHPTEAKKIVAKAYEAASAREAAKRARELTRRKGVMDIASLPGKLADCQEKDPEKSEIFLVEGDSAGGSAKQGRDRSNQAILPLRGKILNVERARIDKMLSSAEIGTLITAIGAGVGNSEIDVEKARYHKIIIMTDADVDGSHIRTLLLTFFFRHMRPLVDAGFLYIAQPPLFRAKQGKS

SEQ ID NO: 183713 - protein, 295 aa, Unknown
  Bacterial polypetide isolated from the Sargasso Sea
HMLQCFVLHRREVVTRRTVYDLRKARDRAHILEGLAIALANIDEIIDLIKNSSSPADAKQGLIARGWQLGDVSAMLERAGENAARPEWLEAHFGIRDGEYFLTEQQAQAILDLRLHKLTGLEHEKILDEYKELLLLIAELLHILGSPERLMEVICEELEAAKAQYGDARRTEIQDNAMDINMEDLITEEDVVVTLSHLGYAKYQALSDYEAQRRGGRGKAATTVKDEDFVDQLLIASTHDTILCFSNRGRLYWMKVYQLPLASRQARGKPIVNLLPLEENERITAILPVREYEEG

SEQ ID NO: 183714 - protein, 136 aa, Unknown
  Bacterial polypetide isolated from the Sargasso Sea
MEKNTVTNKTFKPIFVQDEMSSSYLSYAMSVIVSRALPDVRDGLKPVHRRIIYAMYKGGYDWSKPFRKSARIVGDVIGKYHPHGDQSVYDALVRLVQDFSMSVPLISGQGNFGSIDGDPPAAMRYTETKLGKIAQF

SEQ ID NO: 183715 - protein, 104 aa, Unknown
  Bacterial polypetide isolated from the Sargasso Sea
MSKKSELNTSQSYGADSIKVLKGLDAVRKRPGMYIGDTDDGSGLHHMVFEVIDNSIDEALAGFCKSIIVSINSDNTVTIEDDGRGIPVDTHKGEKISAAEVIMT

SEQ ID NO: 183716 - protein, 261 aa, Unknown
  Bacterial polypetide isolated from the Sargasso Sea
AKIIQAALARDVARKARENVRRKGALELSGLPGKLADCQIGKQEGTELFIVEGDSAGGSAKQGRDRSNQAVLPLRGKILNTYVEDIQMKKNGNKDGTEQRTKALSKMISSNEIVTLINALGLDPKAQEIDLKDLRYGKIIIMTDADVDGSHIRALLLTFFNNKPFNKLIEHGHVYLAQPPLFKINKGSKGIYIKDEKELENYILKNSKSLKKIKRGTKEFIKELNIEKSKMSIQRFKGLGEMNPEELWSTTLDPESRNLLQ

SEQ ID NO: 183717 - protein, 254 aa, Unknown
  Bacterial polypetide isolated from the Sargasso Sea
CSLKWNAGYAEDIFPYTNNIYQKDGGTHLLGFRSALTRVINKYANENNLLKKNKLAISGDDIKEGLTCVLSTKIPDPKFSSQTKDKLVSSEVRMIVETLVNEKLSIWFDQNPSIAKIVLAKVIQAAMARDVARKARENVRRKGALELSGLPGKLADCQIGKQEGTELFIVEGDSAGGSAKQGRNRANQAVLPLRGKILNTYVEDINLKKNGNGNGNGSDLRTKALAKMISSNEIVTLINALGLDPKSQEIDLKD

SEQ ID NO: 183718 - protein, 271 aa, Unknown
  Bacterial polypetide isolated from the Sargasso Sea
IYIEGKKNNIELECSLKWNAGYTEDIFPYTNNIYQKDGGTHLLGFRSALTRVVNKYANENNLLKKNKLAISGDDIKEGLTCVLSTKIPDPKFSSQTKDKLVSSEVRMIVETLVNEKLSIWFDQNPSIAKIILAKVIQAAMARDVARKARENVRRKGALELSGLPGKLADCQIGKQEGTELFIVEGDSAGGSAKQGRNRANQAVLPLRGKILNTYVEDFNLKKNGKANGNGSDQRTKALSKMISSNEIVTLINALGLDPKSQEIDLKDLRYG

SEQ ID NO: 183719 - protein, 271 aa, Unknown
  Bacterial polypetide isolated from the Sargasso Sea
EISINDDYSVTVIDDGRGIPVDIHKGEKKSAAEVIMTQLHAGGKFDHNSYKVSGGLHGVGVSVVNALSERLKLTINRDNKKYYIEFKNGDAKTSLKQIGKSKTSGTEINFVPSKDIFSSIKFSFSILEKRMRELAFLNKGIKIVLSDLRQKKPKTLEFKFDGGITEFVQFIDEKKESLKNKNENDLFKKPIYIEGLKNNIDVQCSLKWNAGYSEDVLPYTNNIYQKDGGTHLLGFRSALTRVVNKYANEQNLLKKNKVSLSGDDVKEGLTS

SEQ ID NO: 183720 - protein, 273 aa, Unknown
  Bacterial polypetide isolated from the Sargasso Sea
FANNIHTLEGGTHEEGLRTAITKAINDFAKSRNLHSDISLTGDDIREGITGVISVRVKEPQFEGQTKTKLGNTEMKSKVQVLVNKELPKWLSKNTKEGRAIVERCAVAAKARMSAKKARELTKRKSILETAGLPGKLADCSSTDPIESELFIVEGDSAAGPAKQARESKTQAILPIRGKIINVQKVTENRALQNEEISSLIKAIGTGIKDEYKGEESRYGKIIFLTDADVDGAHIRTLLLTFFFKFMPGLIKEGKVWIAEPPLYRAKSSGSIN

SEQ ID NO: 183721 - protein, 276 aa, Unknown
  Bacterial polypetide isolated from the Sargasso Sea
LKKNKVSISGDDIKEGLTCVLSIKIPDPKFSSQTKDKLVSSEVRNIVETLINEKLSVWFDQNPSVAKIILAKVVQAALARDVARKARESVRRKGALELTGLPGKLADCQNSKQEGTELFIVEGDSAGGSAKQGRNREYQAVLPLRGKILNTYISTNGSKKNSNGNEIRTKTLSKLISSNEIVTLINALGLDPKDEEIDLKDLRYGKIIIMTDADVDGSHIRALLLTFFNNKPFNQLIDNGHVYLAQPPLFKINKGSKGIYIKDEKELEKYILNNSK

SEQ ID NO: 183722 - protein, 304 aa, Unknown
  Bacterial polypetide isolated from the Sargasso Sea
LYQGGIKEYVQYMNAEKDSIHPEIIYVDSEKENVYVEAALQWCSDVYSDNILGFANNIRTIDGGTHIEGLKTVLTRTFNNLAKKRGKRKDIEKNLAGENIREGLTVVISVKVPDPEFEGQTKTKLGNTEVRGIVDSLIGEALSKYMEFNPGILDLILEKAIQSFNAAEAARRARELVRRKSVLESSTLPGKLADCSSRDPSESEIYIVEGDSAGGSAKQGRDRNFQAILPLRGKILNIEKTDDTKIYKNTEIQSLITALGLGIKGEEFDVSSLRYHRVVIMTDADVDGAHIRTLLLTFFYRYQK

SEQ ID NO: 183723 - protein, 302 aa, Unknown
  Bacterial polypetide isolated from the Sargasso Sea
PVHRRIIYAMYKGGFDWSKQFRKSARIVGDVIGKYHPHGDQAVYDALVRLTQDFSMSLPLIDGQGNFGSIDGDPPAAMRYTETKLAKISQFLIDDIEKNTVEFRSNYDETEKEPNVLPSQYPNLLVNGAGGIAVGMATSIPPHNLGEIIDATIAFINNREITISQLMKKVPGPDFPTGGVIIGKDNLKQGYNKGRGSIKIRGEIDEEKLKNGKDRLVIKSIPYQINKSVLNERIAELARDKKIEGISDIRDESNSKGIRVVIDLRRNVEPETVKRQLYKLTSIENSFGFNTLAIVSGKPKNS

SEQ ID NO: 183724 - protein, 250 aa, Unknown
  Bacterial polypetide isolated from the Sargasso Sea
MGGVKIVFRDERNQLLDGSFKEEVYLYQGGIKEYVEYMNAEKDPIHPEIIYVDSQKENVYVEAALQWCSDVYSDNILGFANNIRTIDGGTHIEGLKTVLTRTFNNLAKKRGKRKDIEKNLAGENIREGLTVVLSVKVPDPEFEGQTKTKLGNTEVRGIVDSLIGEALTKYMEFNPGILDLILEKAIQSFNAAEAARRARELVRRKSVLESSTLPGKLADCSSRDPSESEIYIVEGDSAGGSAKQGRDRNF

SEQ ID NO: 183725 - protein, 278 aa, Unknown
  Bacterial polypetide isolated from the Sargasso Sea
KDILSIWLNTHTEEGEKIAELAISAAQSRAKASSTVQRKKTFKGPALPGKLSDCNSEDLNETELFLVEGDSAGGSAKQARERSFQAIMPLRGKILNTWDLESQEIIKSQEIKNLSTAIGVLPGNSDISGLRYGKICILADADSDGLHIATLLCALFLRHYKSLVQDGRIYIAMPPLYRVDCGKEVLYALDEIQKDKVVDDFKKKKGKPKINIQRFKGLGEMNPSQLRETVMDPNSRQLVRLSISATDNANAMMDLLLSKKNAPARKEWLEKKGSLVRL

SEQ ID NO: 183726 - protein, 290 aa, Unknown
  Bacterial polypetide isolated from the Sargasso Sea
IKVLKGLEAVKKRPGMYIGDTDDGSGLHHMVYEVVDNCVDEALAGYCTEISVSLFDGSIVTVKDNGRGIPTDIHPEEGISAAEVIMTQLHAGGKFDQNSYKVSGGLHGVGVSVVNALSEYLKLTIWRDGKKHCATFSNGNTTKKLDIVGTTETETGTEVTFQPSTDIFTNINFIFKTLESRLRELAFLNAGLKIKLIDNRNNQQKKVDMLYEGGVSEFVKFIDKSRTPLISKPIFISGQRDNIQIDTALWWNDGYNENVFPFTNNIPQRDGGTHLAGLRGALTRTINSYF

SEQ ID NO: 183727 - protein, 222 aa, Unknown
  Bacterial polypetide isolated from the Sargasso Sea
IALHQEMQRSYLEYAMSVIVGRALPDARDGLKPVQRRILYAMQELGLTPDRPYRKCARVVGDVLGKYHPHGDQAVYDALVRLVQTFASRHPLLDGHGNFGSVDDDPPAAMRYTETRLAPIAHQALLEEIGDDTVDFAPNFDGSQQEPTVLPAQLPFLLLNGCSGIAVGMATSIPPHNLGEVVDGLVALIRQPELSDSKLLELIPGPDFPTGGEVLLSSGLRD

SEQ ID NO: 183728 - protein, 71 aa, Unknown
  Bacterial polypetide isolated from the Sargasso Sea
MVKNTQSDYSADSIKVLKGLDAVRKRPGMYIGDTDDGSGLHHMVFEVVDNSIDEALDGHCDKIGIALNANG

SEQ ID NO: 183729 - protein, 311 aa, Unknown
  Bacterial polypetide isolated from the Sargasso Sea
STKDKLVSSEVRFIVESIVNDKLSTWFDQNPGIVKIVLLKIVQAAIARDVARKARENVRRKGSLELSGLPGKLADCQIGKAEGTELFIVEGDSAGGSAKQGRNREFQAVLPLRGKILNTYIDTNGSKTRNGNGQDLQTKAFSKMMSSNEIVTLINALGTGSKDFNIEDLRYEKIIIMTDADVDGSHIRTLLLTFFNNYPFNELIEKNHIYLAQPPLYKITKGSKSYYIKNDKELENHLIKSSNKTKNSFKKNTKEFDKFIESEKTKINIQRFKGLGEMNPEELWQTTLDPENRILLQVKYSNNTKVKIKKD

SEQ ID NO: 183730 - protein, 270 aa, Unknown
  Bacterial polypetide isolated from the Sargasso Sea
LAKVLEAAYAREAARKAKEMTRRKGLLDIGGLPGKLADCQEKDPTMSELFLVEGDSAGGSAKQGRDRSFQAILPLKGKIINVQKARLDKVLSSNEIGTLITALGTGIGVDEFSLEKLRYHRIIIMTDADVDGSHIRTLLLTFFYNQMYDLLENGHIYLALPPLYKIKKGGKTHYAKDDEEKDEILKAIREDGSESSRAPEIQRYKGLGEMNPEQLWETTFDPKHRRLVQITLDDAREMVDEIFETLMGDQVAPRREFIDDNALRAKNVDI

SEQ ID NO: 183731 - protein, 158 aa, Unknown
  Bacterial polypetide isolated from the Sargasso Sea
MSEDKRSNKISNDYGAEQIQVLEGLEPVRKRPGMYIGSTGPRGLHHLVYEVVDNSVDEALAGHCDLIEIVLRADGSALISDNGRGIPTDIHPRTGKSALETVLTVLHAGGKFGSGGYKVSGGLHGVGISVVNALSEWVNVTVFRDSSEFNQRLKKVYQ

SEQ ID NO: 183732 - protein, 317 aa, Unknown
  Bacterial polypetide isolated from the Sargasso Sea
CRLCSVKIHADSSVSVRDNGRGIPVDIHEEEGVSAAEVIMTQLHAGGKFDSNSYKVSGGLHGVGVSVVNALSVWLELRIWRDGNEYFAKFANGETTEHLKKINDVAEERGTEVRFLASTETFSNLDYSFEVLEKRLRELAFLNSGVKIILEDERPTEVLRSELVYEGGVKEFVKYLDRSKTSLIPEPIFITGEKDEIGIEVAMWWNDSYHENVLPFTNNIPQRDGGAHTAGFRGALTRTINSYAQASGIAKKEKVNFTGDDAREGLTCVLSVKVPDPKFSSQTKDKLVSSEVRPAVESLMNEKLGEWFERKPHEAKL

SEQ ID NO: 183733 - protein, 254 aa, Unknown
  Bacterial polypetide isolated from the Sargasso Sea
PVQRRIIYAMSELGLSSAAKYKKSARTVGDVIGKFHPHGDTAAYEAMVLLSQSFSTRYPLIDGQGNWGSIDDPKSFAAMRYTECRLSPYAKSLLEELGQGTVDWDSNFDGTLLEPTVLPARLPNLLLNGATGIAVGMATDIPPHNLNEVVNACIKILDEPKVTVEELYKIIPGPDFPTQAEIISSEEDLKEIYQSGRGSVRMRSTYSIENSEIVITALPHQTSSSKILEQIALQMDAKKLPMIVDLRDESDEEN

SEQ ID NO: 183734 - protein, 307 aa, Unknown
  Bacterial polypetide isolated from the Sargasso Sea
MTKEKFTSISLQEEMQRSYLEYAMSVIVGRALPDARDGLKPVQRRILFAMHELGLTPDRPFRKCARVVGDVLGKYHPHGDQAVYEALVRLVQNFSTKYPTLDGHGNFGSVDNDPPAAMRYTETRLAPIAHECFLEEIGSDTVSYSNNFDGSQQEPDILPAQLPFLLLNGSSGIAVGMATNIPPHNLGEIVDGLIALIKDKEISDSKLSRIILGPDFPTGGELIYNEAIKEVYESGRGSITIRGVIKNEEINLGKGKHKRNALVISELPYQISKAGWIEKLAELVNLGKINGISDIRDESDRDGMRIV

SEQ ID NO: 183735 - protein, 146 aa, Unknown
  Bacterial polypetide isolated from the Sargasso Sea
MKAAYLDYAMSVIVSRAIPDLRDGLKPVHRRILYAMHESGNSKDKPYRKSARPVGDVMGKYHPHGDSAIYDSLVRMAQDFSMSLPLLDGQGNFGSMDGDSPAAMRYTEVRMETVANFLLADIEKDTVDFQDNYDGKDKEPVVFQQG

SEQ ID NO: 183736 - protein, 284 aa, Unknown
  Bacterial polypetide isolated from the Sargasso Sea
MPDVRDGLKPVHRRIIYAMYKGGFDWSKQYRKSARIVGDVIGKYHPHGDQAVYDALVRLTQNFSMSLPLIDGQGNFGSIDGDPPAAMRYTETKLAKVSQYLIDDIEKDTVDFRNNYDETEKEPTVLPSQFPNLLVNGAGGIAVGMATSIPPHNLGEIIDGAVAFIKNRDITISQLMKKIPGPDFPTGGIIINQDNLKQGYNKGRGSIKIRGEIEEESLKNGKERLVIKSIPYQVNKSVLNERIAELARDKKIEGISDIRDESNHQGVRVVLDLRRNVEPETVKR

SEQ ID NO: 183737 - protein, 241 aa, Unknown
  Bacterial polypetide isolated from the Sargasso Sea
NIAQRDGGTHLAGFRGALTRSIVNYINQKIKNSTNISGDDAREGLTCVISVKLPDPKFSSQTKDKLVSSEVRPVVESVSLEKIEQWIEENPNEIKKVVEKVVEASDAREAARKARELTRRKSGLENSSLPGKLADCQEKNPELSELFIVEGDSAGGSAKQGRDRKNQAILPLRGKILNVERASPKQILTSNEIGVLITAIGAGVGNPTGNDEQDKSEGKFDIDKMRYHKVIIMTDADVDGS

SEQ ID NO: 183738 - protein, 309 aa, Unknown
  Bacterial polypetide isolated from the Sargasso Sea
RMFQEFSMSLPLVDGQGNFGSIDGDPPAAMRYTETKLAKVSQFLIDDIEKNTVSFKSNYDETEQEPVVLPAQYPNLLVNGAGGIAVGMATSIPPHNLGEVVDGTLALIKNKDIKINELMKHIPGPDFPTGGLIIGKDIIKQGYRTGRGSFKIRGEISVENLKNGKDRLVVSSIPYQINKSNLNERIAELVRDKKIEGISDIRDESNSEGIRVSIDLRRNVEPETVKRQLYKYTSIESSFGFNSLAIVDQKPKTCNLKDFLENFLKFREDVVIKRTKFDLKKAEERVHILLGLSVSVENIDKVIKIIRSS

SEQ ID NO: 183739 - protein, 267 aa, Unknown
  Bacterial polypetide isolated from the Sargasso Sea
MVDFNRDNTLPRDIVDEMRESYLNYSMSVIVSRALPDVRDGLKPVHRRILYGMSELGSSWNRPYKKSARIVGDVLGKYHPHGDSSVYDALVRMAQDFSMRYELVDGQGNFGSIDGDNAAAMRYTESRMTKLSSEMLKDLDKDTVNWEPNFDETLKEPSVLPSSVPALLINGSEGIAVGMATKIPPHNLMEIVNGIVALIENTDISTEKLMEHIKGPDFPTAGLIMGMDGLKSAYKTGRGKIKMRARAHIESNKNEKSSIVITEGPYQ

SEQ ID NO: 183740 - protein, 293 aa, Unknown
  Bacterial polypetide isolated from the Sargasso Sea
KTWVHRRIIYAMHKGGFDWSKQFRKSARIVGDVIGKYHPHGDQAVYDALVRMVQDFSMSLPLIDGQGNFGSIDGDPPAAMRYTETRLSKISQFLIDDIEKNTVEFKNNYDETEREPTVLPAQYPNLLVNGAGGIAVGMATSIPPHNLGEIIDGTLALINNKEIKINELMKHIPGPDFPTGGIIIGKKIIKEGYKTGRGSFKIRGEISVENLKNKRDRLVITSIPYQVNKSVLNERIADLVREKKIEGIRDIRDESNREGIRVAIDLRSGVEPETIKRQLFKYTSVESSFGFIL

SEQ ID NO: 183741 - protein, 145 aa, Unknown
  Bacterial polypetide isolated from the Sargasso Sea
IIIMTDADVDGSHIRTLLLTFFYRQMYEIVDKGHIYIALPPLYKLSKGKEFFYASNEEEKDKAVKELSKNGTRGLEVQRYKGLGEMNPEQLWTTTMDPNNRRMMRVDIKDVVDANESFEILMGDDVEPRREFIDANALSVTDLDI

SEQ ID NO: 183742 - protein, 273 aa, Unknown
  Bacterial polypetide isolated from the Sargasso Sea
ARWSEYFAKFAHGETTEHLKKIKDAVEERGTEVRFLASTETFSNLDYSFEVLEKRLRELAFLNSGVKIILEDERPTEVLRSELVYAGGVKEFVKYLDRSKTSMIPEPIFITGEKDEIGIEVAMWWNDSYHENVLPFTNNIPQRDGGAHTAGFRGALTRTINSYAQASGIAKKEKVNFTGDDAREGLTCVLSIKVPDPKFSSQTKDKLVSSEVRPAVESLMNEKLGEWFEENPNEAKLIIGKIIEAALAREAARKARELTRRKTALDVNYLAGK

SEQ ID NO: 183743 - protein, 277 aa, Unknown
  Bacterial polypetide isolated from the Sargasso Sea
KMKNIIKDDINKVIKSRYLSYAVSTIISRSLPDLRDGLKPVHRRIIYSMYLLKLFNNSSFKKSARIVGDVMGKFHPHGDQAIYQSLVRMAQDFSSRVTLIEGQGNFGNIDGDNAAAMRYTEARLEEITELFFDGIEEDSTTFSDNYDGQNLEPDVLPSKLPNILLNGSTGIAVGMATNIPPHNLIELNDCIIRLIKKPNTPDSELLKILKGPDLPTGGEIILSNEEKKKIYKKGFGSFLINSKWHDEKIKNGMYEIVISEIPFQVNKVKIIEQLANC

SEQ ID NO: 183744 - protein, 190 aa, Unknown
  Bacterial polypetide isolated from the Sargasso Sea
MNQTYSSESIKVLKGLEAVRKRPGMYIGDTDDGSGLHQMIYEVVDNSIDESLAGYCDKIEVILNSDGTVTILDNGRGVPVDNHKEEGIPAAQLIMTELHAGGKFDQNSYKVSGGLHGVGVSVVNALSEKLLLEINRDDKIHKMAFAHGAVTDSLKAVGDSEVINGNKYTGTKITFLPSNKIFKNIEFYFS

SEQ ID NO: 183745 - protein, 294 aa, Unknown
  Bacterial polypetide isolated from the Sargasso Sea
THLLGFRAALTRVINKYASEQNLLKKSKVSLSGDDVKEGLTCVLSVKIPDPKFSSQTKDKLVSSEVRNIVETIISEKLSIWFDQNPSVSKIILTKIIQAAVARDVARKARENVRRKGALELTGLPGKLADCQNSKQEGTELFIVEGDSAGGSAKQGRNRENQAVLPLRGKILNTFTELNGSKKNGSSNDLRTKALSKMISSNEIITLINALGLDPKNEEIDLKDLRYGKIIIMTDADVDGSHIRALLLTFFNNKPFNKLIEQGHVYLAQPPLFKINRGSKGIYIKNEKELENYI

SEQ ID NO: 183746 - protein, 312 aa, Unknown
  Bacterial polypetide isolated from the Sargasso Sea
DPSKAELFLVEGDSAGGSAKQGRDRGNQAILPLRGKILNVERARIDKMLSSAEIGTLITAIGAGVGNSELDIVKARYHKIIIMTDADVDGSHIRTLLLTFFFRHMRPLVDAGFLYIAQPPLYKVKIGKSEVYLKDQSYLDEFLINNGIKNCSLKISETESIIDKDLKLLLDQSVLAKKYIYSLSKKIGNEEILSHLTVLGFFNSKFFENEEEVKKTEEYFNERLSSNSEKWKIDLDRSEKVIKFTREFRGIIEKFLMKQDYLNYSECHELSRMHQELKFFSEYNVKIFIEDVESNVNCPLDLVDIIIEKGKR

SEQ ID NO: 183747 - protein, 151 aa, Unknown
  Bacterial polypetide isolated from the Sargasso Sea
MAKNNTTYQADSIKVLKGLEAVRKRPGMYIGDTDDGTGLHHMVYEVVDNSIDEALAGYCRNIIVDINNDGSITVKDDGRGIPVDIHRGEKKSAAEVIMTQLHAGGKFDHESYKVSGGLHGVGVSVVNALSEKLNLFIERDGNKHHIEFKNG

SEQ ID NO: 183748 - protein, 285 aa, Unknown
  Bacterial polypetide isolated from the Sargasso Sea
KLREKNNAKLNGSISWVCNWSLNYTQFFKSYCNLIPTTDGGTHENGFWSAILKGIKSYGELIGNKKVSQITRDDISANLCGIISIFINNPTFSGQTKDKLTTQEVLKSVEITLKSLFENWLTNDPKNANQLIENFIAKSEERIRKKNEKDTLRKSAVKKLRLPGKLSDCLQNSKQGSELFIVEGDSAGGSAKQARDRNFQAILPLKGKILNVMSSTTEKMLQNQEINDLCKCLGVNVGDKFNYENLRYEKIIIMTDADVDGAHISSLLLTFFFTQMPELMLKGNL

SEQ ID NO: 183749 - protein, 180 aa, Unknown
  Bacterial polypetide isolated from the Sargasso Sea
IDKVLSSAEIGTLVKAMGCGMGTEDLTFDKLRYHRIIIMTDADVDGSHIRTLLLTFFYQQYYDILEKGHVYIAMPPLYKITKGKSFVYASDEDEKDKAIKDFSKSGSKGIDVQRYKGLGEMNPDQLWETTMDPENRRMMRVNIKDAKDASDMFETLMGDDVEPRREFIETNALSVSNLDI

SEQ ID NO: 183750 - protein, 298 aa, Unknown
  Bacterial polypetide isolated from the Sargasso Sea
MLFGKYHPHGDQAVYDALVRMVQDFSMSLPLIDGQGNFGSVDGDPPAAMRYTETRLAKISQNLIDDIDKDTVEFKSNYDETEKEPEVLPAQYPNLLVNGAGGIAVGMATSIPPHNLSEVINATLALIENKDIKINELMKHIPGPDFPTGGTIIGKDIIKTGYKTGRGSFKVRGNVSIEQLKNGKERLVINSIPYQINKSVLNEKIVELIRNKKIEGISDIRDESNREGIRVAIDLKKNVEPETVKRQLYKYTSLESSFSFNTLAIVDRKPKNCNLKDFLESFLKFRENVVVKKTKFDL

SEQ ID NO: 183751 - protein, 284 aa, Unknown
  Bacterial polypetide isolated from the Sargasso Sea
VFEVVDNSIDEALAGHCKNIAVTINSDNTVTVEDDGRGIPVDMHKGEKMSAAEVIMTQLHAGGKFDHDSYKVSGGLHGVGVSVVNALSEKLSLNIYRDGNEYEINFKDGTSIKPLKKIGKTKKKGTKINFLPSKNIFSSIKFSSSILEKRIRELAFLNKGISISLIDDSQKKKKEFVHRYDGGIIEFVRHINKKKPILINKNEKEIFKKPVYVTSTKNNVIVECSFEWNAGYAEEVLPFTNNIPQKDGGTHLLGFRSALTRVINKYSSDRSKKSKVSLSGEDIK

SEQ ID NO: 183752 - protein, 290 aa, Unknown
  Bacterial polypetide isolated from the Sargasso Sea
LSLRIHKNGNIYEQDYAHGSPKKPLKKGAKTKRTGTTITFQPSKKTFSNTSFSYETLSKRLREMSFLNPGLTINLNDERTNKADSYCYEGGLKDFVRHLNKPQKPTHQSIAYINKKSRKDGDIEVEVAIQWNESYRENTFCFANTIRQRDGGTHLAGFRGALTRTINTYIDKEIAKNETSVTGDDCREGMTAIISVKHPDPKFSSQTKDKLVSSEVKGVVESAVNKHLKEFLEENPVEAKIIVGKILDAARAREAARKAREMTRKKGALDIAGLPGKLADCQEKDPSLSE

SEQ ID NO: 183753 - protein, 283 aa, Unknown
  Bacterial polypetide isolated from the Sargasso Sea
NFSMRLELIDGQGNFGSLDGDPPAAMRYTEARLSKISEKIVTDLEKNTVNFQPNYDDTTKEPSVLPAQYPNILVNGASGIAVGMATNIAPHNLGEVIDATLFCIDNPDSSIDDLNKFILGPDFPTGCQIIGNKGIKDAFNSGKGACILRAKTSIENFKKDREAIIINEIPYQVNKSKLIEKIAETVKNNIIEGISDLRDESDRNGVRVVIELKKDVDTNVVLNKLYKHTLLQTTFNSNMLALNKGKPEQMNLKDILLSFIDFREEIVTKRTVYDLNKARDKAH

SEQ ID NO: 183754 - protein, 285 aa, Unknown
  Bacterial polypetide isolated from the Sargasso Sea
QFEGQTKTKLGNGDVKGIVDKAVYEGILDFLEQNPSIGRRIIEKALLAARSRSAARKARELIRRKSALGGSSLPGKLSDCSNRDPVFCELYLVEGDSAGGSAKQGRDRRTQAILPLRGKVINSEKARIDKLLSNNEVQSMITALGAGFGGSDDESGEKSPGDFDLEKLRYHKIIIMTDADVDGSHIRTLLLTFFYRKMKEVIDGGYLYLALPPLYRVSQGKKESYAYDDNERDLLIERMKKDNKNTKVGIQRYKGLGEMNPGQLWETTMDPEKRTLMKVTVESAA

SEQ ID NO: 183755 - protein, 293 aa, Unknown
  Bacterial polypetide isolated from the Sargasso Sea
MGEITAKEIVPIDIEKELKQSYLDYAMSVIVGRALPDARDGLKPVHRRALYAMHVLNNDYGRPHKKSARIVGDIIGKYHPHGDGAAYETIVRMAQWWSLRYPLVDGQGNFGSMDGDGPAAQRYTEVRMAKISQELLADLDKETVNFVENYDGTETMPEVLPTKIPNMLVNGSAGIAVGMATNMAPHNLSETLSACLAFIENPEISTSELMEFIPGPDFPTGGIINGRAGIVSAYESGKGRVKIRAKTHFEDEDKDKAKIVITEMPYQVNKSKLIEKIAEFSRDKKIEGVRDIR

SEQ ID NO: 183756 - protein, 289 aa, Unknown
  Bacterial polypetide isolated from the Sargasso Sea
MTKNNINTYQADSIKVLKGLEAVRKRPGMYIGDTDDGTGLHHMVYEVVDNSIDEALAGHCKKIEVSINSDGSVTVEDDGRGIPVDFHKEEKKSAAEVIMTQLHAGGKFDHDSYKVSGGLHGVGVSVVNALSQKLELYVERDGKKHFVEFFNGETKIPLKVIGKSKNTGTKINFLPSKDIFSSTKFSFSIIQKRMRELAFLNKGIKIILNDLTQKKIKTHEFKFEGGINEFVEFLDEKREKLKNKNDNDLFRKPIYIEGIKSNIDVQCSLKWNAGYNEDVYPYTNNIYQK

SEQ ID NO: 183757 - protein, 94 aa, Unknown
  Bacterial polypetide isolated from the Sargasso Sea
MPKDNAYDSSKIKVLKGLEAVRKRPGMYIGDTEDGTGLHHMVFEVVDNSIDEALAGYCDLIKVVIHANESISVSDNGRGIPVGIHEEEGRSAAE

SEQ ID NO: 183758 - protein, 279 aa, Unknown
  Bacterial polypetide isolated from the Sargasso Sea
MSDIIDSDNSGLSEDNDRIIHTDLRNEMSRSYLEYAMSVIVGRALPDARDGLKPVHRRILYAMYELGLTSGRPYRKCARVVGEVLGKYHPHGDTAVYDALVRMAQDFSMRMPLIDGHGNFGSVDNDPPAAMRYTESRLQSLTDESLLEDIESETVDFADNFDGSQQEPTVLPARIPQLLLNGSSGIAVGMATNIPPHNLGELINGLKTIIKNPSIEDRELFEIIKGPDFPTGGQILGRDGIRETFKTGRGSITMRGVANIEQIKSTGRAEKDAVIITEL

SEQ ID NO: 183759 - protein, 146 aa, Unknown
  Bacterial polypetide isolated from the Sargasso Sea
MAKNNTNYQADSIKVLKGLEAVRKRPGMYIGDTDDGTGLHHMVYEVVDNSIDEALAGYCKNIIVDINNDGSITVQDDGRGIPVDIHKGEKKSAAEVIMTQLHAGGKFDHDSYKVSGGLHGVGVSVVNALSEKLDLFIERDGKKHFI

SEQ ID NO: 183760 - protein, 273 aa, Unknown
  Bacterial polypetide isolated from the Sargasso Sea
GLPGKLADCQIGKQEGTELFIVEGDSAGGSAKQGRNRSNQAVLPLRGKILNTYVEDFKVKQNGNGNGSDKRTKALSKMISSNEIVTLINALGLDPKVQEIDLKDLRYGKIIIMTDADVDGSHIRALLLTFFNNEPFNKLIENGHIYLAQPPLFKINKGTKSIYIKDEKELEDYILKNNNEIKKIKKGTKEFTEALDLERSKMNIQRFKGLGEMNPEELWSTTLDPETRNLLQVRYSKDLKKDQSLIHTLMGNDVARRKDFIVSNAINVQNLDI

SEQ ID NO: 183761 - protein, 306 aa, Unknown
  Bacterial polypetide isolated from the Sargasso Sea
ICYYLDNKKSILINKNEKQTFKKPIYLSGEKNNVVVECSLQWNAGFSEEVLAFTNNINQKDGGTHLLGFRSALTRIINKHVSEKNLNKKNKLNISGEDIKEGLTAVLSIKMPDPKFSSQTKDKLVSSEIRMIVETIVSDKLTMWFDQNPSVIRVVLDKILQAAMARDVARKARDSVRRKGSLELSGLPGKLADCQISSMEGTELFIVEGDSAGGSAKQGRKREFQAVLPLRGKILNTFIDESKKRNNGGNGVIENKTLSKMMSSNEIVTLINALGTGSKDFNIEDLRYEKIIIMTDADVDGSHIRT

SEQ ID NO: 183762 - protein, 61 aa, Unknown
  Bacterial polypetide isolated from the Sargasso Sea
MTKNNSNNYQADSIKVLKGLEAVRKRPGMYIGDTDDGTGLHHMVYEVVDNSIDEALAGFCK

SEQ ID NO: 183763 - protein, 192 aa, Unknown
  Bacterial polypetide isolated from the Sargasso Sea
MNKKNNNTYQADSIKVLKGLEAVRKRPGMYIGDTDDGTGLHHMVYEVVDNSIDEALAGHCKKIEVNINSDGSITVEDDGRGIPVDFHKEEKKSAAEVIMTQLHAGGKFDHDSYKVSGGLHGVGVSVVNALSQKLELYVERDGKKYFVEFINGETKTPLKVIGNSKNTGTRINFLPSKDIFSSTKFSFSIIQK

SEQ ID NO: 183764 - protein, 275 aa, Unknown
  Bacterial polypetide isolated from the Sargasso Sea
MPNNNTYQADSIKVLKGLEAVRKRPGMYIGDTDDGTGLHHMVYEVVDNSIDEALAGHCKNIYVKINSNGTITVKDDGRGIPVDIHKGEKKSAAEVIMTQLHAGGKFDHDSYKVSGGLHGVGVSVVNALSEKLELEINRDNKKFFIEFKDGKAKKPLKEIGKSKETGTQITFLPSKEVFSSIKFSGNILIKRMRELAFLNKGIKITFVDSSQKKEKIQDFRFEGGVLEFVEFLDEKREKLQNKNGNDLFKKPIYIEGKRDKIEIECSLKWNSGYSE

SEQ ID NO: 183765 - protein, 277 aa, Unknown
  Bacterial polypetide isolated from the Sargasso Sea
FDQNSYKVSGGLHGVGVSVVNALSEWLELKIKRDKSEYYIKFKDGIPVEPLKKVGSADSSGTSITFMPSKNTFTKTNFDFSKLESRLRELAYLNSGVNIKLEDMRNSDPVESHLSSRGGLKGYVKYLDKSKESIISEVISVKGDANEIHVEMALQWNKSYHENCLVFTNNIPQRDGGTHLAGFRSALTRTINMASNNLGLQKKDKINLTGDDAREGLTCILSVKVPDPKFSSQTKDKLVSSEVRPIVESIVSERLSSWFEENPKDSKLVITKISKQL

SEQ ID NO: 183766 - protein, 277 aa, Unknown
  Bacterial polypetide isolated from the Sargasso Sea
DESEHEPTVLPAMFPNLLVNGAGGIAVGMATNILPHNLGEVIDACTAFIDDREISFEKIYELIKGPDFPTGGTIIGTQGIKNSQASGRGSIIVQAKSSIEEFKVDREAIIFTEIPYQVNKSLLLEKIAELVRDKRIEGISDLRDESDRQGVRVVIELKKGVISQVILNKLYKFTPLQSSYGVNSLALTDGKPQLMNIRDFISLFIKFREEIITNRTRYDLTKSRDRAHILIGLAVAVSNVDKIIEIIKKSKDPNEAKRELLKSKWKSSEIKDLLDLI

SEQ ID NO: 183767 - protein, 265 aa, Unknown
  Bacterial polypetide isolated from the Sargasso Sea
LQWCSDVYSDNILGFANNIRTIDGGTHIEGLKTVLTRTFNNLAKKRGKRKDIEKNLAGENIREGLTVVLSVKVPDPEFEGQTKTKLGNTEVRGIVDSLIGEALTKYMEFNPGILDLILEKAIQSFNAAEAARRARELVRRKSVLESSTLPGKLADCSSRDPSESEIYIVEGDSAGGSAKQGRDRNFQAILPLRGKILNIEKTDDTKIYKNTEIQSLITALGLGIKGEEFDVNSLRYHRVVIMTDADVDGAHIRTLLLTFFYRYQR

SEQ ID NO: 183768 - protein, 209 aa, Unknown
  Bacterial polypetide isolated from the Sargasso Sea
GIPIDMHKGEKMSAAEVIMTQLHAGGKFDHDSYKVSGGLHGVGVSVVNALSENLQLKIYRGGVEYFIEFENGKSLKPLKKIGKSSKRGTAITFLPSKDIFSSIKFSSTVLQKRMRELAFLNKGINLTLIDKTSSKIKKYENKFDGGILEFVQFINQKKPILSNKNEKPVFKKPIYISSSKNDVNVECSLEWNAGYSEEVLAFTNNIIKK

SEQ ID NO: 183769 - protein, 328 aa, Unknown
  Bacterial polypetide isolated from the Sargasso Sea
RVPREAARRAREMTRRKGALDLAGLPGKLADCQERDPAHSELYLVEGDSAGGSAKQGRNRKNQAILPLKGKILNVEKARFDKMLSSQEVATLITALGCGIGRDEYNPDKLRYHSIIIMTDADVDGSHIRTLLLTFFYRQMPEIVERGHVYIAQPPLYKVKKGKQEQYIKDDEAMDQYQISIALDGATLHTNASAPALAGEALEKLVSEYNATQKMIGRMERRFPKALLKELVYQPTLPEADLANEQNVTRWVNALITELNEKEQHGSLWKFDIHHNAEQNLFEPIVRVRTHGVDTDYVLDHEFVTGGEYRRICTLARSCVTDRRRCVI

SEQ ID NO: 183770 - protein, 35 aa, Unknown
  Bacterial polypetide isolated from the Sargasso Sea
AGGSAQQGRHRKFQAILPLKGKILNVEKARFDKML

SEQ ID NO: 183771 - protein, 235 aa, Unknown
  Bacterial polypetide isolated from the Sargasso Sea
NPSDAKIIVDKVILAAQARHAARKAREMIQRKTVMSGGGLPGKLSDCSEQDPSLCEIFLVEGDSAGGTAKQGRDRNFQAILPLRGKILNVEKAMQHKVFENEEIRNIYTALGVTIGTEEDSKALNIEKLRYHKIVIMCDADVDGSHISTLILTFFFRYMKELIELGYIYIATPPLYLVKKGQKNDYAWNDDQRDKLIQEFGSGTSVQRYKGLGEMNAEQLWNTTMDPDRRTLRRV

SEQ ID NO: 183772 - protein, 298 aa, Unknown
  Bacterial polypetide isolated from the Sargasso Sea
  misc_feature (7)..(7): Xaa can be any naturally occurring amino acid
FILLIRXQSEDKNIHFKYDGGIKEYVKYLNNGKNLINSEPIFFNAQKNNISVECSLQWTDSYHENTICFTNNIIQRDGGTHLAGFRGALTRSIVNYINKNTKNSNNISGEDAREGLTCIISVKLPDPKFSSQTKDKLVSSEVRPVIESTSLNKLEQWIEENPSEIKKVIDKIIEASNAREAARKARELTRRKTGLENTSLPGKLADCQEKNPELSELFIVEGDSAGGSAKQGRDRKNQAILPLRGKILNVERANDKQVLTSNEIGALITAIGAGVGNPTDDNDQNKIESKFDYSKMRY

SEQ ID NO: 183773 - protein, 193 aa, Unknown
  Bacterial polypetide isolated from the Sargasso Sea
MPKKQNKKGSYDSSNIQVLKGLEAVKKRPGMYIGDTDDGSGLHHMVFEVVDNCIDEAMAGHCSEIIVSINKNGSITVKDNGRGIPVDTHKKEKVPAAELIMTTLHSGGKFDDNSYKVSGGLHGVGVSVVNALSEQLTLKICRDGGQYEQKYANGKAQTKLKKTKASKETGTEITFKPSKEIFSFVNFDIDKIK

SEQ ID NO: 183774 - protein, 253 aa, Unknown
  Bacterial polypetide isolated from the Sargasso Sea
MSKDKYDSSSIKVLKGLEAVKKRPGMYIGDTDDGSGLHHMVFEVLDNAIDEGLAGFCDYIEVKLMKDGFVSVSDNGRGIPVDMHEEGVPAAQVIMTSLHSGGKFDENSYKVSGGLHGVGVSVVNALSSKLILEIERDGKKYCQEYAEGTPKTDLKENGKSDKTGTKVSFLPSKATFAFTEFNVEILKRRIRELSFLNSGIAITIIDERTDQKFDFKSEGGLVEFVNYLTGKKEPVGSPFTAQANMKGIGVEIA

SEQ ID NO: 183775 - protein, 99 aa, Unknown
  Bacterial polypetide isolated from the Sargasso Sea
MSEFEQSPEDYSAESIKVLKGLEAVRKRPGMYIGDTDDGSGLHHMVYEVVDNGIDEALAKHADFVHVKIHSDSSVSVRDNGRGIPVDIHEEEGVSAAEV

SEQ ID NO: 183776 - protein, 209 aa, Unknown
  Bacterial polypetide isolated from the Sargasso Sea
MTKNNSNNYQADSIKVLKGLEAVRKRPGMYIGDTDDGTGLHHMVYEVVDNSIDEALAGFCKKIEISINDDNSVTVIDDGRGIPVDIHKGEKKSAAEVIMTQLHAGGKFDHNSYKVSGGLHGVGVSVVNALSERLKLTINRDNKKYYIEFKNGDAKTSLKQVGKSKTSGTEINFVPSKDIFSSIKFSFSILEKRMRELAFLNKGIKIVLS

SEQ ID NO: 183777 - protein, 302 aa, Unknown
  Bacterial polypetide isolated from the Sargasso Sea
QGNFGSLDGDPPAAMRYTEARLSKVSERLVEDIDKDTISFQPNYDDTTKEPSVLPSQFPNLLVNGASGIAVGMATNIAPHNLGEVIDATLYLISNPNCNTEDLKKYILGPDFPTGGQIIGKKGISETFETGKGSCVVRSKTSIENFKKDREAIILHEIPYQVNKSKLLERIAEIVKGGIVEGISDLRDESDRNGVRVVIELKRDFDSNIILNQLYKHTLIQTTFNSNMLALNKGKPEQMNLKEILSSFLDFREEVITKRTLFDLNRARDKAHVLVGLVIANTYIDQIIELIKSSKDTKEAKE

SEQ ID NO: 183778 - protein, 274 aa, Unknown
  Bacterial polypetide isolated from the Sargasso Sea
KILNVERAGESKVIGSNEIGTLITALGSGFKDDFDLSKIRYHKIVIMTDADVDGSHIRTLLLTFFYRKMPEIIEAGYLYIAQPPLYKISHGKSISYIKDENEMNEYLINEGIRDCVLTLYSGEQIAGEDLKVLVNDAKECNNIIDRISDKYDKNIVEQTAIAGALNPNVLNDSEKALEVAKYVANRLDQLSQEVENGWEGTPLEDGGLKFSRNLRGVLESYSIDSPLIQSLDARRLDEHASNLQKTYLKRAVLKKKDVDYEIRSPSQITNTIFS

SEQ ID NO: 183779 - protein, 262 aa, Unknown
  Bacterial polypetide isolated from the Sargasso Sea
SEAALAREAARKAREMTRRKGVLEVAGLPGKLADCQEKDPALSEIYIVEGDSAGGSAKQGRNRQNQAILPLKGKILNVEKARLDKVLSSQEIGTLVTALGCGIGTDEFDADKLRYHRIIIMTDADVDGSHIRTLLLTFFFRQMFEILNRGHVYIALPPLYKVSKGKNIKYAASEKEKDIALKELSKTGNRGIEIQRYKGLGEMNPDQLWTTTMDPQNRRMMRVRIDDANEANNSFEVLMGDQVEPRREFIDENALSVANLDI

SEQ ID NO: 183780 - protein, 223 aa, Unknown
  Bacterial polypetide isolated from the Sargasso Sea
EKTELFIVEGDSAGGSAKQARNREFQAILPLRGKILNVFNVSLSKIADNNEIQNLIQSLGCGIGKNFQLSKLRYEKIILMTDADVDGSHIATLLITFFYKYMKTIIDKNRLYLAMPPLFKIYNKDKSFYAYDEKEKDKIIKKEFKSNIPLTTRFKGLGEMPANQLRDTTMDPKRRKLINIKTYNEKKEMKITDNLFETLMGKKAEYRFKFIKDNANFLKQIDT

SEQ ID NO: 183781 - protein, 283 aa, Unknown
  Bacterial polypetide isolated from the Sargasso Sea
AEGGSHLTGFKGALTRTLNNYMVTNKISNDNDENLTGEDVREGMAAVISVRVIDPQFESQKKIKLTNVEVKGKVESLVNEHLNNFLEENPAVAKKIVAKSLDAQRARIAARKARELTRRKNVLEISSLPGKLADCQESDPALSELFLVEGDSAGGSAKQGRDRKNQAILPLKGKILNVEKARFDKMLSNDEIRTLITALGTGIGREDFDITKTRYHKIIVMTDADVDGSHILTLILTFFYRQMPEIIENGYLYIAQPPLYKIKKGREEHYLRDDKEMSETLIR

SEQ ID NO: 183782 - protein, 311 aa, Unknown
  Bacterial polypetide isolated from the Sargasso Sea
MSKNSALNSKPSYGADSIKVLKGLDAVRKRPGMYIGDTDDGSGLHHMVFEVMDNAIDEALAGHCKNITVTINNNNTVTVEDDGRGIPVDMHKGEKISAAEVIMTQLHAGGKFDHDSYKVSGGLHGVGVSVVNALSEKLELNIYRDGKEYSVIFNNGNTLKPLKQVGKTKKRGTRINFLPSKEVFSSIKFSSAILEKRIRELAFLNKGICIKLLDQTHKKEKEFVHKYDGGIVEFVKHINNKKPILVNKNEKEVFKKPVYVTATKNNVVVECSFEWNAGYSEDVLPFTNNIPQKDGGTHLLGFRSALTRVIN

SEQ ID NO: 183783 - protein, 120 aa, Unknown
  Bacterial polypetide isolated from the Sargasso Sea
MIKKNQQDNTKYSAESIKVLKGLEAVRKRPGMYIGDTDDGTGLHHMVYEVVDNSIDEALAGHCKNIKVTINSDQSVSVEDDGRGIPIDMHKGEKKSAAEVIMTQLHAGGKFDHDSYKVSG

SEQ ID NO: 183784 - protein, 273 aa, Unknown
  Bacterial polypetide isolated from the Sargasso Sea
YMTNEKEENNAITENEEPSEPGTENTDYDAQSIKVLRGLDAVRKRPGMYIGDTDDGSGLHHMIYEVVDNGIDEALAGHCDIVEVVLNGDGSVSVFDNGRGIPIDVHKEEGVPAAEVIMTQLHAGGKFDQNSYKVSGGLHGVGVSVVNALSTRLELRIWRDGKEYLLVFKNGDIDKKMEVVGDAGEKTGTKVTFFASKDTFSNVDYDFATIEHRLRELAFLNSGVRIKLTDDRHVEQKIAELYYEGGLEAFVNYLDRSKTALIPTISISGEKEG

SEQ ID NO: 183785 - protein, 289 aa, Unknown
  Bacterial polypetide isolated from the Sargasso Sea
VGKLIIAKALQAQRVREAARKAQDLVRRKSSLESTTLPGKLADCTEKDPSKCEVFLVEGDSAGGSAKQGRDRYYQAILPLRGKVLNVEKSRLDKILANEEIRSLITAIGPEALKNLSASKVNTEEDDADDQLTTEDVLAKLRYHKIVIMTDADVDGAHIRTLLLTFFFRYAREVVEAGALYIAQPPLYQIKTGKNGIYAYNDKQLEEEISKLGKDKDKLTIQRYKGLGEMNPDQLWDTTLDPEQRSMLQVNIHDAEMADEIFSLLMGNKVEPRKEFIEKYADTVRWIDV

SEQ ID NO: 183786 - protein, 259 aa, Unknown
  Bacterial polypetide isolated from the Sargasso Sea
RLILVDGQGNFGSIDGDPPAAMRYTESRLARSSESLLRDIDKDTIDFIPNYDESQLEPSVLPAEFPNMLVNGAGGIAVGMATNIPPHNPGEVIRACKSLIENPNISLEELMEIIPGPDFPTAGLIMGRAGIKEAFRTGRGSVIMRSKAEIIQTGKNLDRETIIISEIPFLVNKALVLEKIGDLIRDKTIEGISDLRDESDRNGMRIVIEIKKDVQGDVVLNQLWRHTRLQTSFPVNMLALDNGQPKQMGLIEILKAFID

SEQ ID NO: 183787 - protein, 273 aa, Unknown
  Bacterial polypetide isolated from the Sargasso Sea
MSSSYLSYAMSVIVSRALPDVRDGLKPVHRRILYAMYKGGYDWSKQFRKSARIVGDVIGKYHPHGDQSVYDALVRMVQDFSMSLPLIQGQGNFGSIDGDPAAAMRYTETRLSKVSQYLIDDIEKNTISFKSNYDETEKEPSVLPAQFPNLLVNGAGGIAVGMATSIPPHNLGEIIDGTLALIDNKDIKIKELMKHIPGPDFPTGGVIIGKDIIKQGYKNGRGSFKIRGEISIEQQKNGRERLVITSIPYQVNKSVINERIAQLVREKKIEGIR

SEQ ID NO: 183788 - protein, 260 aa, Unknown
  Bacterial polypetide isolated from the Sargasso Sea
SFNAAEAARRARELVRRKSVLESSTLPGKLADCSSRDPSESEIYIVEGDSAGGSAKQGRDRNFQAILPLRGKILNIEKTDDTKIYKNTEIQSLITALGLGIKGEEFDESSLRYHRVVIMTDADVDGAHIRTLLLTFFYRYQRELVEKGFIYIACPPLYKVERGKNHNYCYNENQLKDTIQAFGENANYNIQRFKGLGEMMPKQLWDTTMNPQTRMMKRVEIEDALEADRIFNILMGDKVAPRREFIETHSSNLDMATLDI

SEQ ID NO: 183789 - protein, 151 aa, Unknown
  Bacterial polypetide isolated from the Sargasso Sea
MTSEEEGEAETQGNNGNILNHSLNEEMKTSYINYAMSVIIGRALPDARDGLKPVHRRVLYGMHEGGHTSEKKYSKSARSVGEVMGKYHPHGDQSIYDTMVRMAQDFSLRYPLVDGQGNFGSIDGDPPAAMRYTESRLDKISKHMLEDMKRK

SEQ ID NO: 183790 - protein, 290 aa, Unknown
  Bacterial polypetide isolated from the Sargasso Sea
KASPTPADAKVKLVEQGWALGHVQGMLEKAGDDAARPEWLEPEFGIRDGLYYLTEQQAQAILELRLHRLTGLEHDKIIAEYEELLEFIAGLLFILRSPERLMEVIKEELEEILAEYGDARRTVINANEIDMSLEDLINEEDVVVTLSHLGYAKYQPLSDYQAQRRGGKGKAATKVKDEDFVEKLLVANTHDTILCFSDFGKMYWLKVYQLPLASRTSRGRPIVNLLPLSDGERITAILPVREYAEDKYIIMATSNGTVKKTALTAYSNPRANGIIAVNLKDGDQLIGVDI

SEQ ID NO: 183791 - protein, 293 aa, Unknown
  Bacterial polypetide isolated from the Sargasso Sea
KMKNNNYQADSIKVLKGLEAVRKRPGMYIGDTDDGTGLHHMVYEVVDNSIDEALAGFCKNIDVRINNDGTITVKDDGRGIPTDTHKGEKKSAAEVIMTQLHAGGKFDHDSYKVSGGLHGVGVSVVNALSEKLQLEINRDGKKFFIEFNNGDAKSPLKVIGKSKETGTKITFLPSKDVFSSIKFSGNIIIKRMRELAFLNKGIKITFTDGSSKKEKVEEFKFDGGVVQFVEFLDNKREKLRNKNDNDLFKKPIQIEGKNNGIDIECALKWNASYAEDVLLLYKPNIYQKGWRNS

SEQ ID NO: 183792 - protein, 261 aa, Unknown
  Bacterial polypetide isolated from the Sargasso Sea
MTNKNTYQADSIKVLKGLEAVRKRPGMYIGDTDDGTGLHHMVYEVVDNSIDEALAGHCKNINVRINADGTVTVSDDGRGIPVDIHKTEKKSAAEVIMTQLHAGGKFDHDSYKVSGGLHGVGVSVVNALSKKLQLEINRDSKKYFIEFENGESKAPLKIIGKSKESGTKITFLPSTEIFSSIKFSANILIKRMRELAFLNKGIKIIFIDASLKKEKISEFKFDGGVIEFVDFLDEKREKLQNKNGNDLFRKPIYIEGKKNNI

SEQ ID NO: 183793 - protein, 307 aa, Unknown
  Bacterial polypetide isolated from the Sargasso Sea
GVGVSVVNALSEYLILEINRDGKTYNIEFENGIVSKELQIIGNSEKINNEYFTGTKITFLPTTNIFKDINFNFKVIEKRLRELAFLNTGISIFLTDKRQAEDKFINFKYDGGIKEYVKYLNKGKNLINSNPIFFQGEKNNISIECSLQWTDSYHENTICFTNNIIQRDGGTHLAGFRGALTRSIVNYINNNTKSGNNITGEDAREGLTCIISVKLPDPKFSSQTKDKLVSSEVRPVIESTSLNKLEQWIEENPSEIRKVVDKIIEASNAREAARKARELTRRKTGLENTSLPGKLADCQEKNPELSE

SEQ ID NO: 183794 - protein, 275 aa, Unknown
  Bacterial polypetide isolated from the Sargasso Sea
MVFEVIDNSIDEALAGYCKKIVVTINPENTVTIEDDGRGIPVDIHKGEKVSAAEVIMTQLHAGGKFDHDSYKVSGGLHGVGVSVVNALSEKLDLKIFRDGKEYEIKFKDGNSIKPLKQIGKTKKKGTKITFLPSKEIFSSIKFSSSILEKRIRELAFLNKGISISLVDNFSKKTKESVHKYDGGIVEFVKFINNKKPILINKNEKEVFKKPIYITSTKNNVIVECSFEWNAGYSEEVLPFTNNIPQKDGGTHLLGFRSALTRVINKYAGDRNNKK

SEQ ID NO: 183795 - protein, 190 aa, Unknown
  Bacterial polypetide isolated from the Sargasso Sea
MSDSEDKSGEGGSSVVERKPYDGPSISITKELKTSYLDYAMSVIVSRAIPDLRDGLKPVHRRILYAMHETGNTHEKSYRKSARPVGDVMGKYHPHGDSAIYDALVRMAQPFSMSLPLLDGQGNFGSMDGDNPAAMRYTEVRMDKPAAFLLSDIDKDTVDFQDNYDGKDREPSVLPARFPNMLVNGAGGIA

SEQ ID NO: 183796 - protein, 106 aa, Unknown
  Bacterial polypetide isolated from the Sargasso Sea
  misc_feature (99)..(99): Xaa can be any naturally occurring amino acid
MSDLAREITPVNIEEELKSSYLDYAMSVIVGRALPDVRDGLKPVHRRVLYAMNVLGNDWNKAYKKSARVVGDVIGKYHPHGDTAVYDTIVRMAQPFSLXYMLVDGQ

SEQ ID NO: 183797 - protein, 212 aa, Unknown
  Bacterial polypetide isolated from the Sargasso Sea
MEKSDLNFKNIQKPILVQDEMSSSYLSYAMSVIVSRALPDVRDGLKPVHRRIIYAMYKGGYDWTKNFRKSARIVGDVIGKYHPHGDQAVYDALVRLVQDFSMSLPLIEGQGNFGSIDGDPPAAMRYTETKLAKISKFLTEDLEKNTVDYRNNYDETEREPTVLPSQYPNLLVNGAGGIAVGMATSIPPHNLGEIIDATNSFIANKDITISQL

SEQ ID NO: 183798 - protein, 213 aa, Unknown
  Bacterial polypetide isolated from the Sargasso Sea
MVEGEKLIPINIEEEMKSAYIDYSMSVIVSRALPDVRDGLKPVHRRVLYGMHDMGIRSNTSYRKSARIVGDVLGKYHPHGDSSVYDTMVRMAQEWSLRYLLVDGQGNFGSIDGDSPAAMRYTEARMQKISEDILADIEKETVDLQLNFDDTLFEPKVLPTRVPNLLVNGASGIAVGMATNMPPHNLSEVIDGIIKYIEDNNITIDDLMTVIKA

SEQ ID NO: 183799 - protein, 191 aa, Unknown
  Bacterial polypetide isolated from the Sargasso Sea
TLINALGTGSIDFNIENLRYDKIVIMTDADVDGSHIRTLLLTFFNNYPFNQLIENGHIYLAQPPLFKVTKSNKSVYIKDEKSLEEYIFKVSGKADKKIKRGSLEYNQFMQDQREKLSIQRFKGLGEMNPEELWETTLNPENRTMLRVQYTKGTKEKSKEDQKMIEILMGDEVAPRKDFITSNALEVVNLDI

SEQ ID NO: 183800 - protein, 289 aa, Unknown
  Bacterial polypetide isolated from the Sargasso Sea
KVLKGLDAVRKRPGMYIGDTDDGSGLHHMVFEVIDNSIDEALAGYCKNIIVTINQDNTVSIEDDGRGIPVDIHKGEKISAAEVIMTQLHAGGKFDHDSYKVSGGLHGVGVSVVNALSEELELNIFRDGKEYLIKFKDGGSLKPLKQVGKTKKKGTKITFLPSKEIFSSIKFSASILEKRIRELAFLNKGISISLIDSSSKKKKEFVHKYDGGIVEFVKYINSKKPILTNKNEKVAFKKPVYVTATKNNVIVECSFEWNAGYSEEVLPFTNNIPQKDGGTHLLGFRKCFN

SEQ ID NO: 183801 - protein, 262 aa, Unknown
  Bacterial polypetide isolated from the Sargasso Sea
KFKGGLSDFVKYLDEHNNPLHNKVITVKNDTGDVPVDVALRYSNSYNDNILTFVNNINTIEGGTHLSGFRSALTRAMNNHASKNNLIKAKKNEKISLTGEDFREGLTAIISVKVAEPQFEGQTKTKLGNGDIKGIVDKIVYEGILDFLEQNPSIGRRVIEKALLAARSRSAARKARELIRRKSALGGSSLPGKLADCSNRDPNFCELYLVEGDSAGGSAKQGRDRKTQAILPLRGKVINSEKARIDKLLSNNEVQSIITALG

SEQ ID NO: 183802 - protein, 284 aa, Unknown
  Bacterial polypetide isolated from the Sargasso Sea
QADSIKVLKGLEAVRKRPGMYIGDTDDGTGLHHMVYEVVDNSIDEALAGYCKNIDIFINSNGTVTVKDDGRGIPVDLHKGEKKSAAEVIMTQLHSGGKFDHDSYKVSGGLHGVGVSVVNALSESLKLEISRDGKKYIIEFKNGDAKSNLKAVGNSKETGTQITFLPSKEIFSSIKFNPSIIQKRMRELAFLNKGIKISIHDLTSKKSKINVFKFEGGILEFVSFLDEKREKLNNKNGNLLFKKPILIEGKKDDVEIECALQWNAMYSEDVYPYTNNVYQKDEER

SEQ ID NO: 183803 - protein, 238 aa, Unknown
  Bacterial polypetide isolated from the Sargasso Sea
TNNIVQRDGGTLLAGFRGALTRSIVNYINKNTKNSNNITGDDAREGLTCIISTKLPDPKFSSQTKDKLVSSEVRPVMESISLDKIEQWIEENPSEIKKVVDKIIEASNAREAARKARELTRRKTGLENTSLPGKLADCQEKNPELSELFIVEGDSAGGSAKQGRDRKNQAILPLRGKILNVERANDKQVLTSNEIGTLITAIGAGVGNPTDDENQNKVDGKFDVNKMRYHKIIIMTDA

SEQ ID NO: 183804 - protein, 215 aa, Unknown
  Bacterial polypetide isolated from the Sargasso Sea
MLENIECIPSIPFSGKANSDEQELEWSMTWPDRDHEGIQESYVNLIPTKHGGTHVSGFRSGLSESVKEFADYRNLLPRGVKLSPEDVWMGLSYIISVRIEDPQFSGQTKEKLSSRAVSGFVTGLIKDAFTLWLNQHPEAGDQIVARAIENAQKRAKKNVKVKRKKATGGPTLPGKLADCTSDEPDLCELFIVEGDSAGGSAKQARDRVFQAILPL

SEQ ID NO: 183805 - protein, 304 aa, Unknown
  Bacterial polypetide isolated from the Sargasso Sea
DFSMRYTLIQGQGNFGSIDGDPPAAMRYTEVRMQKISDEILADLEKETVSFSENYDGSEQMPDVMPTKIPNLLINGSSGIAVGMATNVPPHNLTEIINGSLKLLENPKLSIDQIINSISGPDFPTGGIIDGKMGIYEAYKTGRGIIYVRSKSKVEESKTGKKSLVIYEIPYMVNKARTLEKIAELVKEKKIDGISEIRDESDKDGLRIVIDVKKGESVEVLENNLFAQTQLEQSFGINFTVLVDGQPRVLNLKEILQEFLKHRKDVVLKRTKFELKKAKERGHIVEGLMVAIANIDEIIKIIKN

SEQ ID NO: 183806 - protein, 192 aa, Unknown
  Bacterial polypetide isolated from the Sargasso Sea
MSKDYGADHIKVLEGLEAVRKRPGMYIGTTGINGLNHLIYEVVDNSVDEAMAGYCSVIDVRIDKDNIITIQDNGRGIPIDTHKEKNLPAVEVVLTTLHAGGKFEGEGYKVSGGLHGVGVSVVNALAEWLEITVFRDNQQYTQTYVRGIPKKLIGDFSDATDHPTGTVIKFKPDATIFDTVEFGVETIVHRLK

SEQ ID NO: 183807 - protein, 277 aa, Unknown
  Bacterial polypetide isolated from the Sargasso Sea
CRKALLAARSRSAARKARELIRRKSALGGSSLPGKLSDCSNRDPVFCELYLVEGDSAGGSAKQGRDRRTQAILPLRGKVINSEKARIDKLLSNNEVQSMITALGAGFGGSDEDGGERSPGDFDVEKLRYHKIIIMTDADVDGSHIRTLLLTFFYRKMKQVIDGGYLYLALPPLYRVAQGKKESYAYDDNERDLTIERMQKDNKNTKVSIQRYKGLGEMNPGQLWETTMDPETRTLMQVTVESAAEAAETFQNLMGSDVEARRTFIEKNAKFVANLDT

SEQ ID NO: 183808 - protein, 296 aa, Unknown
  Bacterial polypetide isolated from the Sargasso Sea
DGSATITDDGRGIPVEIHEEEGVSAAEVIMTQLHAGGKFDQNSYKVSGGLHGVGVSVVNALSEWLELRIWREGSEHVMRFKDGEAQGPLEVVGAAGGKKGTAVTFSPSSGTFTMTEFNFQTLEHRLRELAFLNSGVRLLLTDARGVEPNTVVLEYEGGIEAFVKHLDRGKTPLIENPIVIAGEQHGVRVDMSMEWSESYHETTLCFTNTIPQSDGGTHLAGFRAALTRTVNGYANDSGLAKKAKVSLSGDDAREGLTCVISVKVPDPKFSSQTKDKLVSSEVRPIVESIANEKFGQ

SEQ ID NO: 183809 - protein, 154 aa, Unknown
  Bacterial polypetide isolated from the Sargasso Sea
MPESDFAKALSPVNIEDEMRQSYMEYAMSVIVGRALPDVRDGLKPVHRRVLFAMKEMGNDWNKAYKKSARVVGDVIGKYHPHGDTAVYDTIVRMAQSFSLRYMLVDGQGNFGSVDGDAPAAMRYTEVRMSRVAHEILEDLDKETVEFSPKLRWL

SEQ ID NO: 183810 - protein, 57 aa, Unknown
  Bacterial polypetide isolated from the Sargasso Sea
MSQLENNYQADSIKVLKGLEAVRKRPGMYIGDTDDGTGLHHMVYEVVDNSIDEALAG

SEQ ID NO: 183811 - protein, 306 aa, Unknown
  Bacterial polypetide isolated from the Sargasso Sea
SSLYSYCNTIETPDGGSHEIGIRNGLLKATKLYGQKHQISKINNISYNDIFDYSNVIISIFINDPSFEGQTKKRIIMPTLQKEIENKTQEEFLLWLNSNKKNSKILLENLVERALQRTDLSKIQDLDRKSFKERNRLPGKLVDCSSRSQENTEIFIVEGDSAGGSAKQARNRELQAILPLRGKILNVYNVGLSKIADNNEIQNLIQSLGCGIGKNFDIKKLRYEKIILMTDADVDGSHIATLLITFFYKYMKNLIDENRLYLAMPPLFKIYDKNKYFYAFDEKERDVIIKKQFKNDNFNITRLKGG

SEQ ID NO: 183812 - protein, 314 aa, Unknown
  Bacterial polypetide isolated from the Sargasso Sea
IYAMNEAGYVSGKPSRKSARIVGDVMGKYHPHGDSAIYDAMVRLAQEFSMRVPLVDGQGNFGSMDGDSAAAMRYTEAKLSPISSYLVNDINHETVAYKENYDGTTLEPELLPAEFPNLLINGSEGIAVGMATKIPPHCPVEIINACCKFVENPEISDDDLLNYVNGPDFPTGGIIVGRSGIRSAYLTGKGSILIRGKTNIETTKKGRSSIIINEIPFAVKKSNLIETIAKVSRDKIIEGISELRDESNREGVRVVIDLKRDAQAEVILNQLFKFTPLQTSFGINMLALNKGVPELLNLKKSIKLFVEFRKDVIF

SEQ ID NO: 183813 - protein, 105 aa, Unknown
  Bacterial polypetide isolated from the Sargasso Sea
MINKNTYQANSIKVLKGLEAVRKRPGMYIGDTDDGTGLHHMVYEVVDNSIDEALAGYCKNINLKINNDGTITVHDDGRGIPVDIHKEEKKSAAEVIMTQLHAGGK

SEQ ID NO: 183814 - protein, 175 aa, Unknown
  Bacterial polypetide isolated from the Sargasso Sea
MNKKNYTSISLQEEMQRSYLEYAMSVIVGRALPDARDGLKPVQRRILFAMYELGLTPERPFRKCARVVGDVLGKYHPHGDQAVYDALVRLVQNFSTKYPTLDGHGNFGSVDNDPPAAMRYTETRLAPIAHKAFLEEIGSQTVNYSNNFDGSQKEPDVLPAQLPFLLLNGSSGIAV

SEQ ID NO: 183815 - protein, 287 aa, Unknown
  Bacterial polypetide isolated from the Sargasso Sea
CRDGLKPVHRRILYSMSESGYNYNKPYKKSARIVGDVMGKYHPHGDSAIYNSMVRMAQDFSMRLELIDGQGNFGSLDGDPPAAMRYTEARLSKVSDRLVQDIEKNTISFQANYDDTTSEPSVLPSQFPNLLVNGASGIAVGMATNIAPHNLGEVIDATLHLISNPECNTSDLQKYILGPDFPTGGQIIGKKGISETFETGRGACVVRSKTSIENFKKDREAIILHEIPYQVNKSKLLERIAEIVKNGIIDGISDLRDESDRNGVRVVIELKKDVDANIILNQLYKHT

SEQ ID NO: 183816 - protein, 295 aa, Unknown
  Bacterial polypetide isolated from the Sargasso Sea
EAAKKARELTRRKGVMDIASLPGKLADCQEKDPAKSEIFLVEGDSAGGSAKQGRDRSNQAILPLRGKILNVERARLDKMLSSAEIGTLITAIGAGVGNSEIDVEKARYHKIIIMTDADVDGSHIRTLLLTFFFRHMRPLVDAGYLYIAQPPLFRAKQGKSEVYLKDQLALDDYLIESGIKDVSLSIGDNETIYGEDLKISVEKCINIKRIIENLAKKLGFPQILSQLAILGVLNQKMFENENNLTKITQRLNQVLANSNNEWSSKYTYKNNNYEKKFIEISRINRGVKDVFVMGE

SEQ ID NO: 183817 - protein, 310 aa, Unknown
  Bacterial polypetide isolated from the Sargasso Sea
GADSIKVLKGLDAVRKRPGMYIGDTDDGSGLHHMVFEVIDNAIDEALAGHCKNITVTMNKDNTITVEDDGRGIPVDTHKSEKISAAEVIMTQLHAGGKFDHDSYKVSGGLHGVGVSVVNALSEKLELNIYRDGKEYLVVFKNGNTLKPLKQIGKTKKRGTRINFLPSKEVFSSTKFSASTIEKRIRELAFLNKGICVKLLDQTSKKEKEFVHKYDGGIVEFVKHINNKKPILVNKNEKEVFKKPVYVTSTKNNVVVECSFEWNAGYSEDVLPFTNNIPQRDGGTHLLGFRSALTRVINKYSNDRNSNKRN

SEQ ID NO: 183818 - protein, 91 aa, Unknown
  Bacterial polypetide isolated from the Sargasso Sea
MSDASKVQNAYGAEQIQVLEGLEPVRKRPGMYIGSTGPRGLHHLVYEVVDNAVDEALAGHCDKILVVLAEDGSAAISDNGRGIPTDVHPRT

SEQ ID NO: 183819 - protein, 235 aa, Unknown
  Bacterial polypetide isolated from the Sargasso Sea
YQADSIKVLIGLEAVRKRPGMYIGDTDDGTGLHHMVYEVVDNSIDEALAGHCKNINVKINSDGTITVNDDGRGIPVDMHKGEKKSAAEVIMTQLHAGGKFDHDSYKVSGGLHGVGVSVVNALSEKLELEINRDGKKHFIEFKNGEAKSPLKVVGKSKNTGTQITFLPSKDIFSSIKFSANILIKRMRELAFLNKGIKIIFTDASQKKEKISEFKYDGGVLEFVDFLDEKREKLQN

SEQ ID NO: 183820 - protein, 291 aa, Unknown
  Bacterial polypetide isolated from the Sargasso Sea
RILYAMHESGYEWNKQHRKSARVVGDVIGKYHPHGDQAVYDALVRLAQDFSMSVPLLDGQGNFGSMDGDRAAAMRYTEVRMAKIASFLLEDIEKETVDFRPNYDETESEPSVLPAKYPNLLVNGAGGIAVGMATNILPHNLGEVIDASIAYLKNADVTFEEINQTIKGPDFPTGGTIIGIKGIKDSQSSGRGSIIVQAKSNIEEFKTDREAIVFTEVPYQVNKSSLLEKIAELVRDKKIDGISDLRDESDRHGVRVVVELKKGVISQVVLNKLYKFTALQSSYGVNSLALV

SEQ ID NO: 183821 - protein, 287 aa, Unknown
  Bacterial polypetide isolated from the Sargasso Sea
PVDIHKSEKKSAAEVIMTQLHAGGKFDHDSYKVSGGLHGVGVSVVNALSKKLHLEINRDSKKYFIEFENGEAKAPLKAIGKSKQSGTKITFLPSTEIFSTVKFSANILIKRMRELAFLNKGIKIIFIDASLKKEKISEFKFDGGVIEFVDFLDEKREKLQNKNGNDLFRKPIYIEGKKNNIEIECSMKWNAGYGEEIFPYTNNIYQKDGGTHLLGFRSALTRVVNKYANEHNLLKKNKLAISGDDIKEGLTCVLSTKIPDPKFSSQTKDKLVSSEVRMIVETVVNEK

SEQ ID NO: 183822 - protein, 244 aa, Unknown
  Bacterial polypetide isolated from the Sargasso Sea
FLNKGISLNLYDKTGLKIKEYLNKYEGGVMEFVRYINKKKPILINKNEKEVFKKPILITGSKNNVSVDCAFEWNAGYSEEVLAFTNNIHQKDGGTHLLGFRSALTRVINKYSADNKKNKINLSGEDIKEGLTLVLSVKMPDPKFSSQTKDKLVSSEVRLIVENIISDKVSTWLDQNPSVTKIVIEKIMQAAIARDVARKARDSVRRKGSFELSGLPGKLADCQITKKEGTELYIVEGDSAGGSA

SEQ ID NO: 183823 - protein, 195 aa, Unknown
  Bacterial polypetide isolated from the Sargasso Sea
MSKTTNNYQADSIKVLKGLEAVRKRPGMYIGDTDDGTGLHHMVYEVVDNSIDEALAGYCKNINVKINSDGTITVNDDGRGIPVDIHKGEKKSAAEVIMTQLHAGGKFDHDSYKVSGGLHGVGVSVVNALSEKLKLEIYRDGKKHYIEFQNGEATAPLKVVGKAKNTGTQITFLPSKEIFSSTKFIANVLIKRMRE

SEQ ID NO: 183824 - protein, 177 aa, Unknown
  Bacterial polypetide isolated from the Sargasso Sea
MAENSAPPPPLDPDIEHVSIADEMRKSYLDYAMSVIVSRALPDVRDGLKPVHRRILHVMNENSYDWNRPYRKSARVVGDVMGQYHPHGDQAIYDAMVRMAQDFSMRLPLIDGQGNFGSMDGDPPAAMRYTEARLERVARELLDDIDKDTVDFQPNYDETTKEPTVLPAKFPNLLVNG

SEQ ID NO: 183825 - protein, 175 aa, Unknown
  Bacterial polypetide isolated from the Sargasso Sea
MIHHYDAENIKVLEGLEAVRKRPGMYIGSTGISGLNHLVYEVVDNSIDEAMAGFCSDVYISIEPDNIVTVKDNGRGIPINEHKEKKLPAVEVVMTTLHAGGKFEGEGYKVSGGLHGVGVSVVNALGEWLEVIVTRDDKRYTQKYFRGKPKKLVGEYEDVPGVETGTTIRFKPDAK

SEQ ID NO: 183826 - protein, 203 aa, Unknown
  Bacterial polypetide isolated from the Sargasso Sea
MTNKNTYQADSIKVLKGLEAVRKRPGMYIGDTDDGTGLHHMVYEVVDNSIDEALAGYCKNISVKINVDGTITVNDDGRGIPVDIHKGEKKSAAEVIMTQLHAGGKFDHDSYKVSGGLHGVGVSVVNALSEKLQLEINRNGKKYFIEFQNGEAKAPLRVVGKSKQTGTQITFLPSKEIFSSIKFSASILIKRMRELAFLNKGIK

SEQ ID NO: 183827 - protein, 289 aa, Unknown
  Bacterial polypetide isolated from the Sargasso Sea
MKNYQFWFDQNPSIAKIILAKIIQAAMARDVARKARENVRRKGALELSGLPGKLADCQIGKQDGTELFIVEGDSAGGSAKQGRNRSNQAVLPLRGKILNTYVEDFNVKKNQNGNGNGSDQRTKALSKMVSSNEIVTLINALGLDPKAQEIDLKDLRYGKIIIMTDADVDGSHIRALLLTFFNNKPFSKLIENGHIYLAQPPLFKINKGSKGIYIKDEEELENYIINNSKDLKKSKKGSKEFIDFLEIEKSKMSIQRFKGLGEMNPEELWSTTLNPETRNLLQVQYSKNL

SEQ ID NO: 183828 - protein, 178 aa, Unknown
  Bacterial polypetide isolated from the Sargasso Sea
NIENLRYEKIIIMTDADVDGSHIRTLLLTLFNNYPFNELIEKNHLYLAQPPLYKVSKGSKISYIKNDKELEEFLIKSSGKSKNDIKKNAKEFSKFLEKEKSKLNIQRFKGLGEMNPEELWETTLNPEKRILLQVKYSNSTKAKSKKDQDLIQILMGDEVAPRKDFIVNGALEVSNLDI

SEQ ID NO: 183829 - protein, 216 aa, Unknown
  Bacterial polypetide isolated from the Sargasso Sea
HGDQAVYDALVKLVQNFSTKYPTLDGHGNFGSVDNDPPAAMRYTETRLAPIAHKGFLEEIGSETVNFSNNFDGSQKEPDVLPAQLPFLLLNGSSGIAVGMATNIPPHNLGEIVDGLVALVKNKDISDKKLSNIIKGPDFPTGGELIYSHAIEELYQTGKGSITIRGVVNTEEVNLGKGKHKKNAIVITELPYQINKAGWIEKLAELVNFRQDYWDF

SEQ ID NO: 183830 - protein, 330 aa, Unknown
  Bacterial polypetide isolated from the Sargasso Sea
SYVNNINTHEGGTHLSGFRAGLTRTLKKYADASGMLDKLKFEIAGDDFREGLTAIISVKVQEPQFEGQTKTKLGNREVTAAVSQAVSEMLENYLEEHPNDAKTIVQKVILAAQARHAARKAREMVQRKTVMSGGGLPGKLSDCSEQDPEKCEVFLVEGDSAGGTAKQGRDRNFQAILPLRGKILNVEKAMHHKVFENEEIRNIYTALGVTIGTEEDSKALNLEKLRYQKVVIMCDADVDGSHIATLILTFFFRYMRELVEAGCVYIATPPLYLLKKGAKKAYAWSDKERDRLNEEFGGSASIQRYKGLGEMNAEQLWDTTMNPEFAPCVR

SEQ ID NO: 183831 - protein, 290 aa, Unknown
  Bacterial polypetide isolated from the Sargasso Sea
IAVGMATNIPPHNLYEVIDAVIALSKKPGLKIKDLMKYIPGPDFPTAGIITTDKADNGIESAYETGKGKVIMQALTHIETDKKKSREKIIISELPYQVNKARLIEKIAELVRDKKLEGISELRDESDKDGMRVVIELKKSEISEVLLNNLFQQTQMRTSFSINMVALINGKPRAVNLKEILSAFIEHRKEIVTKRTIFELKKAREKAHILEGLAVALSNIDEIIKLIKESKNSQEAKEKLLSKKWKAGIILKMLDSSKGSITKPEDLNENLGLVKNQYLLSENQAQAILE

SEQ ID NO: 183832 - protein, 151 aa, Unknown
  Bacterial polypetide isolated from the Sargasso Sea
KLRYHRIIIMTDADVDGSHIRTLLLTFFFRQMFEILNRGHVYIALPPLYKVSKGKTIKYASSEKEKDIALKELSKTGNRGIEIQRYKGLGEMNPDQLWTTTMDPQNRRMMRVRIDDANEANNSFEVLMGDQVEPRREFIDENALSVANLDI

SEQ ID NO: 183833 - protein, 228 aa, Unknown
  Bacterial polypetide isolated from the Sargasso Sea
MSSSYLSYAMSVIISRALPDIRDGLKPVHRRILYAMHKGGFDWSKQFRKSARIVGDVIGKYHPHGDQAVYDALVRMVQDFSMSLPLIDGQGNFGSIDGDPPAAMRYTETRLAKVSQYLIDDIDKETVSFKSNYDETEFEPNVLPAQYPNLLVNGAGGIAVGMATSIPPHNLGEVIDGTLALIKNKDIKIKDLMKFIPGPDFPTGGIIIGKDIIKQGYKIGRGSFKIRG

SEQ ID NO: 183834 - protein, 285 aa, Unknown
  Bacterial polypetide isolated from the Sargasso Sea
DFSMRYELVDGQGNFGSIDGDNAAAMRYTESRMTKLSSEMLKDLDKDTVDWGPNFDETLKEPAVLPSAIPTLLVNGSEGIAVGMATKIPPHNLKEIINGLIALIDDSNISIDGLMEHVKGPDFPTAGLIMGMDGLKQAYETGRGKIKMRARAHIETNKNGKDSIVITEVPFQTNKANLVEKIADLVGQKKIEGIRDLRDESDKDGIRVVVETKKDVVPEVILNQLYQFTQLQDTFGIILLALVEGVPKVMSLKTTLQHFVDFRHDVVVRRTEFELKEAEARAHIL

SEQ ID NO: 183835 - protein, 273 aa, Unknown
  Bacterial polypetide isolated from the Sargasso Sea
GELINGLKSIIKDPSIEDRELFEIIKGPDFPTGGQILGREGIKETFQTGRGSITMRGVANIEQIKSTGRAEKDAVIITELPFQTNKAALIERIADLVNEKKLEGISDIRDESDRDGMRIVIELKRDAYPQVVLNNLFKLTPLQNNFSANILALVKGEPTTLSLRKMLDVFLDFRVDTIKRRTGFLLKKAEERDHIVKGLLLALGAMDEIINLIRSAKDTVSAREKLQTDHELSATQAEAILQMQLRRLTALEADKIKGEHDELTRKINLYQQI

SEQ ID NO: 183836 - protein, 290 aa, Unknown
  Bacterial polypetide isolated from the Sargasso Sea
IVGDVIGKYHPHGDQSVYDALVRMVQDFSMSLPLVQGQGNFGSIDGDPAAAMRYTETRLSKVSQYLIDDIEKNTISFKSNYDETEKEPTVLPAQYPNLLVNGAGGIAVGMATSIPPHNLGEIINGTLALIDNKDIKIRELMKHVPGPDFPTGGVIIGKDIIKQGYNNGRGSFKIRGEVSIESLKNGRERLVITSIPYQVNKSVLNERIAQLVREKKIEGIKDIRDESNREGIRVAIDLRNGVEPETIKRQLYKNTQIESSFGFNTLAIVEGKPKTCTLKDFFINFLSFRE

SEQ ID NO: 183837 - protein, 301 aa, Unknown
  Bacterial polypetide isolated from the Sargasso Sea
KDKYDSSSIKVLKGLEAVKKRPGMYIGDTDDGSGLHHMVFEVLDNAIDEGLAGFCDYIEVKLMKDGFVSVSDNGRGIPVDMHEEGVPAAQVIMTSLHSGGKFDENSYKVSGGLHGVGVSVVNALSSKLILEIERDGKKYYQEYAEGTPKTDLKENGKSDKTGTKVSFLPSKNTFAFTEFNVEILKRRIRELSFLNSGIAITIIDERTDQKFDFKSEGGLVEFVNYLTGKKEPVGTPFTAQASMKGIGVEIAIQWTNTYSENVQCFTNNIPQIDGGTHMAGFRGGLTRAIKTFIKKEDMRRK

SEQ ID NO: 183838 - protein, 74 aa, Unknown
  Bacterial polypetide isolated from the Sargasso Sea
MAKKPSKAKQKAASQKTYDSSNIKVLKGLEAVKKRPGMYIGDTDDGTGLHHMVFEVVDNSIDEALAGYCDKIEV

SEQ ID NO: 183839 - protein, 203 aa, Unknown
  Bacterial polypetide isolated from the Sargasso Sea
GRDRNFQAILPLRGKILNIEKTDDTKIYKNTEIQSLITALGLGIKGEEFEESSLRYHRVVIMTDADVDGAHIRTLLLTFFYRYQRELVEKGFIYIACPPLYKVERGKNHNYCYNENQLKDTIQGFGENANYNIQRFKGLGEMMPKQLWDTTMNPQTRMMKRVEIEDALEADRIFNILMGDKVAPRREFIETHSSNLDMATLDI

SEQ ID NO: 183840 - protein, 272 aa, Unknown
  Bacterial polypetide isolated from the Sargasso Sea
EAVKKRPGMYIGDTDDGTGLHHMVYEIVDNSIDEALAGHCDEITVKILSDDCVSVSDNGRGIPTDMHEEGMSAAEVIMTKLHAGGKFDDNSYKVSGGLHGVGVSVVNALSEDLKLTIYRGGKIHEQEYADGAPKGKLKVTGKTDKTGTQVTFVPSPTTFSDINFQYDVLETKLRELSYLNAGLKINLIDERNSKKKEFFHKGGLAEFVSFLNTKRTTVNSVFHFVKEAADGITIEVSLQWNDGYQENIQCYTNNIKQRDSGTHLVGFRTALT

SEQ ID NO: 183841 - protein, 262 aa, Unknown
  Bacterial polypetide isolated from the Sargasso Sea
AGYCKNISVDINDDGTVTVHDDGRGIPVDIHKTEKKSAAEVIMTQLHAGGKFDHDSYKVSGGLHGVGVSVVNALSENLKLTIDRDGKKYFIEFKNGDAIKPLKIIGKSKSNGTEITFLPSKEIFSSTKFSFSILQKRLRELAFLNKGIKISIIDHCQKKIKKSEFKFEGGIIEFVEHLSSNKDQLKNKNDKDLFKKPIFIEGNKDKLEIECSLKWSANYSEDVYPYTNNIFQKDGGTHLLGFRSALTRVINKYANEQNLLKK

SEQ ID NO: 183842 - protein, 296 aa, Unknown
  Bacterial polypetide isolated from the Sargasso Sea
LQFSGQTKEKLSSRAVSGFVTGLIKDAFTLWLNQHPEAGDQIVARAIENAQKRAKKNIKVKRKKATGGPTLPGKLADCTSDEPDLCELFIVEGDSAGGSAKQARDRVFQAILPLRGKILNSWEVDESNLLSSQEISNISQALGVEPGADELGNLRYHKICILADADSDGLHIATLICALFLKHFRKLVENGHVYVSMPPLYRIDVGKEVHYALDETEKDSILKALEKKKPNTKTTVTRFKGLGEMSPVQLRETTMLQDSRRLVKLTIDNASYTEELMDKLMAKKRYTDRKEWLEEK

SEQ ID NO: 183843 - protein, 249 aa, Unknown
  Bacterial polypetide isolated from the Sargasso Sea
DNGRGVPVDNHKEEGISAAQLIMTELHAGGKFDQNSYKVSGGLHGVGVSVVNALSEKLLLEINRDKNIYRMDFNHGAVENALKVVGESEEINGKIYTGTKITFLPSKNIFKNIEFNFSTIEKRLRELAFLNTGVNIILLDKRASQKKEINFKYDGGIIEYVNYLNKGKNCINSSPIYFLGTKNNVNVECALQWTDAYHENTLCFTNNIAQRDGGTHLAGFRGALTRSIVNFINQKIKNSSNISGDDARE

SEQ ID NO: 183844 - protein, 329 aa, Unknown
  Bacterial polypetide isolated from the Sargasso Sea
EAARKAREVSRKNSAFEISSLPGKLADCQDKLAENCELFIVEGDSAGGSAKQARDRKNQAVLPLKGKILNTEKARPDKAVSSAEIATLIQALGTGFKPDFNIEDLRYHKIIIMTDADVDGSHIRTLLLTFFYRHMPDLIKEGYVYIAQPPLYRIKKGKTELYLKDDKELDNFLINDAVEQAVLLQKNGISVKGVDLANLFNLLISFDKLLVQLSAGNDSLYFLLEQATISNFFKSSNFDNQEKTNKTIDYLLKRLNFDLLIWSAEIKSGECIVFYKTENKVKEKFEILFKDFDEFNYMNLKRFSDRLQEYFLNSSTLEINDEKFDIFSP

SEQ ID NO: 183845 - protein, 299 aa, Unknown
  Bacterial polypetide isolated from the Sargasso Sea
DVLGKYHPHGDQAVYDALVRLVQDFSTKYPTLDGHGNFGSVDNDPPAAMRYTETRLAPIAHQGFLEEIGSETVSYSDNFDGSQQEPDILPAQLPFLLLNGSSGIAVGMATNIPPHNLGEVVDGLIALIKNKEISDSKLLRIILGPDFPTGGELIYSDSIKDLYESGRGSVTIRGVVDTEEINLGKGKHKKNALIISELPYQISKSGWIEKLADLVNMGKIDGISDIRDESDRDGMRILIELKKDSNPEIVISNLYKKTALQSNFGGIFLALINGKPVQLTLRKYLNYFLEFREETIKKR

SEQ ID NO: 183846 - protein, 229 aa, Unknown
  Bacterial polypetide isolated from the Sargasso Sea
MENIEIKNNTKPKSILVHQEMSSSYLSYAMSVIVSRALPDVRDGLKPVHRRIIYAMYKGGYDWGKPFRKSARIVGDVIGKYHPHGDQAVYDALVRLVQEFSMSLPLIEGQGNFGSIDGDPPAAMRYTETKLSKVSEYLTNGIEKNTIDFRNNYDDTEQEPVVLPSQYPNILVNGAGGIAVGMATSIPPHNLGEVINGTINFIKNRDITISQLMKDIPGPDFPTRWNYYW

SEQ ID NO: 183847 - protein, 301 aa, Unknown
  Bacterial polypetide isolated from the Sargasso Sea
YPNLLVNGAGGIAVGMATSIPPHNLGEVIDATLALIKNKDIKINELMKHIPGPDFPTGGLIIGKDIIKQGYKTGRGSFKIRGEISVENLKNGKDRLVISSIPYQINKANLNERIAELVRDKKIEGISDIRDESNSEGIRVSIDLRRNIEPETVKRQLYKYTSIESSFGFNSLAIVDQKPKTCSLKDFLENFLKFREDVVIKRTKFDLRKAEERVHILLGLSVSVENIDKVIKIIRSSKNPEEAKNSLLETKWKINKATSLIKLVDSKNYKGKYTLSSDQVTSILELRLQKLTGIGINEIEV

SEQ ID NO: 183848 - protein, 316 aa, Unknown
  Bacterial polypetide isolated from the Sargasso Sea
VTENFSEWFEENPADAKIVGSKVIEAAVAREAARKARELTRKKNSLDVANLPGKLADCQEKDPSKAEIFLVEGDSAGGSAKQGRSRKNQAVLPLRGKILNVERARPDKMLSSQEIGTLITALGTGIGSDDFDIEKLRYHKIIIMTDADVDGSHIRTLLLTFFFRKMPALVEKGYIFIAQPPLYKVSKGKSEVYLKDDKGLENYLLEAGVEEALLKVSDNVVSSGNELREIVDNAKSFINIINSISDEDAKFIIEQAALIAPIEKLKDEKNNEKLFENLCKRLDGISLEYERGWRYRVTDKRKIVFYRLLRGERKDE

SEQ ID NO: 183849 - protein, 155 aa, Unknown
  Bacterial polypetide isolated from the Sargasso Sea
MSEENDKPLGHSLISITDEMKKSYLDYAMSVIVSRALPDVRDGLKPVHRRILYAMIEGGYDWSKPYRKSARVVGDVMGNYHPHGDTAIYDSMVRMAQDFSMRLMLVDGQGNFGSVDGDPPAAMRYTESRLARSSESLLRDIDKDTIDYIQNMMNL

SEQ ID NO: 183850 - protein, 204 aa, Unknown
  Bacterial polypetide isolated from the Sargasso Sea
MKNNTYQADSIKVLKGLEAVRKRPGMYIGDTDDGTGLHHMVYEVVDNSIDEALAGYCKNIEISLNANGTVTVSDNGRGIPVDIHKDEKKSAAEVIMTQLHAGGKFDHDSYKVSGGLHGVGVSVVNALSEKLKLEVDRNGKKYLIEFENGEAKSSLKEISKSKLTGTSITFLPSKKIFSSIKFSSSILIKRMRELAFLNKGIKII

SEQ ID NO: 183851 - protein, 72 aa, Unknown
  Bacterial polypetide isolated from the Sargasso Sea
MSDNLKKKDNLDYKADSIKVLKGLDAVRKRPGMYIGDTDDGSGLHHMVFEVVDNAIDEALAGHCKNISISMN

SEQ ID NO: 183852 - protein, 268 aa, Unknown
  Bacterial polypetide isolated from the Sargasso Sea
HRRILYAMYKGGFDWSKQFRKSARVVGDVIGKYHPHGDQAVYDALVRMVQDFSMSLPLIDGQGNFGSIDGDPPAAMRYTETRLSKISQFMIDDIEKQTVQFKSNYDETEKEPEVLPSQYPNLLVNGAGGIAVGMATSIPPHNLGEVINGTLALIENKDIKINELMKHIPGPDFPTGGIIIGKDIIKQGYKTGRGSFKVRGEIKIENLKNGKDRLVITSIPYQVNKSNLNERIAELVREKKIEGISDIRDESNREGIRVAIDLREMLNL

SEQ ID NO: 183853 - protein, 274 aa, Unknown
  Bacterial polypetide isolated from the Sargasso Sea
TQSLEFALNWSVNEAAQITESYVNLIPTPQGGTHVSGLRSGVLEALREFCEFRDLLPRGVKLTGEDTFDHCNFVLNAKMREPQFAGQTKERLSSRDATAFISSATKDSFSIWLNQNTSEAELIANLAIARATTRLQKAKKVTRKRVTAGPALPGKLADCSSPDADRAELFLVEGDSAGGSAKQARDRDYQAILPLRGKILNTWEVDSSQVLASETVHDIAQAIAVDPGSDDLSNLRYNKICILADADSDGLHIATLICALFMRHFRSLVTEGHV

SEQ ID NO: 183854 - protein, 304 aa, Unknown
  Bacterial polypetide isolated from the Sargasso Sea
NNIRTIDGGTHIEGLKTVLTRTFNNLAKKRGKRKDIEKNLAGENIREGLTVVLSVKVPDPEFEGQTKTKLGNTEVRGIVDSLIGEALTKYMEFNPGILDLILEKAIQSFNAAEAARRARELVRRKSVLESSTLPGKLADCSSRDPSESEIYIVEGDSAGGSAKQGRDRNFQAILPLRGKILNIEKTDDTKIYKNTEIQSLITALGLGIKGEEFDESSLRYHRVVIMTDADVDGAHIRTLLLTFFYRYQRELVEKGFIYIACPPLYKVERGKNHNYCYNENQLKNTIQGFGENANYNIQRFKGLG

SEQ ID NO: 183855 - protein, 274 aa, Unknown
  Bacterial polypetide isolated from the Sargasso Sea
KTLQKKLRELAFLNSKISILLQDFREDKPWEKMMSYEGGLKEFVKYLDQSKKAMIDEPISLLANKDGIEVNLALWWNDSYYETVNCFTNNIPQKDGGTHLAGLRGALTRVVNSYAQESGMSKKENVQLVGDDIREGLTCVLSIKVADPKFSSQTKDKLVSSEVRPVVESLVNDALSEWFEEHPSEAKNIISKVIEAAAARDAARKARELTRRKGALDVSSLPGKLADCQEKDPEKCEIFIVEGDSAGGSAKQGRDRSTQAILPLRGKIINCEKA

SEQ ID NO: 183856 - protein, 277 aa, Unknown
  Bacterial polypetide isolated from the Sargasso Sea
AQYPNLLVNGAGGIAVGMATSIPPHNLGEIIDGTLALIKNKDIKVKELMKHIPGPDFPTGGVIIGKDIIREGYKTGRGSFKIRGEINVENLKNGKDRLVITSIPYQVNKSNLNEKIAELVRDKKIEGISDIRDESNREGIRVAIDLRRSVEPETIKRQLYKYTSIETSFGFNSLAIVDNKPKTCSLKDFLENFLKFREDVVIKKTKYDLKKAEDRVHVLLGLSVSVENIDKVIKIIRSSKNPEEAKNTLIKTKWKITKSAKLIKLVDSKNYKGSYNL

SEQ ID NO: 183857 - protein, 274 aa, Unknown
  Bacterial polypetide isolated from the Sargasso Sea
NPSEIKKIIDKVIEASSAREAARKARELTRRKTALDISSLPGKLADCQEKRPEDAELFIVEGDSAGGSAKQGRDRKYQAVLPLKGKILNVERARRNKILSNNEIGTLITAIGAGVGNPTGNSEEDKNDGKFNIEKMRYHKIIIMTDADVDGSHIRTLLLTFFYRHMKPAIESGRLFIAQPPLYKAKKGSSIRYLKNENEMENFLITGGLKDLLMEKLSENMKVMQISGNELRSVVNLAKTAQKLILSLTRRLNNKKVIEQAAVIASFKPQVSGE

SEQ ID NO: 183858 - protein, 256 aa, Unknown
  Bacterial polypetide isolated from the Sargasso Sea
NSDGSVTVEDNGRGIPTEIHPEEKISAAEVIMTQLHAGGKFDQDSYKVSGGLHGVGVSVVNALSSKLHLNIYRDQKEHFIEFNNGEALSPLSITNKNIKKNGTKLTFYPDKNIFSDTEFDSKILKQRFREMAFLNSKITIIFYDSRNADKKESKFHYEGGIGEFVKYLDKSKKSLIEKPISIEGYKNNIEFSCSLWWNDSYYEQILTFTNNIRQKDGGTHLSGFRAALTRVVNNYLDGSKVSKKQSISPNSDDIRE

SEQ ID NO: 183859 - protein, 292 aa, Unknown
  Bacterial polypetide isolated from the Sargasso Sea
SARVVGDVIGKYHPHGDTAVYDAIVRMTQNFSLRYPLIQGQGNFGSIDGDSAAAMRYTEIRMQKITDQILADIEKETVSYSPNYDGTEDIPDVLPTRIPNLLINGSSGIAVGMATNIPPHNLTEILDACLYILENPDCLIDDLLKIVKGPDFPLGGIITGIDGIQQAYRTGQGKVYVRGKTSIEDMKSGKEAIIISEIPFMVNKARMLERIAELVKEKKLEGIGEIRDESDKDGMRVVIELKKGEVPEVVLNNLIKNSQLEQVFGINNVVLVDGKPQLCNLQQLLNIFLITE

SEQ ID NO: 183860 - protein, 233 aa, Unknown
  Bacterial polypetide isolated from the Sargasso Sea
MSDINLEQQKDYDAGSIKVLKGLDAVRKRPGMYIGDTDDGSGLHHMVYEVVDNSIDEALAGHCDKVDVILNPDGSVTVKDNGRGIPTDIHEGEGISAAEVIMTQLHAGGKFDQNSYKVSGGLHGVGVSVVNALSSKLDLKIYRSKTIHEMSFLDGVPKDGLKEVGSCEEQVSGTEITFHPSDNIFTNIKFNFQTLEHRLRELAFLNSGVEINLSDNRGVDNKSVSMNYTGGLE

SEQ ID NO: 183861 - protein, 224 aa, Unknown
  Bacterial polypetide isolated from the Sargasso Sea
MAKKKKTKSKQLDVLDDKVYPNIDITDELEKSYLDYAMSVIVSRALPDIRDGLKPVHRRILYSMYESSYHHNKPYKKSARIVGDVMGKYHPHGDSAIYESMVRMAQDFTMRLPLIDGQGNYGSMDGDPAAAMRYTEARLDKVSSFMLEELEYDTVQLRPNYDETLTEPKVLPSRFPNIFVNGASGIAVGMATNIPPHNLGEIIDATLLLVDEPDSTSKQLHKIV

SEQ ID NO: 183862 - protein, 269 aa, Unknown
  Bacterial polypetide isolated from the Sargasso Sea
NKGINITLVDSTTSKTKEFTYNYEGGILEFVKFINQKKPILVNKNEKEVFKKPIFVNSQKNSIIVECSLEWNAGYAEEVLAFTNNIHQKDGGTHLLGFRSALTRVINRYASEKNVNKKNKITLSGDDIKEGLTAVLSVKMPDPKFSSQTKDKLVSSEVRLIVENIIGDKISTWFDQNPTVTRNVLEKITQAAIARDVARKARDSVRRKGALELSGLPGKLADCQISKREGTELFIVEGDSAGGSAKQGRMREYQAVLPLRGKILNTYVG

SEQ ID NO: 183863 - protein, 302 aa, Unknown
  Bacterial polypetide isolated from the Sargasso Sea
SFRNNYDETEKEPTVLPSQYPNLLVNGAGGIAVGMATSIPPHNLGEVINATNALIDNQNITISQLMKHIPGPDFPTGGLIIGKDFIKQGYNKGRGSFKIRGEIEFEEKKNGRSILVIKSIPYQINKSVLNEKIALLARDKKIEGISDIRDESNREGIRIVIELRRGVEPETIRRQLYKLTNIESSFGFNSLALVDNKPKILNLKEFISEFLKFRESTVLKRVKFDLKKAEERAHILIGLATAVENIDAIIKIIKNSKNNEEAKKNLLGKKWKIKKSSKLISLIEKKKNVLSYSLSDKQVLAI

SEQ ID NO: 183864 - protein, 308 aa, Unknown
  Bacterial polypetide isolated from the Sargasso Sea
FLNKGLQINLTDETKAKTKVYQNKYDGGIIEFVNDLDNSKSFLINKNEKRVFKKPIYVSGEKNSVIVECSLQWNAAFSEEVLAFTNNIHQKDGGTHLLGFRSALTRIVNKHASEKNLNKKNKVNIGGEDIKEGLTAVLSIKMPDPKFSSQTKDKLVSSEIRNVVETIVSEKLSIWFDQNPSVVKVVLDKILQAAIARDVARKARDSVRRKGSLELSGLPGKLADCQISSMEGTELFIVEGDSAGGSAKQGRKRENQAVLPLRGKILNTFIDENKRKVNGGNGVLENKTLAKMMSSNEIVTLINALGTG

SEQ ID NO: 183865 - protein, 272 aa, Unknown
  Bacterial polypetide isolated from the Sargasso Sea
MVEKNKSFKPIFVQDEMSSSYLSYAMSVIVSRALPDVRDGLKPVHRRIIYAMYKGGYDWSKPFRKSARIVGDVIGKYHPHGDQSVYDALVRLVQDFSMSLPLISGQGNFGSIDGDPPAAMRYTETKLGRIAQFLTEDLEKNTVNFRSNYDETEKEPEVLPSQYPNILVNGAGGIAVGMATSIPPHNLGEIINATIAFINNKEITISQLMKHVPGPDFPTGGVIIGKDIIKQGYNKGRGSFKIRGEIDLEEKKGGRETLIIKSIPYQVNKSLL

SEQ ID NO: 183866 - protein, 284 aa, Unknown
  Bacterial polypetide isolated from the Sargasso Sea
MKKTERTGTTVQFWPSKKIFSNTTLVLKTLENRVRQLAFLNSNVRVTLADLRTPKAEPIEFYYQGGLTAYVQFLNSRKSTLNKIIPFNGESNGIKVEGALQWNDGYNENMLCFTNNIPQGDGGTHLQGFRSALTRSLVGYSNTVAVSKKGNITISGDDAREGMTCVLSVKVPDPKFSSQTKDKLVSSEVRPVVEKIISEQLSAWLEQTPGEAKKLVSKIIEAASAREAARKARELTRRKNVLETSSLPGKLADCQEKDPINSELFIVEGDSAGGSAKQGRDRVT

SEQ ID NO: 183867 - protein, 133 aa, Unknown
  Bacterial polypetide isolated from the Sargasso Sea
MSENGVYDSESIKVLKGLDAVKKRPGMYIGDTEDGTGLHHMVQELVDNSIDEALAGHCDTVFVTIHPEQAVTVRDNGRGIPVDIHAEEKVSAAELIMTTLHAGGKFDDNAYKVSGGLHGVGVSVVMHYRLSLS

SEQ ID NO: 183868 - protein, 246 aa, Unknown
  Bacterial polypetide isolated from the Sargasso Sea
MTDSVGPVGGGPGGSDDRIIQTDLRNEMSRSYLEYAMSVIVGRALPDARDGLKPVHRRILYAMYELGLTSDRPYRKCARVVGEVLGKYHPHGDTAVYDALVRMAQDFSMSMPLIDGHGNFGSVDNDPPAAMRYTESRLRALTTDSLLEDIEAETVDFADNFDGSQQEPTVLPARIPQLLLNGSAGIAVGMATNIPPHNLNELIDGLLALIADPEISDQELIRLIPGPDFPTGGQILGRDGIRDTYL

SEQ ID NO: 183869 - protein, 116 aa, Unknown
  Bacterial polypetide isolated from the Sargasso Sea
MIKNNTNTYQADSIKVLKGLEAVRKRPGMYIGDTDDGTGLHHMVYEVVDNSIDEALAGYCKKIEVSINNDGSITVQDDGRGIPVDIHKGEKKSAAEVIMTQLHAGGKFDHDSYKVS

SEQ ID NO: 183870 - protein, 106 aa, Unknown
  Bacterial polypetide isolated from the Sargasso Sea
MSDSESYNSDSIKVLKGLEAVKKRPGMYIGDTEDGTGLHHMVHELVDNSIDEALAGYCDEIIVIIHKEEAVTVKDNGRGIPVDMHPEEKVSAAEVIMTTLHAGGEV

SEQ ID NO: 183871 - protein, 329 aa, Unknown
  Bacterial polypetide isolated from the Sargasso Sea
PPHKVLENKEIRTMITAVGTGIGDGEGEGAFDLEKLRYHKVIIMTDADVDGSHIRTLLLTFFYRQMRDLVKHGYVYIAQPPLYQISRKKRVEYVADDNELNKILIDLGAEDVSLKLSAKKKLNNKQVSEILELLTSLDKYARSIHRHGGNFAEYIEQRKKSGELPTHLVKIRDGNEESVHYFHSDTDLAKFGKKNPDLNLFGDNEPEETPKAAAKNGNTRRALHVELHESKPLQELLGKLSRKGLPVEHYEAQDKPLFELIEGDDERVHPLFSLSDILGTVIEIGRRGLQIKRFKGLGEMNPKELFETTMNPETRKLLRVELTDAVEAE

SEQ ID NO: 183872 - protein, 321 aa, Unknown
  Bacterial polypetide isolated from the Sargasso Sea
ILSSQEIGTLITALGTGIGTNEFDANKLRYHKVIIMTDADVDGSHIRTLLLTFFFKEMRGLIENGNLYIARPPLFKIKRGKEELYISDEDNLQKSLIKYGADDAVFQTALGNQLKNDKLVSTLIKILEVIDIYSKVPDRYDKKVLEQIAISGCLDVNKFLGSKEKTKEAIDYITKRINISRPDYDRGWEGQYLNDKGFIFTRELRGLQDNIVIDNNLLESQLIKNLNTNYSELFQMFEMPGELIIKNETFKVYSPSQLLSTIQDLGKKGLTMQRYKGLGEMNPDQLWETTLDPKNRSLIQVKIDDEESTKGVFEDLRGENV

SEQ ID NO: 183873 - protein, 261 aa, Unknown
  Bacterial polypetide isolated from the Sargasso Sea
INVTINSNNSVSVEDDGRGIPVDLHKGEKKSAAEVIMTQLHAGGKFDHDSYKVSGGLHGVGVSVVNALSEKLTLTIYRDKKEYFIEFEDGKALSPLKAKGKTNKTGTLINFLPSKKVFSNTEFSSTTLQKRMRELAFLNKGLSINLVDKTGKKIKEYINKYEGGIQEFVNFLDKNKETLVNKNDLNLFKKPIYISGSKDNVEIECSLKWNAGYSEEMLPFANNIHQKDGGTHLLGFRSALTRVINKYANDSHLLKKNKISL

SEQ ID NO: 183874 - protein, 147 aa, Unknown
  Bacterial polypetide isolated from the Sargasso Sea
MTTDKNQNYSADSIQALEGMEHVRKRPSMYIGDVGVRGLHHLVYEVVDNSIDEAMAGHCNKIGVIINEDDSISVEDDGRGIPVGIHQKEGVSALEVVMTKIGAGGKFDKDSYKVSGGLHGVGVSVVNALSDHLTAVVYRDGKIWQQE

SEQ ID NO: 183875 - protein, 211 aa, Unknown
  Bacterial polypetide isolated from the Sargasso Sea
MSGDTYDSGSIKVLKGLEAVKKRPGMYIGDTDDGTGLHHMVFEVLDNSIDEGMAGFCKQIDVVIGKDGSVSVSDDGRGIPVDMHEEGVSAAEVIMTTLHSGGKFDENSYKVSGGLHGVGVSVVNALSSKLILEIERDGAKYKQEYSDGEPKTKLEKVGKSEKSGTKVTFTPSKKIFTQTKFDVEVLKKRIRELSFLNKGIAIHVLDEASGS

SEQ ID NO: 183876 - protein, 294 aa, Unknown
  Bacterial polypetide isolated from the Sargasso Sea
EVIMTTLHSGGKFDENSYKVSGGLHGVGVSVVNALSSKLILEIERDGAKYKQEYSDGEPKTKLEKVGKSEKSGTKVTFTPSKKIFTQTKFDVEVLKKRIRELSFLNKGIAIHVLDEASGSKLEFKSDGGLLEFVKHLTGKKEVIGTPFYAQANMKGIGVEIAAQWTGTYRENVQCFTNNIPQVDGGTHLAGFRGGLTRAIKNFIKKEDLMRKKEVEITGEDVREGMIAVISLKMPDPKFSSQTKDKLVSSEARPAVETLINDYFMDFLLANKPQAKEILGKVLEAAYAREAARK

SEQ ID NO: 183877 - protein, 181 aa, Unknown
  Bacterial polypetide isolated from the Sargasso Sea
MVDFNRDNTLPRDIVDEMKESYLNYSMSVIVSRALPDVRDGLKPVHRRILYGMSELGSNWNRPYKKSARIVGDVLGKYHPHGDGSIYDALVRMAQDFSMRYELVDGQGNFGSIDGDNAAAMRYTESRMTKLSSEMLKDLEKNTVEWEPNFDETLKEPSVLPSSIPTLLINGSEGIAVGMAT

SEQ ID NO: 183878 - protein, 156 aa, Unknown
  Bacterial polypetide isolated from the Sargasso Sea
MSEKSSKKNNYSAGNIQVLEGLEAVRKRPAMYIGDVGNKGLHHLIWEVVDNSIDEALAGHCDEITVTINKDNSITVNDNGRGIPTGMHPKEKKSALEVVMTVLHAGGKFDKDTYKVSGGLHGVGVSCVNALSENLKATVYREGKIFEQEYKRGIPA

SEQ ID NO: 183879 - protein, 274 aa, Unknown
  Bacterial polypetide isolated from the Sargasso Sea
SYQADSIKVLKGLEAVRKRPGMYIGDTDDGTGLHHMVYEVVDNSIDEALAGHCKNINVKINSDGTITVNDDGRGIPVDIHKGEKKSAAEVIMTQLHAGGKFDHDSYKVSGGLHGVGVSVVNALSEKLQLEINRDGKKHYIEFQNGEAKAPLKVLGKAKNTGTQITFLPSREIFSSIKFSANILIKRMRELAFLNKGIKIIFTDSSQKKEKISEFKFDGGVIEFVDFLDEKREKLQNKNGNDLFRKPIYIEGKKNNIELECSLKWNAGYTEDIFP

SEQ ID NO: 183880 - protein, 226 aa, Unknown
  Bacterial polypetide isolated from the Sargasso Sea
ALSELFLVEGDSAGGSAKQGRDRSFQAILPLKGKIINVQKARLDKVLSSNEIGTLITALGTGIGIDEFSLEKLRYHRVIIMTDADVDGSHIRTLLLTFFYNQMFDLLEKGHIYLALPPLYKIKKGGKTHYAKDEEEKDAILKELRKEATEGSRPPEIQRYKGLGEMNPEQLWETTFDPKHRRLVQITLDEARELVDDIFETLMGDQVQPRREFIDDNALRAENIDF

SEQ ID NO: 183881 - protein, 286 aa, Unknown
  Bacterial polypetide isolated from the Sargasso Sea
MTNKSTYQADSIKVLKGLEAVRKRPGMYIGDTDDGTGLHHMVYEVVDNSIDEALAGFCKNIYIKINSDGTVTVRDDGRGIPVDIHKGEKKSAAEVIMTQLHAGGKFDHDSYKVSGGLHGVGVSVVNALSEKLKLEINRDGKRYFVEFKNGEAKAPLKIVGKTKNTGTEINFLPSKEIFSSIKFSGNILIKRMRELAFLNKGIKIIFSDDTNKKEKIEEFRYEGGVIEFVEFLDNKRDKLQNKNGNDLFKKPIYIEGKKGDIEIECALKWNGTYSEDVYPYTNNIIK

SEQ ID NO: 183882 - protein, 305 aa, Unknown
  Bacterial polypetide isolated from the Sargasso Sea
GTECYFRPSPETFHNIKFQYELLAKRLRELAFLNSGVSIVLTEERSGKEDTFYYEGGLRAFVEFLNQNKQPLNEVFHFNTEREDGIGVEVAMQWNDTFQEQVFCYTNNIPQGDGGTHLAGFRGALTRTLNTYIEHENMLKKAQVSTTGDDAREGITAVVSVKVPDPKFSSQTKDKLVSSEVKTAVEQELSKFFAEYLAEHPQDAKAVVGKMIDAARAREAARKARDMTRRKGALDIAGLPGKLADCQEKDPALSEIFLVEGDSAGGSAKQGRDRRTQAILPLKGKILNVEKARFDKMLSSQEIGT

SEQ ID NO: 183883 - protein, 182 aa, Unknown
  Bacterial polypetide isolated from the Sargasso Sea
GSKDFNIENLRYDKIVIMTDADVDGSHIRTLLLTFFNNYPFNELIEKGHIYLAQPPLFKVTKANKSIYIKDEKALEEYILKMAKTDKKIKKHSTEYKNFLQEHKEKLSIQRFKGLGEMNPEELWETTLNPDNRTMLRVQYSKGTKDKSKDDQKMIEILMGDEVAPRKDFITNNALDVTNLDI

SEQ ID NO: 183884 - protein, 279 aa, Unknown
  Bacterial polypetide isolated from the Sargasso Sea
MVQDFSMSVPLIDGQGNFGSVDGDPPAAMRYTETRLSKISQFLIDDIEKNTVDFKSNYDETEKEPVVLPAQYPNLLVNGAGGIAVGMATSIPPHNLSEVINATLALINNKDIKINELMKHIPGPDFPTGGTIIGKDIIKTGYKTGRGSFKIRGDINIEQLKNGKERLVITNIPYQINKSSLNERIVELIRDKKIEGISDIRDESNREGIRVAIDLKRNTEPETVKRQLYKYTSLESSFSFNTLAIVDKKPKNCNLKDFLESFLKFREDVVTKKTKFDLK

SEQ ID NO: 183885 - protein, 316 aa, Unknown
  Bacterial polypetide isolated from the Sargasso Sea
PDIRDGLKPVHRRIIYAMHKGGFDWSKQFRKSARIVGDVIGKYHPHGDQAVYDALVRMVQEFSMSLPLVDGQGNFGSIDGDPPAAMRYTETKLAKVSQFLIDDIEKNTVSFKSNYDETEQEPVVLPAQYPNLLVNGAGGIAVGMATSIPPHNLGEVVDGTLALIKNKDIKINELMKHIPGPDFPTGGLIIGKDIIKQGYKTGRGSFKIRGEISVENLKNGKDRLVVSSIPYQINKSNLNERIAELVRDKKIEGISDIRDESNSEGLRVSIDLRRNVEPETVKRQLYKYTSIESSFGFNSLAIVDQKPKTCNLKDFL

SEQ ID NO: 183886 - protein, 288 aa, Unknown
  Bacterial polypetide isolated from the Sargasso Sea
EGGITEFVKHINNKKPKLVNKNEKEVFKKPVYVTASKNNVNVECSFEWNAGYTEDVLPFTNNIPQKDGGTHLLGFRSALTRVINKYSADRNNKKNKITLSGEDIKEGLTAVLSIKMSDPKFSSQTKDKLVSSEIRNIVEHIIGEKVSTWFDQNPSVSKSILEKITQAAMARDVARKARDSVRRKGTFELSGLPGKLADCQIQKREGTELFIVEGDSAGGSAKQGRVREFQAVLPLRGKILNTFVNGKKNGEDQNTKALSKMMSSSEIVTLINALGTGSKDFNIEKFKV

SEQ ID NO: 183887 - protein, 129 aa, Unknown
  Bacterial polypetide isolated from the Sargasso Sea
MNQSYSSESIKVLKGLEAVRKRPGMYIGDTDDGSGLHQMIYEVVDNSIDESLAGYCDKIDVILNSDGTVTISDNGRGVPVDNHKEEGIPAAQLIMTELHAGGKFDQNSYKVSGGLHGVGVSVVNALSEN

SEQ ID NO: 183888 - protein, 216 aa, Unknown
  Bacterial polypetide isolated from the Sargasso Sea
MLTEKLMGEDQSTKALSKMMSSNEIVTLINALGTGSKDFNIENLRYDKIVIMTDADVDGSHIRTLLLTFFNNYPFNQLIENGHIYLAQPPLFKVTKANKSVYIKDEKALEEYIIKVGKFDKKIKKGSSEYKKFLQDQRDKLSIQRFKGLGEMNPEELWETTLNPDNRTVLRVQYSKGTKDKSKDDQKMIKVLMGDEVAPRKDFITNNALDVTNLDI

SEQ ID NO: 183889 - protein, 288 aa, Unknown
  Bacterial polypetide isolated from the Sargasso Sea
MVDINRDNIVDKELLKELEESYLNYSMSVIMSRALPDARDGLKPVHRRILYGMHELGCLWNRPYKKSARVVGDVLGKYHPHGDSSIYDAMVRMAQDFSMRHELVQGQGNFGSVDGDSAAAMRYTESRMSKIGGELLRDLEKETVNWTTNFDETLKEPEVLPAVYPNLLVNGSEGIAVGMATKIPPHNLSETVDALVELIKNPGAEIDDLMKYIKGPDFPTGGKVLGLQGIKDAYSTGRGKVKMQGTAYTETPDKGRSKLIITEIPYQVNKANLVEKIADLSRDKKLEG

SEQ ID NO: 183890 - protein, 160 aa, Unknown
  Bacterial polypetide isolated from the Sargasso Sea
MPKAKKSKNSKNYDSSNIKVLKGLDAVRKRPGMYIGDTDDGTGLHHMVYEVVDNSVDEALAGYCSEISVIIHQDDSITVKDNGRGVPVDKHKGENKSAAEVIMTVLHAGGKFDDDSYKVSGGLHGVGVSVVNALSQTLSLRIYKNGNIYEQDYAHGTPIK

SEQ ID NO: 183891 - protein, 274 aa, Unknown
  Bacterial polypetide isolated from the Sargasso Sea
VNKNDLSLFKKPIYILGKKNNVEVECSFKWNAGYSEEMLPFANNIHQKDGGTHLLGFRSALTRVINKYAVDGNLLKKNKITLTGDDTREGLTGVLSIKIPDPKFSSQTKDKLVSSEVRFIVESIVNDKLSTWFDQNPGVKKIVLLKIVQAAIARDVARKAREGVRRKGSLELSGLPGKLADCQIGKAEGTELFIVEGDSAGGSAKQGRNREYQAVLPLRGKILNTYTDTNGKNLKNGNGQDLQNKAFSKMMSSNEIVTLINALGTGSKDFKMKI

SEQ ID NO: 183892 - protein, 299 aa, Unknown
  Bacterial polypetide isolated from the Sargasso Sea
PQFAGQTKERLDSKDHMSFVSSSTKDVLSIWFNKHTEEGERIAELAIISAQARAKASSSVERKKTFKGPALPGKLSDCNSEDLNKTELFLVEGDSAGGSAKQARERSFQAIMPLRGKILNTWDLESEEIIKSQEIKNLSTAIGVLPGNVDISSLRYGKICILADADSDGLHIATLLCALFLRHFKPLVNEGRIFIAMPPLYRIDCGKDVLYALDEKQKDKAVKEFKSKKGKPKINIQRFKGLGEMNPSQLRETVMDPDTRQLVRLSISATDNANAMMDLLLSKKNAPARKEWLKRKVHW

SEQ ID NO: 183893 - protein, 311 aa, Unknown
  Bacterial polypetide isolated from the Sargasso Sea
NKSALVNKNDLSLFKKPIYIFGKKDNVEVECSLKWNAGYSEDMLPFTNNIHQKDGGTHLLGFRSAITRVINKYATDGNLLKKNKVTIEGYDTREGLTGVLSVKIPDPKFSSQTKDKLVSSEVRFIVESIVSEKLSTWFDQNPGIRKIVLLKIVQAAIARDVARKAREGVRRKGSLELSGLPGKLADCQIGKAEGTELFIVEGDSAGGSAKQGRNREFQAVLPLRGKILNTYIDTNGSRSRNGNGQDAQTKAFSKMMSSNEIVTLINALGTGSKDFNIQNLRYEKIIIMTDADVDGSHIRTLLLTLFNNYPF

SEQ ID NO: 183894 - protein, 303 aa, Unknown
  Bacterial polypetide isolated from the Sargasso Sea
KDLKGLDAVRKRPGMYIGDTDDGSGLHHMVFEVIDNAIDEALVGHCKNITVIINNDNTITVEDDGRGIPVDMHKSEKISAAEVIMTQLHAGGKFDHNSYKVSGGLHGVGVSVVNALSEKLELNIYRDGKEYSVTFKNGKTIKPLKQIGKTKKRGTRINFLPSKEVFSSVKFSSTILEKRIRELAFLNKGICVKLLDQTSKKEKEFVHKYDGGIVEFVKHINNKKPILVNKNEKEVFKKPVYVTSTKNNVVVECSFEWNAGYSEEVLPFTNNIPQKDGGTHLLGFRSALTRVINKYSNDRNNKR

SEQ ID NO: 183895 - protein, 260 aa, Unknown
  Bacterial polypetide isolated from the Sargasso Sea
DPKFSSQTKDKLVSSEIRNIVESIVGDKISVWFDQNPSVIRSVLDKVLQAAIARDLARKARDSVRRKGTLELSGLPGKLADCQISSMEGTELFIVEGDSAGGSAKQGRKREFQAVLPLRGKILNTYVNETKKINGANGAHETKTLSKMMSSNEIVTLINALGTGSKDFDIENLRYEKIIIMTDADVDGSHIRTLLLTFFNNKPFNQLIEKGHLYLAQPPLFKVTKGSKSTYIKNEKDLDKYILKSSTNGVKKIKKGDLEK

SEQ ID NO: 183896 - protein, 130 aa, Unknown
  Bacterial polypetide isolated from the Sargasso Sea
MSKNSALKSNPNYGADSIKVLKGLDAVRKRPGMYIGDTDDGSGLHHMVFEVIDNAIDEALAGHCKNISVTINKDNTVTVEDDGRGIPVDMHKTEKISAAEVIMTQLHAGGKFDHDSYKVSGGLHGVEFSR

SEQ ID NO: 183897 - protein, 319 aa, Unknown
  Bacterial polypetide isolated from the Sargasso Sea
YLSYAMSVIISRALPDIRDGLKPVHRRILFAMHKGGFDWSKQFRKSARIVGDVIGKYHPHGDQPVYDALVRMAQDFSMSLPLVDGQGNFGSIDGDPPAAMRYTEARLSKISQYLIEDIEKETVSFKSNYDETEYEPNVLPAQYPNLLVNGAGGIAVGMATSIPPHNLGEVIDGTLALIKNKDIKVSELIKYIPGPDFPTGGVIIGKDIIKQGYKNGRGSFKIRGEINVENLKNGKDRLVITSIPYQINKSNLNERIAELVREKKIDGISDIRDESNRQGVRVAIDLRRNIEPETVKRQLYKYTSIESSFGFNTLAIVDY

SEQ ID NO: 183898 - protein, 181 aa, Unknown
  Bacterial polypetide isolated from the Sargasso Sea
MDKNTIEINKSFKPIFVQDEMSSSYLSYAMSVIVSRALPDVRDGLKPVHRRIIYAMYKGGYDWSKPFRKSARIVGDVIGKYHPHGDQSVYDALVRLVQDFSMSVPLITGQGNFGSIDGDPPAAMRYTETKLGRISQFLTEDLEKNTVNFRSNYDETEKEPEVLPSQYPNILVNGAGGIAVG

SEQ ID NO: 183899 - protein, 273 aa, Unknown
  Bacterial polypetide isolated from the Sargasso Sea
KVSGGLHGVGVSVVNALSEKLDLTIFRDQKEYFISFKNGKAVNSIKFLKKTKQSGTKINFLPSKDIFSNIKFSLAILQKKMRELAFLNKGLKINLIDETHAKAKVYEHKYDGGVGEFVVYLDQKKSILINKNEKQAFKKPIYLKAEKNGVTIECSFQWNAGFSEEVMPFTNNIHQRDGGTHLLGFRSALTRIINKYASEKNLNKKNKVTIGGEDIKEGLTAILSVKMPDPKFSSQTKDKLVSSEIRNVVESIVTEKVTMWFDQNPSVVKIVLE

SEQ ID NO: 183900 - protein, 305 aa, Unknown
  Bacterial polypetide isolated from the Sargasso Sea
RLIVESIINDKVSTWFDQNPSVAKTVLEKITQAAMARDVARKARDSVRRKGTFELSGLPGKLADCQIQKKEGTELFIVEGDSAGGSAKQGRVREYQAVLPLRGKILNTFVNGKSKGNGDDKATRALSKMMSSNEIVTLINALGTGSKDFNIENLRYEKIVIMTDADVDGSHIRTLLLTFFNNSPFNQLIEKGHIYLAQPPLFKITKSNKSIYIKDEKDLEEFIIKNSDKDIKKMKKGSNEFKNYIQAQKEKLSIQRFKGLGEMNPEELWETTLNPENRTMLRVQYTKGTKDKSKEDQKMIEVLMG

SEQ ID NO: 183901 - protein, 264 aa, Unknown
  Bacterial polypetide isolated from the Sargasso Sea
MTDADVDGSHIRTLLLTFFYRHMKPIIDSGRLYIAQPPLYRLKKGNSTVYKKDDNDLENYLIDEGLKNTIFENTQSAQIAGEELKQIIYLSKNTKNLVMPLLRRVDNSDIIEHSAIVRALDLRNLKDKEIGEEISKYLQQRLNLISNIGQKNWKVIHKKNSILFERTIRGFTEKYIIDENFIVSPEAKALNELKDQLMENFYRLKETGCGTLKNKNEEHNIYGPLELIDKILAIGKTGLQINRYKGLGEMNPDQLWETTLDKNE

SEQ ID NO: 183902 - protein, 169 aa, Unknown
  Bacterial polypetide isolated from the Sargasso Sea
MAVSVGPGGGGPGDSDDRIIQTDLRNEMSRSYLEYAMSVIVGRALPDARDGLKPVHRRILYAMYELGLTSDRPYRKCARVVGEVLGKYHPHGDTAVYDALVRMAQDFSMSMPLIDGHGNFGSVDNDPPAAMRYTESRLQSLTTDSLLEDIEAETVDFADNFDGSQPGAR

SEQ ID NO: 183903 - protein, 235 aa, Unknown
  Bacterial polypetide isolated from the Sargasso Sea
LESSTLPGKLADCSSRDPSESEIYIVEGDSAGGSAKQGRDRRFQAILPLRGKILNIEKTDDAKIYKNTEIQALITALGLGIKGEDFDVKNMRYHRVVIMTDADVDGAHIRTLLLTFFYRYQKALVEGGYIYIACPPLYKVERGKNHTYCYNEGDLQETLQSFGEKANYTIQRFKGLGEMMPKQLWETTMDPTTRTMKRVEIEDALEADRIFTILMGDKVAPRREFIETTQCQSWI

SEQ ID NO: 183904 - protein, 298 aa, Unknown
  Bacterial polypetide isolated from the Sargasso Sea
YISANKDDVNVECLLEWNAGYSEEVMAFTNNIHQKDGGTHLLGFRSALTRVINKYSNEHNKKNKLSLTGEDIKEGLTVVLSVKMPDPKFSSQTKDKLVSSEIRLIVESIINDKISMWFDQNPSIIRNVLEKIVQAAVARDVARKARDNVRRKGSFEITGLPGKLADCQISKKEGTELYIVEGDSAGGSAKQGRNREFQAVLPLRGKILNTYVNTNGRNAGKTAENETKALSKMMSSSEIVTLINALGTGSKDFDINNLRYDKIIIMTDADVDGSHIRTLLLTFFNNYPFNQLIENGHL

SEQ ID NO: 183905 - protein, 248 aa, Unknown
  Bacterial polypetide isolated from the Sargasso Sea
LHKTEKVPAAQLIMTELHAGGKFDQNSYKVSGGLHGVGVSVVNALSENLILEINRDGKIHNIEFENGVVTKELNIIGDSNKIDNEYFTGTKITFLPTTKIFKDINFNFKTIEKRLRELAFLNTGVSIYLTDKRQSEEKTTNFKYDGGIKEYVMYLNEGKNLINPIPVFFQGEKNNISIECSLQWTDSYHENTICFTNNIIQRDGGTHLAGFRGALTRSIVNYVNKNTKNSNNVTGEDAREGLTCIISV

SEQ ID NO: 183906 - protein, 143 aa, Unknown
  Bacterial polypetide isolated from the Sargasso Sea
MNKNANVAYGAESIKVLKGLDAVRKRPGMYIGDTDDGTGLHHMVFEVVDNSIDEALAGHCDEINIWLNADGSVTVEDNGRGIPTEIHPEEKISAAEVIMTQLHAGGKFDQDSYKVSGGLHGVGVSVVNALSSSLNLKIFRDRS

SEQ ID NO: 183907 - protein, 270 aa, Unknown
  Bacterial polypetide isolated from the Sargasso Sea
MTDSKDQNEDLKTGKEQSVIPILIDTEMQNSYLDYAMSVIVSRALPDVRDGLKPVHRRILYAMHESGYEWNKQHRKSARVVGDVIGKYHPHGDQAVYDALVRLAQDFSMSVPLLDGQGNFGSMDGDRAAAMRYTEVRMAKIASFLLEDIEKETVDFRPNYDETESEPSVLPAKYPNLLVNGAGGIAVGMATNILPHNLGEVIDASIAYLKNTDVTFEEINQIIKGPDFPTGGTIIGIKGIKDSQSSGRGSIIVQAKSNIEEYKTDREAIV

SEQ ID NO: 183908 - protein, 306 aa, Unknown
  Bacterial polypetide isolated from the Sargasso Sea
IKVLKGLEAVRKRPGMYIGDTDDGTGLHHMVYEVVDNSIDEALAGHCKNIKVIINSDQSVSVEDDGRGIPVDMHKGEKKSAAEVIMTQLHAGGKFDHDSYKVSGGLHGVGVSVVNALSEKLTLKIFRDKKEYLVEFKNGKALSALKAKGKTNKTGTFINFMPSREVFSDTKFSSLTLQKRMRELAFLNKGLCIILIDKTGKKEKEYKNKYEGGIQEFVEFLDKNKTTLVNKNDLSLFKKPIYISGSKNNIEVECSLKWNAGYSEEMLPFANNIHQKDGGTHLLGFRSALTRVINKYALDGNLLKKN

SEQ ID NO: 183909 - protein, 275 aa, Unknown
  Bacterial polypetide isolated from the Sargasso Sea
PTDDNDQNKLEGKFDISKMRYHKVIIMTDADVDGSHIRTLLLTFFYRHMKPIIDTGRLYIAQPPLYRLKKGNSTVYKKDDDDLENYLIEEGLKNSIFENTQKSQIAGEELKNILYLSKRTKNLVMPLLRRVDNQDIIEHVAIVRGLDLRNLQDKNIGKEIAKYLQQRLNLISNISQKNWIVTHKNNSLIFERTIRGFTEKYTIDENFLITPEAKALNEIKDELMENFYRLKESGCGTLNNKNEKYKIFGPLNLIDKVLDIGKTGLQINRYKGLGE

SEQ ID NO: 183910 - protein, 274 aa, Unknown
  Bacterial polypetide isolated from the Sargasso Sea
PQFEGQTKTKLGNGDVKGIVDKIVYEGILDFLEQNPSIGRRVIEKALLAARSRSAARKARELIRRKSALGGSSLPGKLSDCSNKDPVFCELYLVEGDSAGGSAKQGRDRRTQAILPLRGKVINSEKARVDKLLSNNEVQSMITALGAGFGGSEEESGEKSAGDFDSEKLRYHKIIIMTDADVDGSHIRTLLLTFFYRKMKEVIDGGYLYLALPPLYRVSQGKKESYAYDDNERDLLIERMQKDNKNTKVGIQRYKGLGEMNPGQLWETTMDPEK

SEQ ID NO: 183911 - protein, 259 aa, Unknown
  Bacterial polypetide isolated from the Sargasso Sea
DGGILEFVEFLDKDREKLKNKNDNDLFKKPIFIDGKKDSLEIECALKWNSGYTEDVYPYTNNIFQKDGGTHLLGFRSSLTRVINKYANEHNILKKNKVSISGDDIKEGLTCVLSIKIPDPKFSSQTKDKLVSSEVRNIVESLINEKLSVWFDQNPSIAKIVLAKVVQAALARDVARKARENVRRKGALELTGLPGKLADCQNSKQDGTELFIVEGDSAGGSAKQGRNREYQAVLPLRGKIFKYIHQFKRNKEKWKWKRT

SEQ ID NO: 183912 - protein, 186 aa, Unknown
  Bacterial polypetide isolated from the Sargasso Sea
MSESILESDIVHEMRDSYMEYAMSVIVGRALPDVRDGLKPVHRRVLFSMNEQGNDYNKPYRKSANVVGDVMGKYHPHGDAAIYDTVVRLSQDFSMRYQLIDGQGNFGSVDGDSPAAMRYTEVRMRRIAHEMLADLDKETVDFMPNYDDSLKEPEVLPSRIPNLLTNGSTGIAVGMASNIPPHNLKE

SEQ ID NO: 183913 - protein, 170 aa, Unknown
  Bacterial polypetide isolated from the Sargasso Sea
MTDLANEILPVNIEDELKNSYLDYAMSVIVGRALPDVRDGLKPVHRRVLFAMNELNNDWNKPYKKSARVVGDVIGKYHPHGDSAVYDTIVRMAQPFSLRYMLVDGQGNFGSVDGDSAAAMRYTEVRMAKMSHELLADLEKETVDYVPNYDGTEQIPDVLPTKVPNLLVNV

SEQ ID NO: 183914 - protein, 319 aa, Unknown
  Bacterial polypetide isolated from the Sargasso Sea
KVSGGLHGVGVSVVNALSEKLELNIYRDGKEYAVIFKNGNAIKSLRQVGKTKKRGTRINFLPSKEVFSSIKFSPTILEKRIRELAFLNKGICIKLLDQTSKKEKEFVHKYDGGIVEFVKHINNKKPILINKNEKEVFKKPVYLTATKNNVVVECSFEWNAGYSEDVLPFTNNIPQKDGGTHLLGFRSALTRVINKYSNDKNNKRNKITLSGEDIKEGLTAVLSIKMPDPKFSSQTKDKLVSSEIRLIVESIINDKVSTWFDQNPSIAKTVLEKITQAAMARDVARKARDSVRRKGIFELSGLPGKLADCQIQRREGTEL

SEQ ID NO: 183915 - protein, 185 aa, Unknown
  Bacterial polypetide isolated from the Sargasso Sea
MSSSYLSYAMSVIVSRALPDVRDGLKPVHRRILYAMYKGGFDWTKQFRKSARIVGDVIGKYHPHGDQAVYDALVRMVQEFSMSLPLIDGQGNFGSIDGDPPAAMRYTETKLSKISQYLIDDIEKNTVGFKSNYDETESEPVVLPAQYPNLLVNGAGGIAVGMATSIPPHNLGEVINGTLALIENK

SEQ ID NO: 183916 - protein, 170 aa, Unknown
  Bacterial polypetide isolated from the Sargasso Sea
MEKIEGNNLNKIKSISMYDEMSSSYLSYAMSVIISRALPDIRDGLKPVHRRILFAMNKGGFDWSKQFRKSARIVGDVIGKYHPHGDQAVYDALVRMVQEFSMSLPLIDGQGNFGSIDGDPPAAMRYTETRLSKISQFLLDDIDKNTVLFKSNYDETEKEPVVLPAQYPNC

SEQ ID NO: 183917 - protein, 271 aa, Unknown
  Bacterial polypetide isolated from the Sargasso Sea
MSDINRDHTLNRDIVDEMRESYLNYSMSVIVSRALPDVRDGLKPVHRRILYGMSELGSSWNRPYKKCARIVGEVMGKYHPHGDSSIYDALVRMAQDFSMRYQLVDGQGNFGSIDGDNAAAMRYTESRMTKLSAELLKDLEKETVEWGPNFDETLKEPTVLPTTIPTLLVNGSEGIAVGMATKIPPHNLVEVVDGLIALIDNKQITVEELMEHIKGPDFPTAGMILGVDGLKAAYETGRGKIKMRARAHIETAKNGKDSIVITEVPYQTNKA

SEQ ID NO: 183918 - protein, 243 aa, Unknown
  Bacterial polypetide isolated from the Sargasso Sea
MKTFIRKEELNKKSPVELLGEDVREGLTAIVSVKIPDPKFSSQTKEKLVSSEVESVVSNVFNKNFNEYLLENPKEAMSILTKISEAALAREAARKAREMTRRKGVLEVAGLPGKLADCQEKDPALSEIYIVEGDSAGGSAKQGRNRQNQAILPLKGKILNVEKARLDKVLSSQEIGTLVTALGCGIGTDEFDADKLRYHRIIIMTDADVDGSHIRTLLLTFFFRQMFEILNRGHVYIALPPLY

SEQ ID NO: 183919 - protein, 199 aa, Unknown
  Bacterial polypetide isolated from the Sargasso Sea
SKMMSSNEIVTLINALGTGYKDFSVDNLRYEKIIIMTDADVDGSHIRTLLLTFFNNSPFNELIEKGHLYLAQPPLFKITKSGKSTYIKNEKDLERYILNLSGNGSKKLKKIDFERYINEQKKKLSIQRFKGLGEMNPDELWKTTLDPDNRTLLRVEYSKGTREKSKEDQNIIKILMGDEVAPRKDFITEKALEVENLDI

SEQ ID NO: 183920 - protein, 224 aa, Unknown
  Bacterial polypetide isolated from the Sargasso Sea
MTKNRTYQADSIKVLKGLEAVRKRPGMYIGDTDDGTGLHHMVYEVVDNSIDEALAGYCKNIQIDINSNGTITVKDDGRGIPVDIHKGEKKSAAEVIMTQLHAGGKFDHDSYKVSGGLHGVGVSVVNALSEKLELIIEREGKKHLVEFDNGNVIKPLKVIGKSNNTGTQINFLPSKNIFSSTKFSFNIIQKRMRELAFLNKGIKIKINDLSQKKNKSSEFKFEGG

SEQ ID NO: 183921 - protein, 256 aa, Unknown
  Bacterial polypetide isolated from the Sargasso Sea
GTFELSGLPGKLADCQIQKREGTELFIVEGDSAGGSAKQGRVREYQAVLPLRGKILNTFVNGKKNGEDQSTKALSKMMSSSEIVTLINALGTGSKDFSIDNLRYDKIVIMTDADVDGSHIRTLLLTFFNNSPFNQLIEKGHVYLAQPPLFKITKSNKSTYIKDEKALEDYILQLAKIDKKIKKGSSEYKKFIQEHKEKLSIQRFKGLGEMNPEELWETTLNPDNRTMLRVQYTKGTKEKSKDDQKMIEVLMGDEVA

SEQ ID NO: 183922 - protein, 255 aa, Unknown
  Bacterial polypetide isolated from the Sargasso Sea
MSSSYLSYAMSVIISRALPDIRDGLKPVHRRILYAMYKGGFDWSKQFRKSARIVGDVIGKYHPHGDQAVYDALVRMVQNFSMSLPLIDGQGNFGSIDGDPPAAMRYTETRLAKVSQYLIDDIEKETVSFKSNYDETELEPIVLPAQYPNLLVNGAGGIAVGMATSIPPHNLGEVIDGTLELIKNKDIKIKDLMKFIPGPDFPTGGVIIGKNIIKEGYKTGRGSFKIRGEIIVENLKNGKDRLVITSIPYQVNKSN

SEQ ID NO: 183923 - protein, 303 aa, Unknown
  Bacterial polypetide isolated from the Sargasso Sea
DGDPAAAMRYTETRLSKVSQFLIDDIEKNTISFKSNYDETEKEPTVLPAQFPNLLVNGAGGIAVGMATSIPPHNLGEVINGALALIENKDIKIKDLMKHIPGPDFPTGGVIIGKDVIKQGYNKGRGSFKIRGEISIESLKNGRERLVITSIPYQVNKSVLNERIAQLVREKKIEGIKDIRDESNREGIRVSIDLRNGVEPETVKRQLYKNTQIESSFGFNTLAIVDGKPETCSLKDFLTNFLTFREDVVIKKTKFELQKAEERAHILIGLSVSVENLDKVIKIIRNAKNPDNAKKSILKIKWK

SEQ ID NO: 183924 - protein, 270 aa, Unknown
  Bacterial polypetide isolated from the Sargasso Sea
KTNDFKFEGGINEFVEFLDEKREKLKNKNDNDLFRKPIFIEGTKSDVDVQCSLKWNAGYNEDVYPYTNNIYQKDGGTHLLGFRSALTRVVNKYASDQNLLKKSKVLLSGDDIKEGLTCVLSIKIPDPKFSSQTKDKLVSSEVRNIVEGILNEKLSIWFDQNPSVSKIILTKIIQAAVARDVAKRARENVRRKGALELTGLPGKLADCQNSKQEGTELFIVEGDSAGGSAKQGRNREYQAVLPLRGKILNTFTEINGNKKNGNNSDLRTKS

SEQ ID NO: 183925 - protein, 297 aa, Unknown
  Bacterial polypetide isolated from the Sargasso Sea
AFEAAAAREAARKARELTRRKGALDIASLPGKLADCQERDPAKSEIFIVEGDSAGGSAKQGRNRKNQAILPLKGKILNVERARLDKMLSSNEIGTLITAIGAGVGNNQESEDSLKIDKVRYHKIIIMTDADVDGSHIRTLLLTFFFRHMKPIIEAGYLYIAQPPLYRAKRGSSEVYLKDDSQLDEYLINSALKDARLVTGKGEIISGLELEEFTRLSLEMSNNIDVLSNLLGIGKLIEQAAIAGVLNEQQIFNLEAAEYIAKRMDFLSGFYEKGWKAIIGDDGMKIFRKVRRVFTKK

SEQ ID NO: 183926 - protein, 249 aa, Unknown
  Bacterial polypetide isolated from the Sargasso Sea
SFPKKIKMAKNNSTYQADSIKVLKGLEAVRKRPGMYIGDTDDGTGLHHMVYEVVDNSIDEALAGHCKNISVDINQDGSVTVRDDGRGVPVDIHKGEKKSAAEVIMTQLHAGGKFDHESYKVSGGLHGVGVSVVNALSEKLELTIDRDGKKHFIEFKNGDAKSPLKVIGNSKNTGTEIKFLPSKEIFSLNKFSFSTLQKRMRELAFLNKGIKIKLTDLTQKKLKSIEFKFDGGIVEFVEFLDEKREKLKN

SEQ ID NO: 183927 - protein, 130 aa, Unknown
  Bacterial polypetide isolated from the Sargasso Sea
MANNKYDSSNIKVLKGLEAVQKRPGMYIGDTDDGSGLHQMIFEVLDNSIDEALAGHCDTIEVTVHEDQSVTVIDNGRGIPVDEHPDEKKSAAEVILTVLHAGGKFDDNSYKVSGGLHGVGVSVVNALSES

SEQ ID NO: 183928 - protein, 263 aa, Unknown
  Bacterial polypetide isolated from the Sargasso Sea
DDVNIKSFANNIHTLEGGTHEEGLRTAITKAINDFAKSRNLHSDISLTGDDIREGITGVISVRVKEPQFEGQTKTKLGNTEMKSKVQVLVNKELPKWLSKNTKEGRAIVERCAVAAKARMSAKKARELTKRKSILETAGLPGKLADCSSADPIESELFIVEGDSAAGPAKQARESKTQAILPIRGKIINVQKVTENRALQNEEISSLIKAIGTGIKDEYKGEESRYGKIIFLTDADVDGAHIRTLLLTFFFKFMPGLIKEGKV

SEQ ID NO: 183929 - protein, 128 aa, Unknown
  Bacterial polypetide isolated from the Sargasso Sea
MKNTEELKDKNIKLISMHDEMSSSYLSYAMSVIVSRALPDVRDGLKPVHRRILYAMYKGGYDWSKQFRKSARIVGDVIGKYHPHGDQSVYDALVRMVQDFSMSLPLVQGQGNFGSIDGDPAAAMRYTE

SEQ ID NO: 183930 - protein, 293 aa, Unknown
  Bacterial polypetide isolated from the Sargasso Sea
EKILEEYKQLLEIIAELLHILNSPERLMEVIQEELEKVRDEFGDERRTEITAASHDIDIEDLIEQEDVVVTLSREGYVKYQKLTDYEAQRRGGRGKSATKMKDEDFIERLLVANTHDHILCFSTRGRLYWLKVYQLPFASRNARGRPIVNILPLEENERITAILPIKEFEEGKFVLMATANGTVKKTDLSLYSRPRSSGIIAVNLNEGDELIGVDITHGDDDIMLFSDAGKVVRFNEKLRDSETGEVKRDPETGEELLALRPMGRTATGVRGIRLQDGQKRVSLIFQKAMVQS

SEQ ID NO: 183931 - protein, 281 aa, Unknown
  Bacterial polypetide isolated from the Sargasso Sea
LAGHCTKITVFFNKDGSITVEDNGRGIPVGMHKEEKKPAVEVVMTVLHAGGKFDKDTYKVSGGLHGVGVSVVNALSEWLWVEVQRDGKTYKQDYKIGVTQNKLKEIGKTKKSGTTVCFMPDRDVFNTTTFEYDIISERLRELAYLNKGLEINLRDQREKDGQSDSFKFRGGLSDFVKYLDVNNNPLHNKVITVTKEGGEIPVDVALRYGNTYNDNILTFVNNINTIEGGTHLSGFRSALTRAMNNHASKNNLIKTKKTEKLSLTGEDFREGLTAIISVKVP

SEQ ID NO: 183932 - protein, 190 aa, Unknown
  Bacterial polypetide isolated from the Sargasso Sea
MTKNSNYQADSIKVLKGLEAVRKRPGMYIGDTDDGTGLHHMVYEVVDNSIDEALAGYCKNINVSINSDGSITVKDDGRGIPIDLHKGEKKSAAEVIMTQLHAGGKFDHDSYKVSGGLHGVGVSVVNALSEKLELTIERDGNKYFIEFKNGEAIKPLKLIGKSKNNGTEIKFLPSKKVFSTVKFSFNIIQK

SEQ ID NO: 183933 - protein, 81 aa, Unknown
  Bacterial polypetide isolated from the Sargasso Sea
MSEDKRSNIISNDYGAEQIQVLEGLEPVRKRPGMYIGSTGPRGLHHLVYEVVDNSVDEALAGHCDLIEIVLRADGFALISD

SEQ ID NO: 183934 - protein, 298 aa, Unknown
  Bacterial polypetide isolated from the Sargasso Sea
MKQLEKDQECILGDTDDGTGLHHMVYEVVDNSIDEALAGHCKNIEIDINSDGTITVRDDGRGIPVDIHKGEKKSAAEVIMTQLHAGGKFDHDSYKVSGGLHGVGVSVVNALSEKLKLEIDRDGKKYFIEFVNGNAKAPLKSIGKSKGSGTKINFLPSTEIFSSTKFSLNIIQKRMRELAFLNKGIKISINDFVNKKSKKIEFKFDGGINEFVDFLDNKREKLQNKNGNDLFRKPIYIEGKKNNIEVECSLKWNAGYSEDVYSYTNNIFQKDGGTHLLGFRSALTRVINRYAAENNLLK

SEQ ID NO: 183935 - protein, 325 aa, Unknown
  Bacterial polypetide isolated from the Sargasso Sea
ALPDVRDGLKPVHRRVLYGMHELGIRSNTAYKKSARIVGEVLGKYHPHGDSSVYDTMVRMAQTWSLRYLLVDGQGNFGSIDGDSPAAMRYTEARMRKMSEDLLADIEKETVDLQLNFDDTLSEPTVLPTRVPNLLINGASGIAVGMATNMPPHNLTEVVDGTIQYIDNNEITIDELIQTIKAPDFPTGGTIYGYEGVKEAFLTGRGRIVMRANANIELVRDRECIVVTEIPYQVNKAEMIRKTAELVNDKKIEGISNIRDESDRNGMRIVYVLKRDAIPNIVLNKLYKFTSLQSSFSVNNIALVDGRPQLLNLKQLIHFFVEHRP

SEQ ID NO: 183936 - protein, 305 aa, Unknown
  Bacterial polypetide isolated from the Sargasso Sea
WFIDGDPPAAMRYTEVRMAKITDQMLADIEKETISYSPNYDGSEDIPDVLPTKIPNLLVNGSSGIAVGMATNIPPHNLNEVLNGCINLIKNPKISIDELIKDISGPDFPTGGTIDGKAGIYEAYKTGRGIIHIRSNTSIEEDKSGKQSLIINEIPFMVNKAKMLEKIAELVKEKKIEGITEIRDESDKDGLRVVIEVRKGDSIDVLENNLFAQTQLEQSFGINFTVLSEGQPKEVNLKEMLQAFIKHRKDIITKRTKFDLKKAKERGHVVEGLMVAIANIDEIISIIKKSKDPKIAASALCKKVW

SEQ ID NO: 183937 - protein, 322 aa, Unknown
  Bacterial polypetide isolated from the Sargasso Sea
MQELLVTLFGKYHPHGDSAVYDAMVRMAQDFSMRYPIVEGQGNFGSIDGDPPAAMRYTEVRMSKITDQMLGDIEKETVSFSPNYDGSEDIPDVLPTKIPNLLVNGSSGIAVGMATNIPPHNLNEVLNGCINLIKNPKISIDDLIKDISGPDFPTGGTIDGKAGIYEAYKTGRGIIHTRSNTSVEEDKSGKQSLIINEIPFMVNKAKMLEKIAELVKEKKIEGITEIRDESDKDGLRVVIEVRKGDSVEVLENNLFAQTQLEQSFGINFTVLSEGQPKEVNLKEMLQAFVKHRKDIITKRTKYDLRRAKNRGHVVEGLMVAIA

SEQ ID NO: 183938 - protein, 251 aa, Unknown
  Bacterial polypetide isolated from the Sargasso Sea
DALVRLAQDFSLSVPLLDGQGNFGSMDGDRAAAMRYTEVRMAKIASFLLEDIEKETVDFRPNYDETESEPSVLPAKYPNLLVNGAGGIAVGMATNILPHNLGEVIDASIAYLKNTDVTFEEINQIIKGPDFPTGGTIIGIKGIKDSQSSGRGSIIVQAKSNIEEFKTDREAIVFTEVPYQVNKSSLLEKIAELVRDKKIDGISDLRDESDRQGVRVVVELKKGVISQVVLNKLYKFTSLQSSYGVNSLALV

SEQ ID NO: 183939 - protein, 220 aa, Unknown
  Bacterial polypetide isolated from the Sargasso Sea
MTNEDDNQSEKNPTIGSEEFNTSVISISDEMKKSYLDYAMSVIVSRAIPDVRDGLKPVHRRILYAMMEGGYDWSKPYRKSARVVGDVMGNYHPHGDSAIYDSMVRMAQDFSMRIKLIDGQGNFGSIDGDPAAAMRYTESRLSKASELLLRDIDKETVEFISNYDDSQFEPSVLPAEFPNILVNGAGGIAVGMATNIPPHNPVEVVNACKALLDNKEMQLD

SEQ ID NO: 183940 - protein, 287 aa, Unknown
  Bacterial polypetide isolated from the Sargasso Sea
METSVSVDNDPPAAMRYTESRLQSLTDESLLEDIESETVDFADNFDGSQQEPTVLPARIPQLLLNGSSGIAVGMATNIPPHNLGELINGLKSIIKNPSIKDSELFEIIKGPDFPTGGQILGRDGIRETFKTGRGSITMRGVANIEQIKSIGRAEKDAVIITELPFQTNKAALIERIADLVNDKKLEGISDIRDESDRDGMRIVIELKRDAYPQVVLNNLFKLTPLQNNFSANILALVKGEPTTLSLRKMLDVFLDFRVETIRRRTTFLLKKAEERDHIVKGLLLALD

SEQ ID NO: 183941 - protein, 250 aa, Unknown
  Bacterial polypetide isolated from the Sargasso Sea
FRKSARIVGDVIGKYHPHGDQAVYDALVRLVQDFSMSLPLIQGQGNFGSIDGDPPAAMRYTETKLSKVSQFLTEGLEKNTIDYRNNYDETEREPTVLPSQFPNLLVNGAGGIAVGMATSIPPHNLGEIIDGTIGFIKNNDITISQLMKFIPGPDFPTGGIIIGKDILKQGYNKGRGSFKIRGEIGEESLKNGKSRLVIKSIPYQVNKSILNEKIADLSRQKKIEGVSDIRDESNRDGIRVVIDLRRGVEP

SEQ ID NO: 183942 - protein, 257 aa, Unknown
  Bacterial polypetide isolated from the Sargasso Sea
CAPGAIIEDIDKVGGRQQIIVSELPYQLNKARLIEKIAELVKEKKLEGITELRDESDKDGMRIVIELRRGEVPEVVLNNLYAQTQMQCVFGINVVALIDGQPKVLNLKDMLEAFILHRREVVTRRTVFELRKARERGHILEGQAVALSNIDPVIALIKASPTPAEAKLALIATPWESSAVETMVERAGADACRPDDLDPQYGLRDGKYFLSPEQAQAILELRLHRLTGLEHEKLLAEYQEILTQIGELIRILTSATR

SEQ ID NO: 183943 - protein, 288 aa, Unknown
  Bacterial polypetide isolated from the Sargasso Sea
ARELTRRKGVFEGGGLPGKLSDCQEKDPAKSEIYLVEGESAGGSAKQGRDRHFQAILPLKGKILNVEKARLDKVLSSEEIIILISALGCGIKGEDWQEEKLRYHRIIIMTDADVDGSHIRTLLLTLFYRQMPELIEKGYIYIAQPPLYKLKKGKQETYVKDDSELRELLVAEILDDAKLVLNKKGESITGQALGKFISQHEKVQNILKGLTHIYPVELLEGIKHTHLLKDLEDDKEVKKWTSSLEKYLNEKAEQGSSWKVGTTKKEGSDLLEPNIALLRHGTESQWNL

SEQ ID NO: 183944 - protein, 284 aa, Unknown
  Bacterial polypetide isolated from the Sargasso Sea
YLQKRMRELAFLNKGIQISLNDLTQKKPKNINFKFEGGILEFVEYLDQNREKLKNKNDNDLFKKPIYIEGLKNNIDIQCSLKWNAGYNEDVYPYTNNIYQKDGGTHLLGFRAALTRVINKYASEQNLLKKSKVSLSGDDVKEGLTCVLSVKIPDPKFSSQTKDKLVSSEVRNIVETIISEKLSIWFDQNPSISKIILTKIIQAAVARDVARKARENVRRKGALELTGLPGKLADCQNSKQDGTELFIVEGDSAGGSAKQGRNRENQAVLPLRGKILNTFTEING

SEQ ID NO: 183945 - protein, 237 aa, Unknown
  Bacterial polypetide isolated from the Sargasso Sea
YKGGLVSYVEHLNSGKKTISKPIWIKGQKDDTIVEISVQYNEGYSENIFSYVNNINTIEGGTHLSGFRSALTRSINKYAKDQNLLKNQNIQITGDDTREGLTSVVSIKVPEPKFEGQTKTKLGNSETAGIVESLLNDSLGEYFEKNPSHAKKIVNKSIDAAKAREAAKKARDLTRRKSALDLGSLPGKLADCQEKDPEKCELFIVEGESAGGSAKQGRDRKTQAVLPLKGKVINVQR

SEQ ID NO: 183946 - protein, 271 aa, Unknown
  Bacterial polypetide isolated from the Sargasso Sea
FKNMTNKNTYQADSIKVLKGLEAVRKRPGMYIGDTDDGTGLHHMVYEVVDNSIDEALAGHCKNINVKINSDGTITINDDGRGIPVDMHKGEKKSAAEVIMTQLHAGGKFDHDSYKVSGGLHGVGVSVVNALSEKLELEINRDGKKHFIEFKNGEAKSPLKAVGKSKNTGTQITFLPSKDIFSSIKFSANILIKRMRELAFLNKGIKIIFTDASQKKEKISEFKFDGGVQEFVDFLDEKREKLQNKNGNDLFRKPIYFEGKKNNIEIECSLK

SEQ ID NO: 183947 - protein, 300 aa, Unknown
  Bacterial polypetide isolated from the Sargasso Sea
PKFSSQTKDKLVSSEVRMIVETLVNEKLSIWFDQNPSIAKIILAKVIQAAMARDVARKARENVRRKGALELSGLPGKLADCQIGKQEGTELFIVEGDSAGGSAKQGRNRANQAVLPLRGKILNTYVEDFNFKKNGNGNGTDQRTKALSKMISSNEIVTLINALGLDPKAQEIDLKDLRYGKIIIMTDADVDGSHIRALLLTFFNNKPFNKLIENGHVYLAQPPLFKINKGSKGIYIKDEMELENYILNNNKELKKIKKGSKEYLKALELEKKKMNIQRFKGLGEKKPEELWSTTIDPETR

SEQ ID NO: 183948 - protein, 220 aa, Unknown
  Bacterial polypetide isolated from the Sargasso Sea
QWTDSYHENTICFTNNIIQRDGGTHLAGFRGALTRSIVNYINKNTKNSNNITGEDAREGLTCIISVKLPDPKFSSQTKDKLVSSEVRPVIESTSLSKLEQWIEENPSEIKRVIEKIIEASNAREAARKARELTRRKTGLENTSLPGKLADCQEKNPELSELFIVEGDSAGGSAKQGRDRKNQAILPLRGKILNVERANDKQILTSNEIGALIYCNRCRSW

SEQ ID NO: 183949 - protein, 277 aa, Unknown
  Bacterial polypetide isolated from the Sargasso Sea
QADSIKVLKGLEAVRKRPGMYIGDTDDGTGLHHMVYEVVDNSIDEALAGHCKNINVIINQDGTVTISDDGRGIPVDIHKTEKKSAAEVIMTQLHAGGKFDHDSYKVSGGLHGVGVSVVNALSEKLLLEISRDSKKYLIEFKNGEAKSPLKAVGKSKQSGTKITFLPSSEIFSSIKFSSNILIKRMRELAFLNKGIKIIFIDATLKKEKISEFKFDGGVIEFVNFLDEKREKLQNKNGNDLFKKPIYIEGKKNNIEIECSLKWNAGYGEEIFPYTNNI

SEQ ID NO: 183950 - protein, 220 aa, Unknown
  Bacterial polypetide isolated from the Sargasso Sea
SEIYIVEGDSAGGSAKQGRNRQNQAILPLKGKILNVEKARLDKVLSSQEIGTLVTALGCGIGTDEFDADKLRYHRIIIMTDADVDGSHIRTLLLTFFFRQMFEILNRGHVYIALPPLYKVSKGKNIKYAASEKEKDAALKELSKTGNRGIEIQRYKGLGEMNPDQLWTTTMDPQNRRMMRVRIDDANEANNSFEVLMGDQVEPRREFIDENALSVANLDI

SEQ ID NO: 183951 - protein, 80 aa, Unknown
  Bacterial polypetide isolated from the Sargasso Sea
MSKNSELNKKPSYGADAIKVLKGLDAVRKRPGMYIGDTDDGSGLHHMVFEVVDNSIDEALAGYCKNIKVSINSDNTVTVK

SEQ ID NO: 183952 - protein, 286 aa, Unknown
  Bacterial polypetide isolated from the Sargasso Sea
GDSAIYDSMVRMAQNFSMSVELIDGQGNFGSMDGDPPAAMRYTEARLSKISEKLVSDLEKETVGFVANYDDSSKEPIVLPAQYPNLLVNGTSGIAVGMATNIPPHNLGEVIDATLFQIDNPQCSIQDLNKYILGPDFPTGGKIIGIKGINEAYSTGRGAVVLRSKTKIEEFKKEREAIIINEIPYQVNKARLIEKIAETVKNNIIEGISDLRDESDRNGVRVVIELKRDVDSKIILNQLYKHTLLQTTFNSNMLALNKGKPEQLNLKEIITYFIEFREEIVTKRTV

SEQ ID NO: 183953 - protein, 307 aa, Unknown
  Bacterial polypetide isolated from the Sargasso Sea
MPDVRDGLKPVHRRVLYAMKVLGNDHTKAYKKSARIVGDVIGKYHPHGDSAVYETIVRMAQDFSLRYTLVDGQGNFGSIDGDRAAAMRYTEVRMEKITQELLADIDKDTVDFIPNYDESEEEPAVLPTRLPNLLINGSAGIAVGMATNIPPHNLKEIIDGCLFILDNDQASIDDLIKLIPAPDFPTAATIHGIDGIKQAYETGRGRVHVRAKTSIEENGDRESIVVSELPYQVNKARLIEKIAELVRDKKIEGISEIRDESDKDGLRVVIDLKRGTVSDVLLNNLYKQTLLESTFSINMVALSNGQP

SEQ ID NO: 183954 - protein, 266 aa, Unknown
  Bacterial polypetide isolated from the Sargasso Sea
KNNVIVECSFEWNAGYSEEVLPFTNNIPQKDGGTHLLGFRSALTRVINKYFSDKSNKKSKITLSGEDIKEGLTAIISIKMPDPKFSSQTKDKLVSSEIRNIVEHIINEKVSTWFDQNPSVAKTVIEKISQAAMAREVARKARDSVRRKGAFELTGLPGKLADCQIQKREGTELFIVEGDSAGGSAKQGRVREFQAVLPLRGKILNTFVNGKKNGEDQSTKALSKMMSSSEIVTLINALGTGSKDFKIDNLRYDKIIIMTDADVDGS

SEQ ID NO: 183955 - protein, 209 aa, Unknown
  Bacterial polypetide isolated from the Sargasso Sea
MNESSVTEIIPVNLEEELKQSYLDYAMSVIVGRALPDARDGLKPVHRRCLYAMHGLNNDWNRPHRKSARIVGEVIGRYHPHGDGAAYDTIVRMAQWFSMRYPLVDPQGNFGSMDGDPPAAQRYTEIRMSKIAHELLTDLEKDTVNFVNNFDDTETMPEVFPSKIPNLLVNGSSGIAVGMATNMPPHNLNETISACLEFIGNPDVSLRET

SEQ ID NO: 183956 - protein, 310 aa, Unknown
  Bacterial polypetide isolated from the Sargasso Sea
VLYSMHELNNGYNKAYKKSARIVGDVIGKYHPHGDTAVYDTIVRLAQPFSMRYPLVDGQGNFGSIDGDSPAAMRYTEVRMSRLSHELLSDIDKNTVDFNPNYDGSEREPTVLPTRLPNLLINGASGIAVGMATNIPPHNLNEVIDGVITLIKEPSLSDEANLDQFIAKSGFNGPDFPTGAEIKDNGGIHQLIKTGRGSFKIRATHSIEEHKDKNSIIINELPYQVNKAKLIESIAILVRDKKITGISHLRDESDRDGLRVVIELKKGEQPDVILSSLYKQTNLQTSFSANMVCLVDGEPMYHKSVPPSFY

SEQ ID NO: 183957 - protein, 269 aa, Unknown
  Bacterial polypetide isolated from the Sargasso Sea
SITVEDDGRGIPVDFHKEEKKSAAEVIMTQLHAGGKFDHDSYKVSGGLHGVGVSVVNALSQKLELYVERDGKKHFVEFKNGETKTPLKIIGNSKNTGTKINFLPSKNIFSSTKFSYSVIQKRMRELAFLNKGVKIILHDLTQKKIKTSNFKFDGGINEFVEFLDDKRESLKNKNDNHLFKKPIYIEGIKNNIDIQCSLKWNAGYNEDVYPYTNNIYQKDGGTHLLGFRSALTRVVNKYASEQNLLKKSKVLLSGDDVKEGLTCVLSVKI

SEQ ID NO: 183958 - protein, 310 aa, Unknown
  Bacterial polypetide isolated from the Sargasso Sea
FRDGKEYFISFENGKPKNPLKFLKKTTKSGTRITFFPSKEIFSTTKFSSLILQKKMRELAFLNKGLRISLHDETLAKIKSFENKYDGGIQEFVIFNDLKKTPLINNKEKSVFKKPLYIKGEKKDVVVECSLQWNAGFSEDVLAFTNNIHQKDGGTHLLGFRSALTRIINKYASEKNLNKRNKVTIGGDDIREGLTGVLSIKMPDPKFSSQTKDKLVSSEIRNVVETIVSEKVTTWFDQNPSIVKTVLEKVLQAAIARDLARKARDSVRRKGTLELSGLPGKLADCQISKMEGTELFIVEGDSAGGSAKQG

SEQ ID NO: 183959 - protein, 262 aa, Unknown
  Bacterial polypetide isolated from the Sargasso Sea
DKAVSSAEIATLIQALGTGFKPDFNIDDLRYHKIIIMTDADVDGSHIRTLLLTFFYRHMPDLIKEGYVYIAQPPLYRIKKGKTELYLKDDKELDNFLVNDLIEQAVLIQKNGMSVKGVDLSNLFNLLISFDKLLTQLASGNDSLYFLLEQASISNLFESSNFGNQEKSNKTIDYLLKRLNFDLKMWSAEVKSGECVIFYKTENKVVEKFEIFFKDFDEFNYMNLKRFSNRLQEYFLNNSTLQINDDKFDIFRPRDLLTKGLN

SEQ ID NO: 183960 - protein, 312 aa, Unknown
  Bacterial polypetide isolated from the Sargasso Sea
DEALAGFCKNITIDINPDGTIKVKDDGRGIPVDIHKGEKKSAAEVIMTQLHAGGKFDHDSYKVSGGLHGVGVSVVNALSEKLELIIERDGSKYLIEFKNGNAIKPLKLIGKSKNTGTEIKFLPSKEIFSSTKFSFQIIQKRMRELAFLNKGIKISINDFTQKKLKKVDFKFDGGILEFVEFLDKDRSKLKNKNDNDLFKKPIFVDGKKNNLEIECSLKWNASYSEDIYPYTNNIYQKDGGTHLLGFRSALTRVINKYATEQNLLKKNKVSISGDDIKEGLTCVLSIKVPDPKFSSQTKDKLVSSEVRNIVKL

SEQ ID NO: 183961 - protein, 313 aa, Unknown
  Bacterial polypetide isolated from the Sargasso Sea
IKVAEPQFEGQTKTKLGNSEAMGAVDVCVGEMLGDFLEENPKEAKQIISKVILAAQARHAARKAREMVQRKNVLTGTGLPGKLADCSEKDPSLCELYVVEGDSAGGSAKQGRDRTFQAILPLKGKILNVEKAQEHKIYDNDEIKNIITALGVKFGTEEDEKELNLEKLRYHKVIIMTDADIDGSHIRTLVLTFFFRYMRPLIDKGYLYIALPPLYQLSKGKRAEYVWSEDEKDRMVKELSKDGKESSVNIQRYKGLGEMNPEQLWSTTMDPSERLLNKVTIESAAEADVLFSKLMGDEVAPRREFIEKNAKYA

SEQ ID NO: 183962 - protein, 106 aa, Unknown
  Bacterial polypetide isolated from the Sargasso Sea
MSEFAKQVSPVALESEMRESYLAYAMSVIVGRALPDVRDGLKPVHRRVLYAMEVLSNDFNKPYKKSARVVGDVIGKYHPHGDTAAYDTIVRMAQDFSLRYPLVDGQ

SEQ ID NO: 183963 - protein, 163 aa, Unknown
  Bacterial polypetide isolated from the Sargasso Sea
MTKQKQQNKQKYSAESIKVLKGLEAVRKRPGMYIGDTDDGTGLHHMVYEVVDNSIDEALAGYCKNIKVTINSDQSVSVEDDGRGIPVDMHRGERKSAAEVIMTQLHAGGKFDHDSYKVSGGLHGVGVSVVNALSEKLTLKIFREKKEYFVEFKDGKALAPLRV

SEQ ID NO: 183964 - protein, 185 aa, Unknown
  Bacterial polypetide isolated from the Sargasso Sea
MSQKQYTASSIQALEGMEHVRMRPSMYIGDVGFRGLHHLVYEVVDNSIDEALAGYCDTISVKIKEGNAIEVMDNGRGIPVDFHEKEQKSALEVVMTKIGAGGKFDKDSYKVSGGLHGVGVSCVNALSNEMVTTVYRDGNVYQQIYSKGKAQTEVEEIGNSDIRGTKQFFKPDDTIFTELVYNYDT

SEQ ID NO: 183965 - protein, 277 aa, Unknown
  Bacterial polypetide isolated from the Sargasso Sea
MGLKHMLQCFVLHRREVVTRRTVYDLRKARDRAHILEGLAIALANIDEIIDLIKNSSSPADAKQGLVARGWQLGDVSAMLERAGENAARPEWLEEHFGIRNGEYFLTEQQAQAILDLRLHKLTGLEHEKILDEYKELLVLIAELLHILGSPERLMEVICEELEAAKAQYGDARRTEIQDNAMDINMEDLITEEDVVVTLSHLGYAKYQALSDYEAQRRGGRGKAATTVKDEDFVDQLLIASTHDTILCFSNRGRLYWMKVYQLPLASRQARGKPIVN

SEQ ID NO: 183966 - protein, 285 aa, Unknown
  Bacterial polypetide isolated from the Sargasso Sea
DEALAGHCKNINISINSDNTVSVEDDGRGIPVDMHKGEKMSAAEVIMTQLHAGGKFDHDSYKVSGGLHGVGVSVVNALSEKLDLKIYRDGHEYEIEFKDGNSVKSLKKLGKTKKNGTKITFLPSKEIFSSVKFSASIIDKRIRELAFLNKGIAIKLIDNTSKKPKEYSHKYDGGILEFVKHINNKKPILVNKNEREVFKKPVYVTATKNNVVVECSFEWNAGYSEEVLPFTNNIPQKDGGTHLLGFRSALTRVINKYTSDKNNKKNKITLSGEDIKKGLTARIID

SEQ ID NO: 183967 - protein, 319 aa, Unknown
  Bacterial polypetide isolated from the Sargasso Sea
MTNLAKEIVPINIEEELKNSYLDYAMSVIVGRALPDVRDGLKPVHRRVLFAMKELGNDWNKAYKKSARVVGDVIGKYHPHGDSAVYDTIVRMAQPFSLRYMLVDGQGNFGSVDGDSAAAMRYTEVRMSRIAGELLADLDKETVDYVPNYDGTEMIPAVLPTKIPNLLVNGSSGIAVGMATNIPPHNLNEVIDACLALIANPDISIPELMELMPGPDFPTAAIINGRRGIEEAYRTGRGKVYIRARTHIETDEKTGRETIVVDEIPYQVNKARLIEKIAELVKEKRIEGISALRDESDKDGMRIVIEVKRGESSDVLINH

SEQ ID NO: 183968 - protein, 166 aa, Unknown
  Bacterial polypetide isolated from the Sargasso Sea
MSEIENSQSNDGNEYDADSIQVLRGLDAVRKRPGMYIGDTDDGSGLHHMIYEVVDNAIDESLAGHCDLVEVILNGDGSATIRDNGRGIPVDTHQEEGVSAAQVIMTQLHAGGKFNQNSYKISGGLHGVGVSVVNALSETLDLRVWRDDKEHAMRFFDGEPEADLKV

SEQ ID NO: 183969 - protein, 169 aa, Unknown
  Bacterial polypetide isolated from the Sargasso Sea
MANNKYDSSNIKVLKGLEAVQKRPGMYIGDTDDGSGLHQMIFEVLDNSIDEALAGHCDTIEVTVHEDQSVTVIDNGRGIPVDEHPDEKKSAAEVILTVLHAGGKFDDNSYKVSGGLHGVGVSVVNALSESLELTIYKNGKIHVQEYKDSKPLAPLKIDGKTKLNGTKIS

SEQ ID NO: 183970 - protein, 180 aa, Unknown
  Bacterial polypetide isolated from the Sargasso Sea
AKKTPTDLLGEDVREGLIAIISVKVPDPKFSSQTKEKLVSSEVEGVVSTIFSKYFNEFLLENPKDAMSIVGKVSEAALAREAARKAREMTRRKGVLEIAGLPGKLADCQEKDPTLSEIYIVEGDSAGGSAKQGRNRKNQAILPLKGKIINVEKARIDKVLGSAEVGTLIKALGCGIGKED

SEQ ID NO: 183971 - protein, 299 aa, Unknown
  Bacterial polypetide isolated from the Sargasso Sea
NFKVIEKRLRELAFLNTGISIFLTDRRQAKEKNINFKFDGGIKEYVKYLNEGKNLINPNPIFFQGEKNNISIECSLQWTDSYHENTICFTNNIIQRDGGTHLAGFRGALTRSIVNYVNKNTKNSNNITGEDAREGLTCIISVKLPDPKFSSQTKDKLVSSEVRPVIESTSLSKLEQWIEENPTEIKKVIDKIIEASNAREAARKARELTRRKTGLENTSLPGKLADCQEKNPELSELFIVEGDSAGGSAKQGRDRKNQAILPLRGKILNVERANDKQVLTSNEIGALITAIGAGVGNPH

SEQ ID NO: 183972 - protein, 149 aa, Unknown
  Bacterial polypetide isolated from the Sargasso Sea
MTDSDNQTPKENTDKKQSIVPILIDTEMQNSYLDYAMSVIVSRALPDVRDGLKPVHRRILYAMHEAGYQWNKQHRKSARVVGDVIGKYHPHGDQAVYDALVRLAQDFSMRIPLLDGQGNFGSMDGDRAAAMRYTEVRMDKISEYLLTEY

SEQ ID NO: 183973 - protein, 292 aa, Unknown
  Bacterial polypetide isolated from the Sargasso Sea
NFGSIDGDPPAAMRYTETKLAKISQFLIDDIEKNTIQFRSNYDETEKEPTVLPSQFPNLLVNGAGGIAVGMATSIPPHNLGEIIDATIAFINNNNITISQLMKKVPGPDFPTGGIIMGKENLKNGYNKGRGSIKIRGEVEEESIKNGKERLVIKSIPYQVNKSVLNERIAELARDKKIEGISDIRDESNHQGVRVVVDLRRNVEPETVKRQLYKLTSLESSFGFNTLAIVDGKPKILNLKEFISEFVKFRENTLTKRIKFDLKKAQEKAHILIGISVSVENIDEVIKIIKDP

SEQ ID NO: 183974 - protein, 291 aa, Unknown
  Bacterial polypetide isolated from the Sargasso Sea
DPKFSSQTKDKLVSSEVRNIVESILSEKISIWFDQNPSIAKIVLSKIIQAALARDVARKARENVRRKGALELTGLPGKLADCQISKQEGTELFIVEGDSAGGSAKQARNRENQAVLPLRGKILNTYVEEDSKKNNSNGNNHRTKTLSKMISSNEIVTLINAMGLDPKSDDIETKDVRYGKIIIMTDADVDGSHIRALLLTFFNNVPFNKLIKEGYIYLAQPPLFKINKGSKGIYIKDEKELEKYIQKNSKILSNLKKGTKEYERLFDEEKSKFNIQRFKGLGEMNPEELWS

SEQ ID NO: 183975 - protein, 293 aa, Unknown
  Bacterial polypetide isolated from the Sargasso Sea
SDGSITVEDDGRGIPVDFHKEEKKSAAEVIMTQLHAGGKFDHDSYKVSGGLHGVGVSVVNALSQKLELYVERDGKKHFVEFINGETKTALKVIGKSKSTSTKINFLPSKDIFSSTKFSFSIIQKRMRELAFLNKGVKIILNDLTQKKIKTNEFKFEGGINEFVEFLDEKREKLKNKNDNDLFRKPIYIEGIKSNIDVQCSLKWNAGYNEDVYPYTNNIYQKDGGTHLLGFRSALTRVVNKYASEQNLLKKSKVLLSGDDVKEGLTCVLSVKIPDPKFSSQTKDKLVSSEVEKQ

SEQ ID NO: 183976 - protein, 220 aa, Unknown
  Bacterial polypetide isolated from the Sargasso Sea
AGGSAKQGRDRKNQAILPLKGKILNVEKARFDKMLSNEEIKTMVTAMGTGIGREEFNLEKIRYHKIIIMTDADVDGSHILTLILTFFYRQMPEIIENGYLYIAQPPLYRGKKGKSSFYVRDENELTERLIRSSCESLSLNLNNGRKINGEDLLLKNKIELNLGGSEYILKCIDSLKTIYPDYKLLLDSEHEGNNVIIEVNKQKIELSLNLLENLSILDYS

SEQ ID NO: 183977 - protein, 224 aa, Unknown
  Bacterial polypetide isolated from the Sargasso Sea
MKKNPEYCEIYLVEGDSAGGTAKMGRDRKTQAILPLWGKILNVQKSRDDKIVQHDAIRAMITALGAGLGEDFDIEKLRYHRVIIMADADVDGSHIRTLLLTFFFNHMTELVTNGHLYIAQPPLYKIGSGKQEQYVYSDEQREEILEQLDGKRNVNIQRYKGLGEMNAEQLWETTMNPETRTLLRVEVADKNNAANDFEMLMGDEVPPRREFIETHALEVTNLDV

SEQ ID NO: 183978 - protein, 267 aa, Unknown
  Bacterial polypetide isolated from the Sargasso Sea
MQKSYLDYAMSVIVSRALPDCRDGLKPVHRRILYSMSESGYNFNKPYKKSARIVGDVMGKYHPHGDSAIYNSMVRMAQDFSMRLELVDGQGNFGSLDGDPPAAMRYTEARLAKVSEKLVEDIDKNTVSFQPNYDDTTKEPSVLPSQFPNLLVNGASGIAVGMATNIAPHNLGEVIDASLYLIKNPSCNISDLQKYIFGPDFPTGGQIIGKKGITEAFETGKGGCVVRSKTSIENFKKDREAIILHEIPYQVNKSKLLERIAEIVKNG

SEQ ID NO: 183979 - protein, 265 aa, Unknown
  Bacterial polypetide isolated from the Sargasso Sea
KRDSIKLIELFVERSLLRSDLTKFKELERKTIKEKNRLPGKLVDCTSKKVEGTELFIVEGDSAGGSAKQARYRETQAILPLRGKILNVYNVTLSKIADNNEIQNLILALGCGIGKNFQLGNLRYEKVILMTDADVDGSHIATLLITFFYKYMRKIIENGKLYLAMPPLYKIKSNNKNYFAYNEREKDKILKNLNKSYSHLTRYKGLGEMPADQLKETTMDPSKRLLIQLNLEYGAKQAKKTEKLFDSLMGKKAENRYIFIQENAN

SEQ ID NO: 183980 - protein, 205 aa, Unknown
  Bacterial polypetide isolated from the Sargasso Sea
KQGRNRQNQAILPLKGKILNVEKARLDKVLSSQEIGTLVTALGCGIGTDEFDADKLRYHRIIIMTDADVDGSHIRTLLLTFFFRQMFEILNRGHVYIALPPLYKVSKGKNIKYAASEKEKDIALKELSKTGNRGIEIQRYKGLGEMNPDQLWTTTMDPQNRRMMRVRIDDANEANNSFEILMGDQVEPRREFIDENALSVANLDI

SEQ ID NO: 183981 - protein, 248 aa, Unknown
  Bacterial polypetide isolated from the Sargasso Sea
LSERLVLTVRRDGCVWEQEYRYGEPQAALGPVGTTPETGTTVRFKPSVETFANTEFSYDVLAKRLRELSFLNSGVRIQLTEEASGQSEVFEYEGGLSAFVSYLGKNKTAICDVFHFLAPERDDGIGVEVALQWYDTYQENIFCFTNNIPQKDGGTHLEGFRASLTRSLNQYIEEEQLLKKTKVATSGDDAREGLTAIISVKVPDPKFSSQTKDKLVSQEVKTAVQQEMREAFQTFLVERPSEAKQIVA

SEQ ID NO: 183982 - protein, 99 aa, Unknown
  Bacterial polypetide isolated from the Sargasso Sea
MSEDKRSNKISNDYGAEQIQVLEGLEPVRKRPGMYIGSTGPRGLHHLVYEVVDNSVDEALAGHCDHIEIVLRADGSALISDNGRGIPTDIHPRTGKSAL

SEQ ID NO: 183983 - protein, 283 aa, Unknown
  Bacterial polypetide isolated from the Sargasso Sea
MLIDDIDKNTIDFQENYDNSTQEPSVLPAKYPNLLVNGAGGIAVGMATNIPPHNLGEVIDGCLAVIENSEISSDELHEIIPGPDFPTGAQIIGKTGIRSAFETGRGSVVMRGKTSIENIRKDREAIIISEVPYQVNKARMIEQIAEAVKNKNIEGISDLRDESDRVGVRVVVELKRDATAEVVLNQIFKHSPLQTYFGVNMLALNGGRPEQLSTRQILDSFLTFREEVITRRTIFDLEKARDRANILVGLALAVSNIDEVIKLIKSSKDSDEAKKLLLDKDWK

SEQ ID NO: 183984 - protein, 179 aa, Unknown
  Bacterial polypetide isolated from the Sargasso Sea
DKVLGSAEVGTLIKALGCGIGKEDFDIDNLRYHRIIIMTDADVDGSHIRTLLLTFFYRQMYEIVEKGHVYIALPPLYKIAKGKEFAYASDESEKDDAIKKFSKNGTRGLEVQRYKGLGEMNPEQLWTTTMDPINRRMMRVDIKDVQDANESFEILMGDDVEPRREFIDANALSVKELDI

SEQ ID NO: 183985 - protein, 259 aa, Unknown
  Bacterial polypetide isolated from the Sargasso Sea
KKFENKFDGGILEFVQFINQKKPILSNKNDKPVFKKPIYISSNKNDVNVECSLEWNAGYSEEVLAFTNNIHQKDGGTHLLGFRSALTRVINRYSNEYNKKNKLSLTGEDIKEGLTVVLSIKMPDPKFSSQTKDKLVSSEIRLIVENIINEKISMWFDQNPSTIKNVLEKITQAAIARDVARKARDNIRRKGSFEITGLPGKLADCQISKSEGTELYIVEGDSAGGSAKQGRNREFQAVLPLRGKILNTYVNTNGKKTSS

SEQ ID NO: 183986 - protein, 144 aa, Unknown
  Bacterial polypetide isolated from the Sargasso Sea
MSSSYLSYAMSVIISRALPDIRDGLKPVHRRIIYAMYKGGFDWTKQFRKSARIVGDVIGKYHPHGDQAVYDALVRMVQDFSMSLPLIEGQGNFGSIDGDPPAAMRYTEARLSKISQYLIDDIEKETVSFKSNYDETEKEPSVLP

SEQ ID NO: 183987 - protein, 272 aa, Unknown
  Bacterial polypetide isolated from the Sargasso Sea
GTHLSAFRASLTRVMGGYIESSGAGKKEKVSVTGEDAREGLTCVLSVKVPDPKFSSQTKDKLVSSEVRPAVESLCSEGLSTWFEEHPVEAKQIVAKIIEAASAREAARKARDLTRRKSALEISSLPGKLADCQERDPAKSELFIVEGDSAGGSAKQARNRENQAVLPLRGKILNVERARFDRMLSSDLIGTLILALGTGIGRDDFNADKLRYHKIILMADADVDGAHIRTLLLTFFYRQMPELITRGHVYIAQPPLYKVSKGKQSRYLKDQA

SEQ ID NO: 183988 - protein, 288 aa, Unknown
  Bacterial polypetide isolated from the Sargasso Sea
AEVIMTQLHAGGKFDHESYKVSGGLHGVGVSVVNALSEKLELTIERDGKVYFIAFKNGEAISPLKAKSKSKNSGTEITFFPSKEIFSSIKFSYSIVQKRLRELAFLNKGIKINLVDKINKKVRSEEFKYDGGISEFVDFLDEKRQKLKNKNGNDLFKKPITVNSNKNSLELECSLKWNSSYSEDVYAYTNNIYQKDGGTHLLGFRSALTRVINKYANEHNLLKKNKVSISGDDIKEGLTCVLSIKIPDPKFSSQTKDKLVSSEVRNIVETLINEKLSIWFDQNPSAAK

SEQ ID NO: 183989 - protein, 257 aa, Unknown
  Bacterial polypetide isolated from the Sargasso Sea
PHGDQSAYDALVRMAQDFAQRYPLIDGQGNFGSRDGDGAAAMRYTEARLSRITSLLLDEIDEGTVDFMPNYDGSTEEPRQLPARLPFALLNGASGIAVGLATEIPSHNLREIADACVALIKTPSLSQDELLAIVPGPDYPGGGQIISSPGDIADAYRTGRGSLKVRARWKIEDMARGQWQLVVNELPPGVSTQRVLEEIEEITNPKVKAGKKALTQEQTQLKASMLAVLDVVRDESSKDAPVRLVFEPRQARPRNKS

SEQ ID NO: 183990 - protein, 271 aa, Unknown
  Bacterial polypetide isolated from the Sargasso Sea
AQNFSTRYPLVDGQGNFGNIDGDNAAAMRYTEARLTALAELMLKDISEDTIDYINTYDGIDHEPIVLPSAFPNLLANGSSGIAVGMATNIPPHNINELFKALSKLLKNPNYTNSQLLKLIPGPDFPTGGEIIDSDDALKDAYVKGKGTIRLRARWKKEDLGRGQYQIIVYEIPYQVNKARIIEKISDLIDNKKANYLETIQDESAEDIRIVLIPKNRSFKAEVIFEDLCKNSDLEIRYAINFNAINHKLEPKLFSLKESFKSFIDHRFNVL

SEQ ID NO: 183991 - protein, 267 aa, Unknown
  Bacterial polypetide isolated from the Sargasso Sea
MYIGDTDDGTGLHQMIYEVVDNSIDEALAGFCSEIKVILNADGTITVKDNGRGVPVDIHKSEGVSAAQLIMTELHAGGKFDQNSYKVSGGLHGVGVSVVNALSKKLELEINRDGKVYNMTFENGAVQNKLKVIGESHQENNSYYTGTKITFLPSSETFNNIEFNYKIIEKRLRELAFLNTGVNIILKDKRAVKEKENSFKYEGGINEYVKYLNQGKNVVHGQPLFFSSNKNDVTVECSLQWTDSYHENTLCFTNNISQRDGGTHLAG

SEQ ID NO: 183992 - protein, 299 aa, Unknown
  Bacterial polypetide isolated from the Sargasso Sea
LDAVRKRPGMYIGDTDDGSGLHHMVFEVIDNSIDEALAGYCKNIIVTINQDNTVSIEDDGRGIPVDIHKGEKISAAEVIMTQLHAGGKFDHDSYKVSGGLHGVGVSVVNALSEELELNIFRDGKEYLIKFKDGNSLKPLKQVGKTKKKGTKITFLPSKEIFSSIKFSASILEKRIRELAFLNKGVLIMLKDNSSKKNKEFVHKYDGGIVEFIKHINNKKPILTNKNEKEVFKKPVYVTATKNNVIVECSFEWNAGYSEEVLPFTNNIPQKDGGTHLLGFRSALTRVINKYSNDRNSKKN

SEQ ID NO: 183993 - protein, 323 aa, Unknown
  Bacterial polypetide isolated from the Sargasso Sea
DSRKTGTNITFWPDDTIFDHVEFNYDILAHRLRELAFLNKGIMISIRDNRSERFQEFKYDGGISSFIRHINENKNVLHEDPVYFSGKSEDVEIEVAFQYNDSYTERIYSFVNNINTIDGGTHLTGFKGALTRTLNNYMTSNKISNDSKENFSGEDVREGMAAVISTRVTEPQFESQKKIKLTNVEIKGKVETLVSEYLGAYLEENPSVSKKIMAKAIDAQRARLAAKKARELTRRKNVLEFSTLPGKLADCQESDPSLSELFLVEGDSAGGSAKQGRDRKNQAILPLKGKILNVEKARFDKMLTNEEIKTIITAMGTGIGKEE

SEQ ID NO: 183994 - protein, 274 aa, Unknown
  Bacterial polypetide isolated from the Sargasso Sea
MLKKFFPVNIEDELKQSYLSYAMSVIHGRALPDVRDGLKPVHRRILYAMHDLKNNYNKPYKKSARVVGDVIGKYHPHGDSAAYDAIVRMAQDFSMRYTLIEGQGNFGSIDGDPPAAMRYTEVRMQKISDEILADLEKETVSFSENYDGSEQMPDVMPTKIPNLLINGSSGIAVGMATNVPPHNLTEVINGSLKLLENPKLSIDQIIESISGPDFPTGGTIDGKMGIYEAYKTGRGIIYVRSKSKVEESKTGKKSLVIYEIPFMVNKARTLEKIA

SEQ ID NO: 183995 - protein, 264 aa, Unknown
  Bacterial polypetide isolated from the Sargasso Sea
KLADCQIQKREGTELFIVEGDSAGGSAKQGRVREFQAVLPLRGKILNTFVNGKKNGEDQSTKALSKMMSSSEIVTLINALGTGSKDFNIENLRYDKIVIMTDADVDGSHIRTLLLTFFNNHPFNQLIENGHIYLAQPPLFKVTKANKSIYIKDEKNLEDYILDSAKNNKKIKKGSIEYKKFLQEQKDKLSIQRFKGLGEMNPEELWETTLNPDNRTMLRVQYSKGTKDKSKDDQKMIEILMGDEVAPRKDFITNNALDVTNLDI

SEQ ID NO: 183996 - protein, 199 aa, Unknown
  Bacterial polypetide isolated from the Sargasso Sea
VYDALVRMVQDFSMSVPLIDGQGNFGSIDGDPPAAMRYTETKLAKISQFLIDDIEKNTVSFKSNYDETEQEPTVLPAQYPNLLVNGAGGIAVGMATSIPPHNLGEIIDGTLALIKNKDIKVKELMKHIPGPDFPTGGVIIGKDIIREGYKTGRGSFKIRGEINVENLKNGKDRLVITSIPYQVNKSNLNEKIAELVRDK

SEQ ID NO: 183997 - protein, 297 aa, Unknown
  Bacterial polypetide isolated from the Sargasso Sea
YLEDNPNDAKSILEKAATAARAREAAKKARDLVIRKNAMEGGALPGKLADCSEKDPAKSELFLVEGDSAGGSAKQGRDRNFQAILPLRGKILNVEKARPDKMLGHAEIAALITATGTGIGVEDYDASKLRYHKIVIMTDADVDGAHIRTLLLTFFYRNMPQLIGDGNLFIAQPPLYKGNKGKSSQWLYSESEKDAWLAEKVFGKIKIVSSKSPDKKIEKRDLGIFSSNIKDYLDSFKGLESLEIPSLVIEKLISDPEYSNLEFYSKPGPASSPSQPQASFDDLLNNESEEVVIEDSG

SEQ ID NO: 183998 - protein, 241 aa, Unknown
  Bacterial polypetide isolated from the Sargasso Sea
MNHSLNEEMKTSYINYAMSVIIGRALPDARDGLKPVHRRVLYGMHEGGHTSEKKYSKSARSVGEVMGKYHPHGDQSIYDTMVRMAQDFSLRYPLVDGQGNFGSIDGDPPAAMRYTESRLDKISKHMLEDIEKKIVDFQPNFDDSEMEPTVLPARLPNLLLNGSDGIAVGMATRIPPHNLTEVAGAIRLHVDTILEEGVDKEAIPSISLEEYMQHVKGPDFPTGATIHGIDGIVDMYSTGKG

SEQ ID NO: 183999 - protein, 289 aa, Unknown
  Bacterial polypetide isolated from the Sargasso Sea
QDFSMRYPIVEGQGNFGSIDGDPPAAMRYTEVRMAKITDQMLNDIEKETVSYSPNYDGSEDIPDVLPTKIPNLLVNGSSGIAVGMATNIPPHNITEVLNGCINLINNPKVSIDELIKDISGPDFPTGGTIDGKAGIYEAYKTGRGIIHIRSNTSIEEDKSGKQSLIINEIPFMVNKARMLEKIAELVKEKKIEGITEIRDESDKDGLRVVIEVRKGDSVEVLENNLFAQTQLEQSFGINFTVLSEGQPKEVNLKEMLQAFVKHRKDIIIKRTKHDLRKAKERGHVVEGL

SEQ ID NO: 184000 - protein, 100 aa, Unknown
  Bacterial polypetide isolated from the Sargasso Sea
MSEYSQIKLDDEMRHSYIEYAMSVIVGRALPDVRDGLKPVHRRVLYSMHELNNGYNKAYKKSARIVGDVIGKYHPHGDTAVYDTIVRLAQPFSMRYPLVD

SEQ ID NO: 184001 - protein, 294 aa, Unknown
  Bacterial polypetide isolated from the Sargasso Sea
LAGYCKNIKVTINQDQSVSVEDDGRGIPVDLHKGEKKSAAEVIMTQLHAGGKFDHDSYKVSGGLHGVGVSVVNALSEKLSLKIFRDKKEYCVEFKDGKALSPLKVKGKTNKTGTLINFLPSREVFSNTKFSSSILQKRMRELAFLNKGLSINLIDKSGKKEKEYKNKYEGGIQEFVEFLDRNKTTLVNKNDLSLFKKPIYISGSKDNVEVECSLKWNADYSEEMLPFANNIHQKDGGTHLLGFRSALTRVINKYAADGNLLKKNKITLTGDDTREGLTGVLSIKIPDPKFSSQT

SEQ ID NO: 184002 - protein, 206 aa, Unknown
  Bacterial polypetide isolated from the Sargasso Sea
MDKNTLEKNKSFKPIFVQDEMSSSYLSYAMSVIVSRALPDVRDGLKPVHRRIIYAMYKGGYDWSKTFRKSARIVGDVIGKYHPHGDQSVYDALVRLVQDFSMSVPLISGQGNFGSIDGDPPAAMRYTETKLARIAQFLTEDLEKNTVNFRSNYDETEKEPEVLPSQYPNILVNGAGGIAVGMATSIPPHNLGEIINATIAYINNKE

SEQ ID NO: 184003 - protein, 290 aa, Unknown
  Bacterial polypetide isolated from the Sargasso Sea
EGGVSSYVDYLRGRKPPLGQTIECEGGQEGVTVEIAMQWNDSYNENVLCYTNNIPQKDGGTHLSGFRSSLTRVLKAFVKKEELNKNSPIELLGEDVREGLIAVISVQVPDPKFSSQTKEKLVSSEVEGIVSAVLNKSLNEFLLENPKEAMAILSKVSEAALAREAARKAREMTRRKGVLELAGLPGKLSDCQEKDPALSEIYLVEGDSAGGSAKQGRNRKYQAILPLKGKILNVQKARIDKVLSSAEIGTMVKAFGCGIGTEDFDIDKLRYHRIIIMTDADVDGSHIRTL

SEQ ID NO: 184004 - protein, 205 aa, Unknown
  Bacterial polypetide isolated from the Sargasso Sea
MAKKSKEAKYDSSNIQVLKGLEAVKKRPGMYIGDTDDGSGLHHMVFEVLDNCIDEAMAGYCSDINVIINKNGSVTIEDNGRGIPVDVHKKEGVSAAQLIMTTLHSGGKFDDNSYKVSGGLHGVGVSVVNALSKKLTLEVHRDGGEYFQEYSDGKPKAKLKKVKTSKKTGTKITFFPSEKIFTSVDFEVERIYKRIQELSFLNAGV

SEQ ID NO: 184005 - protein, 230 aa, Unknown
  Bacterial polypetide isolated from the Sargasso Sea
MHHMVFEVVDNSIDEAIVGFCKNISVIMNRDNSITVEDDGRGIPVDLHKGEKKSAAEVIMTQLHAGGKFDQNSYKVSGGLHGVGVSVVNALSEKLQLTIFRDGKEHFMEFFNGKSKNALKVLKKTKKTGTKINFVPSKEVFSTIKFNSNILQKKMRELAFLNKGLSITLTDNTRQKEKVFENKYDGGISEFVIFNDKNKTPLLNKNEKETFKKPIYLSGEKNDVKVECSL

SEQ ID NO: 184006 - protein, 272 aa, Unknown
  Bacterial polypetide isolated from the Sargasso Sea
GDVLGKYHPHGDSSVYDALVRMAQNFSMRYELVDGQGNFGSIDGDNAAAMRYTESRMTRLSGEMLKDLEKDTVEWEPNFDETLKEPAVLPTTVPTLLVNGSEGIAVGMATKIPPHNLIEIINGLVATIENENITIEELMGYIKGPDFPTAGLILGMDGLKQAYETGRGKIKMRAKAHIETNKKGRDSIVITEVAYQTNKATLVEKIAHLVRDKKVVGIRDLRDESDKDGVRVVIDTKKDAVPEVILNQLYQHTQLQDTFGIILLALVDGVPR

SEQ ID NO: 184007 - protein, 280 aa, Unknown
  Bacterial polypetide isolated from the Sargasso Sea
LKWNAGYNEDVYPYTNNIYQKDGGTHLLGFRSALTRVVNKYASEQNLLKKSKVLLSGDDVKEGLTCVLSVKIPDPKFSSQTKDKLVSSEVRNIVEGIINEKLSIWFDQNPSISKIILTKIIQAAVARDVAKKARENVRRKGALELTGLPGKLADCQNSKQEGTELFIVEGDSAGGSAKQGRNREYQAVLPLRGKILNTFTELNGVKKNGNQSELRTKSLSKMISSNEIVTLINALGLDPKTEEIDLEDLRYGKIIIMTDADVDGSHIRALLLTFFNNIPF

SEQ ID NO: 184008 - protein, 201 aa, Unknown
  Bacterial polypetide isolated from the Sargasso Sea
MDYSDIVISIFINEPSFEGQTKKRIIMPKFQKQLEILIQNEFLLWLNTNKKISKTLIETLIERSLIRTDLTKIQELERKSIKERNKLPGKLVDCSSKKIEGTELFIVEGDSAGGSAKQARNRELQAILPLRGKILNVYSVSLSKIADNNEIQNLIQSLGCGIGKNFDLSKLRYEKIILMTDADVDGSHIATLLITFIYKYM

SEQ ID NO: 184009 - protein, 309 aa, Unknown
  Bacterial polypetide isolated from the Sargasso Sea
GKTGTEIIFKPSDKTFSSVKFDFQILEHRIRELAFLNSGVRINLADDRSEKKHEVKFHFEGGLKEYVSYLNRSRASIHDTIVTKHEKNGITLEMAMEWTDVFHETTICFTNNIPQKDGGTHLAGFRAALTRVINNYSTNFGYAKKEKIQITGDDCREGLTSIISLKLPDPKFSSQTKDKLVSSEVRPVVEQYVNEALSQWFEENPNEAKKIISKVYDAASAREAARKARELTRRKGVLDITSLPGKLADCQEKDPSKSEIFLVEGDSAGGSAKQGRDRSNQAILPLRGKILNVERARIDKMLSSAEIGT

SEQ ID NO: 184010 - protein, 124 aa, Unknown
  Bacterial polypetide isolated from the Sargasso Sea
MTNEVNEVISPIPVEQEIKRSYLDYAMSVIVGRALPDVRDGLKPVHRRSLYRMHEMGNLWGRPYKKSARIVGDTMGMYHPHGDGAIYDAIARMAQDFSLRYPLVDGHGNFGSIDGDAPAAMRYT

SEQ ID NO: 184011 - protein, 301 aa, Unknown
  Bacterial polypetide isolated from the Sargasso Sea
HSGTEGLEAVRVRPGMYIGSTDQRGLHHLIYEILDNCVDEAMAGFCDTVTITISEEGEIALTDNGRGIPVDKHATTGLSALETVMTTLHAGGKFGGGAYKVSGGLHGVGASVVNALSCNVTAEIHREGKIYTQTYNQGISTGKLEVTGTTEIHGTTIKFTPDPEIFPNVDFDFDILTSHFKEIGYLNKGLKIHFTSYWHDKSRKGDIERTYFFDGGIANLVRNMNKNRSYLHEIPFYYQKEVPEAVVEVAVQYNQGYTESVYSFANCINTQEGGTHLTGFRLALTRILNDYARKQGFIKED

SEQ ID NO: 184012 - protein, 260 aa, Unknown
  Bacterial polypetide isolated from the Sargasso Sea
MKSSYLSYAMSVIISRALPDARDGLKPVHRRILYAMFKGGYDWSKQYRKSARIVGDVIGKYHPHGDQAVYDAMVRLAQDFSMKEKLLDGQGNFGSIDGDNAAAMRYTEVKLAKITEHLVSDINKNTVEFQNNYDDTELEPKVLPSQFPNLIVNGAGGIAVGMATNIPPHNLSEVIDGTLAYIDNENISLEQLMKIIPGPDFPTGGIILGKDQIIKGYKEGRGSIKIRGEIEIEEQKNERKLIIIKSIPYQVNKIALIEKL

SEQ ID NO: 184013 - protein, 255 aa, Unknown
  Bacterial polypetide isolated from the Sargasso Sea
MIDDITSEESNFKDIERINIEKEMESSFLDYAMSVIVSRALPDVCDGLKPVHRRIIYAMNEAGYVSGKPSRKSARIVGDVMGKYHPHGDSAIYDAMVRLAQEFSMRVPLVDGQGNFGSMDGDSAAAMRYTEAKLSPISSYLVNDINHETVAYKENYDGTTLEPELLPAEFPNLLINGSEGIAVGMATKIPPHCPTEIINACCKFVEDPEISDDDLLSYVNGPDFPTGGIIVGKSGIRSAYLTGKGSILIRGRTSI

SEQ ID NO: 184014 - protein, 277 aa, Unknown
  Bacterial polypetide isolated from the Sargasso Sea
IKVLKGLEAVRKRPGMYIGDTDDGTGLHHMVYEVVDNSIDEALAGYCKNIEVDINSDGTITVRDDGRGIPTDMHKGEKKSAAEVIMTQLHAGGKFDHDSYKVSGGLHGVGVSVVNALSENLELQIERDGKKYFIEFKDGNSKSPLKIIGKSKNTGTQIKFLPSKEVFSLVKFSFNTIQKRMRELAFLNKGIKIVVNDLTQKKPKSSTFKFDGGIVEFVEYLDEKRDKLKNKNGNDLFKKSIFLEGKKQNIDIECCLKWNAGYSEDVYPYTNNIFQKD

SEQ ID NO: 184015 - protein, 233 aa, Unknown
  Bacterial polypetide isolated from the Sargasso Sea
SIDGDPAAAMRYTETRLSKVSQFLIDDIEKETVSYKSNYDETEKEPTVLPAQYPNLLVNGAGGIAVGMATSIPPHNLGEIINGTLALIENKDIKIKELMKHIPGPDFPTGGIIIGKDVIKQGYNKGRGSFKIRGEISIETQKNGRERLVINSIPYQVNKSVLNERIAQLVREKKIEGIKDIRDESNREGIRVSIDLRNGVEPETIKRQLYKNTQIESSFGFNTLAIAEGKPKM

SEQ ID NO: 184016 - protein, 300 aa, Unknown
  Bacterial polypetide isolated from the Sargasso Sea
ILNYFEKKFLLKSKIKENENFETLISFNSNENSSLMSYCNTIETPDGGSHEIGIRNGILKAVKLYGQKNQFSKINNINYNDIFDYSNVIISIFINDPSFEGQTKKRIIMPNLQKEIETKTQQEFLLWLNANKKNSKILLEILIERALQRTDLSKIKELDRKSIKERNRLPGKLVDCSSKTIKGSEIFIVEGDSAGGSAKQARNREFQAILPLRGKILNVYSVGLSKIADNNEIQNLIQSLGCGIGKNFDISKLRYEKIILMTDADVDGSHIATLLITFFYKYMKQLINENKLFLAMPPLF

SEQ ID NO: 184017 - protein, 265 aa, Unknown
  Bacterial polypetide isolated from the Sargasso Sea
DDASNKPPSENEGSGPPDRGLGGRLIDLPIEQELKESYLTYAMSVIVSRALPDVRDGLKPSQRRILVAMNDLNLSPGSSRVKCAKISGDTSGNYHPHGESVIYPTLVRMAQEWNMRHVLVDKQGNFGSIAGLPAAAMRYTEARLSPIASQMLDDINLDTVDFVPTYDERNTEPVVLPSRFPNLVVNGAGGIAVGMATSIPPHNLGEVCRGLVQMIDNPDTSMAELLEIVPGPDFPTGGIVMGRESLLRGYLTGRSTITLRARAHV

SEQ ID NO: 184018 - protein, 307 aa, Unknown
  Bacterial polypetide isolated from the Sargasso Sea
MSNSYLDYAMSVIVSRALPDVRDGLKPVQRRILYAMYDTGMRSSSSFKKSARLVGEVMGKYHPHGDSAIYEAMVRLAQSWSMRYMLVEGQGNFGSTDGDSAAAMRYTEAKLRPISDTMLSDIEKETVPWNDNFDASIQEPSTLPATLPNLLVNGVQGIAVGMATNMAPHNLTEVCEAIVYMVDNPECSVDDLMGYIKAPDFPTGAHIWGTDGIKSAYSTGRGRVMIQANHKVEFMNKQEDRIRLVFDELPYQVNKANLVMRIAELMKLKKVEGISEVRDESDRKGTRLVVELKRGASEFVVLNIYTN

SEQ ID NO: 184019 - protein, 82 aa, Unknown
  Bacterial polypetide isolated from the Sargasso Sea
MTKKQVSNYQADSIKVLKGLEAVRKRPGMYIGDTDDGTGLHHMVYEVVDNSIDEALAGYCKAIEVSINSDGTVSVKDDGRGI

SEQ ID NO: 184020 - protein, 183 aa, Unknown
  Bacterial polypetide isolated from the Sargasso Sea
MTNNKTYQADSIKVLKGLEAVRKRPGMYIGDTDDGTGLHHMVYEVVDNSIDEALAGHCNYIYVKINSDGTITVKDNGRGIPVDIHKGEKKSAAEVIMTQLHAGGKFDHDSYKVSGGLHGVGVSVVNALSEKLELEINRDGKKYYIEFQDGEAKKPLKEIGKSKESGTQITFLPSKKVFSSIKF

SEQ ID NO: 184021 - protein, 116 aa, Unknown
  Bacterial polypetide isolated from the Sargasso Sea
MEKIEIKNNSLPKSILVHQEMSSSYLSYAMSVIVSRALPDVRDGLKPVHRRIIYAMYKGGYDWSKPFRKSARIVGDVIGKYHPHGDQAVYDALVRLVQEFSMSLPLIQGQGKFWIY

SEQ ID NO: 184022 - protein, 77 aa, Unknown
  Bacterial polypetide isolated from the Sargasso Sea
MGKTNQSDYSADSIKVLKGLDAVRKRPGMYIGDTDDGSGLHHMVFEVVDNSIDEALAGHCDQISVSLNSNGSVTIDD

SEQ ID NO: 184023 - protein, 237 aa, Unknown
  Bacterial polypetide isolated from the Sargasso Sea
ADCTASDTDLTELFLVEGDSAGGSAKQARDRKTQAVLPLRGKILNVASASAEKLGANQELSDLALALGVRPGKDFQLDDLRYGRVIIMTDADVDGAHIAALLMTYFYREMPALIEAGRLFLAQPPLYRMTQGGTTLYALDDSQREELEKSGFDGRGKIEISRFKGLGEMPPGQLKETTMNAATRRLLRVDLPRRDSSGADARRGVDQLVSTLMGKKAELRFGYIRDHADDVLADLDV

SEQ ID NO: 184024 - protein, 277 aa, Unknown
  Bacterial polypetide isolated from the Sargasso Sea
VLSIKMPDPKFSSQTKDKLVSSEIRLIVETIINDKVSTWFDQNPSIAKTVLEKITQAAMARDVARKARDSVRRKGTFELSGLPGKLADCQIQKKEGTELFIVEGDSAGGSAKQGRVREYQAVLPLRGKILNTFVNGKSNGDDQTTKALSKMMSSNEIVTLINALGTGSKDFNIENLRYDKIIIMTDADVDGSHIRTLLLTFFNNNPFNQLIENGHIYLAQPPLFKVTKSNKSVYIKDEKALEDYIIKTSGKADKKIKKGSKDYNKFMQEQREKLSIQ

SEQ ID NO: 184025 - protein, 262 aa, Unknown
  Bacterial polypetide isolated from the Sargasso Sea
SVYDALVRMAQDFSMRYELVDGQGNFGSIDGDNAAAMRYTESRMTKLSSEMLKDLDKDTVDWTPNFDETLKEPAVLPSSVPTLLINGSEGIAVGMATKIPPHNLVELVNGIVALIDKEDITTDELMQHIKGPDFPTAGLILGMDGLKEAYETGRGKIKMRARAHIETSKKGKDSIVITEVAYQTNKANLVEKIADLVRDKKIEGITDLRDESDKDGIRVVIETKRDAVPEVILNQLYKHTQLQDTFGIILLALVEGVPQIMS

SEQ ID NO: 184026 - protein, 269 aa, Unknown
  Bacterial polypetide isolated from the Sargasso Sea
MSSSYLSYAMSVIISRALPDIRDGLKPVHRRIIYAMHKGGFDWSKQFRKSARIVGDVIGKYHPHGDQAVYDALVRMVQDFSMSLPLIEGQGNFGSIDGDPPAAMRYTETRLSKVSQYLVDDINKDTVAFKSNYDETEKEPEILPAQYPNLLVNGAGGIAVGMATSIPPHNLGEIIDGTLALIENREIKIPELMKLIPGPDFPTGGLIIGKDIIKQGYKTGRGSFKIRGEISTEQLKNGKERLVVTSVPYQVNKSVLNERIAELVREKKI

SEQ ID NO: 184027 - protein, 167 aa, Unknown
  Bacterial polypetide isolated from the Sargasso Sea
MSKANQSYSAENIKVLEGLEAVRKRPAMYIGDVGRRGLHHLVYEVVDNSIDEALAGYCDKIVVTFNQDGSVTVEDNGRGIPVDLHKEEKKPAVEVVMTVLHAGGKFDKGSYKVSGGLHGVGVSVVNALSEWLWVEVKRDGKKHKQDYKKGEPQNKVKVVGDAKKTGT

SEQ ID NO: 184028 - protein, 264 aa, Unknown
  Bacterial polypetide isolated from the Sargasso Sea
YSDEVLAFTNNINQKDGGTHLLGFRSALTRVINRYSSEKNISKKNKVTLSGDDIKEGLTAILSIKMPDPKFSSQTKDKLVSSEIRLIVENIISDKISIWFDQNPSVARYVIEKITQAAIARDVARKARDNVRRKGSFELSGLPGKLADCQISKKEGTELFIVEGDSAGGSAKQGRMREYQAVLPLRGKILNTYVNANSKKNGNSAETHTKALAKMMSSSEIVTLINALGTGSKDFNIDNLRYDKIIIMTDADVDGSHIRTLLLT

SEQ ID NO: 184029 - protein, 111 aa, Unknown
  Bacterial polypetide isolated from the Sargasso Sea
VGNPTDDSDQNKLEGKFDITKMRYHKIIIMTDADVDGSHIRTLLLTFFYRHMKPIIDSGRLYIAQPPLYRLKKGTSTVYKKDDTDLEDYLIEEGLKNTIFENTQQSQVAGK

SEQ ID NO: 184030 - protein, 287 aa, Unknown
  Bacterial polypetide isolated from the Sargasso Sea
LTRVINKYANENNLLKKNKLAISGDDIKEGLTCVLSTKIPDPKFSSQTKDKLVSSEVRMIVETLVNEKLSIWFDQNPSIAKIILAKVIQAAMARDVARKARENVRRKGALELSGLPGKLADCQIGKQEGTELFIVEGDSAGGSAKQGRNRANQAVLPLRGKILNTYVEDFNVKKNGNGNGNGSDQRTKALSKMISSNEIVTLINALGLDPKAQEIDLKDLRYGKIIIMTDADVDGSHIRALLLTFFNNKPFNKLIENGHVYLAQPPLFKINKGSKGIYIKDEKELED

SEQ ID NO: 184031 - protein, 192 aa, Unknown
  Bacterial polypetide isolated from the Sargasso Sea
RVDKLLSNNEIQSIITALGTGFGGGDEETGERSAGDFDIEKIRYHKIIIMTDADVDGSHIRTLLLTFFYRKMKQLIDGGYLYLALPPLYRVHQGKKAAYAYDDNERDLLIERMKKDNKNTKVGIQRYKGLGEMNPEQLWDTTMDPEKRTLLQVTVESAEAAAVTFQNLMGSDVEARRTFIEKNARFVVNLDI

SEQ ID NO: 184032 - protein, 179 aa, Unknown
  Bacterial polypetide isolated from the Sargasso Sea
EIQSMITALGCGFGEDEDDPNSFNPEKLRYHKIVIMTDADVDGSHIRTLLLTFFWRKMKSLVQGGYLYMAMPPLYKLKQGKKERYAYTDEERDNILRRLESENKTKIDIQRYKGLGEMNAEQLWETTMNAETRTLIQVTVDHIMEEETNVRFRELMGSEVEHRRKFITERAKFATNIDI

SEQ ID NO: 184033 - protein, 264 aa, Unknown
  Bacterial polypetide isolated from the Sargasso Sea
EHPQEAKIIVNKIIEAARAREAARKAREMTRRKGALDIAGLPGKLADCQEKDPSLSEIFLVEGDSAGGSAKQGRDRKTQAILPLKGKILNVEKARFDKMLSSAEVGTLITALGCGIGREDFDPDKLRYHRIIIMTDADVDGSHIRTLLLTFFYRQMQELINRGHVYIAQPPLYKIKKGKQETYVKDDVELNKYLLQIALENSKLHISKSSPAISDTAFEKLAHDYMECESIISRQSAIYDEEILEAMGNIKPISSKDSRNEKKL

SEQ ID NO: 184034 - protein, 120 aa, Unknown
  Bacterial polypetide isolated from the Sargasso Sea
MPKPKKNTNTKNYDSSNIKVLKGLDAVRKRPGMYIGDTDDGTGLHHMVFEVVDNSVDEALAGFCTHIEVIIHEDDSITVKDNGRGIPVDKHKTEKTSAAEVIMTVLHAGGKFDDDSYKVS

SEQ ID NO: 184035 - protein, 310 aa, Unknown
  Bacterial polypetide isolated from the Sargasso Sea
FRKSARIVGDVIGKYHPHGDQAVYDALVRMVQEFSMSVPLVDGQGNFGSIDGDPPAAMRYTETKLAKVSQFLIDDIEKNTVLFKSNYDETEQEPTVLPAQYPNLLVNGAGGIAVGMATSIPPHNLGEVVDATLALIKNKDIKINELMKHVPGPDFPTGGVIIGKDIIKQGYKTGRGSFKIRGEISVENLKNGKDRLIISSIPYQINKANLNERIAELVRDKKIEGISDIRDESNSEGIRVSIDLRRNVEPETVKRQLYKYTSIESSFGFNSLAIVDQKPKTCTLKDFLENFLKFREDVVIKRTKFDLKKQ

SEQ ID NO: 184036 - protein, 120 aa, Unknown
  Bacterial polypetide isolated from the Sargasso Sea
MSEDKRSNKISNDYGAEQIQVLEGLEPVRKRPGMYIGSTGPRGLHHLVYEVVDNSVDEALAGHCDHIEIVLRADGSALISDNGRGIPTDIHPRTGKSALETVLTVLHAGGKFGSGGYKVS

SEQ ID NO: 184037 - protein, 62 aa, Unknown
  Bacterial polypetide isolated from the Sargasso Sea
MANKNSYQADSIKVLKGLEAVRKRPGMYIGDTDDGTGLHHMVYEVVDNSIDEALAGYVKILM

SEQ ID NO: 184038 - protein, 319 aa, Unknown
  Bacterial polypetide isolated from the Sargasso Sea
VIVGRALPDVRDGLKPVHRRVLYAMEQLGNDWNKPYKKSARIVGEVIGKFHPHGESAVYDTIVRMAQDFSLRYMLVDGQGNFGSIDGDSAAAMRYTEIRLTRLAHTLMADMDKETVDFLPNYDETEHYPAVLPARIPNLLVNGSAGIAVGMATNIPPHNMGEVLSACLALIDNSALSIDELMTHIPGPDFPTAAIINGKAGIVQAYRTGRGRAVMRAKTSIETEANGKQTIIVNELPYQVNKARLLEKIAQLVKEKRIDGITALRDESDKDGVRMVIEVRRNESAEVLLNNLYTQTQLQSVFGINMVALEGGQPKVMNL

SEQ ID NO: 184039 - protein, 192 aa, Unknown
  Bacterial polypetide isolated from the Sargasso Sea
MPRDIVDEMKESYLNYSMSVIVSRALPDVRDGLKPVHRRILYGMSELGSSWNRPYKKSARIVGDVLGKYHPHGDSSVYDALVRMAQDFSMRYELVDGQGNFGSIDGDNAAAMRYTESRMTKLSSEMLKDLEKDTVDWEPNFDETLKEPSVLPSNVPTLLVNGSEGIAVGMATKIPPHNLNEIINGLIALILN

SEQ ID NO: 184040 - protein, 163 aa, Unknown
  Bacterial polypetide isolated from the Sargasso Sea
MTNNKSYQADSIKVLKGLEAVRKRPGMYIGDTDDGTGLHHMVYEVVDNSIDEALAGHCKKIQVSINSDGSITVQDDGRGIPVDFHKEEKKSAAEVIMTQLHAGGKFDHDSYKVSGGLHGVGVSVVNALSQRLELQVERDGKKYFVEFINGENKTPLKITGKSK

SEQ ID NO: 184041 - protein, 315 aa, Unknown
  Bacterial polypetide isolated from the Sargasso Sea
KIIFTDASQKKEKISEFKFDGGVLEFVDFLDEKREKLQNKNGNDLFRKPIYIEGKKNNIELECSLKWNAGYTEDIFPYTNNIYQKDGGTHLLGFRSALTRVVNKYANENNLLKKNKLAISGDDIKEGLTCVLSTKIPDPKFSSQTKDKLVSSEVRMIVETLVNEKLSIWFDQNPSIAKIILAKVIQAAMARDVARKARENVRRKGALELSGLPGKLADCQIGKQEGTELFIVEGDSAGGSAKQGRNRANQAVLPLRGKILNTYVEDLNVKKNGNGNGTDQRTKALSKMISSNEIVTLINALGLDPKAQEIDLKDL

SEQ ID NO: 184042 - protein, 232 aa, Unknown
  Bacterial polypetide isolated from the Sargasso Sea
MADSVGPGGGGPGDSDDRIIQADLRNEMSRSYLEYAMSVIVGRALPDARDGLKPVHRRILYAMYELGLTSDRPYRKCARVVGEVLGKYHPHGDTAVYDALVRMAQDFSMSMPLIDGHGNFGSVDNDPPAAMRYTESRLQALTTDSLLEDIEAETVDFADNFDGSQQEPTVLPARIPQLLLNGSAGIAVGMATNIPPHNLNELISGLLALIENPDITDQELIRLIPGPDFPTE

SEQ ID NO: 184043 - protein, 282 aa, Unknown
  Bacterial polypetide isolated from the Sargasso Sea
GSAKQGRDRLTQAILPLRGKLLNVEKARLDKVLNNAEIRSLITAVGTGIGDHEGEGSFDADKARYHKIIIMTDADVDGAHIRTLLLTFIFRQMKGLIERGYVYVAMPPLYKIKRRKTEQYIQDDSEMSKMLISLGMEDLLLKRKTDNYVFHKDELSKIIDLFIEIEKIGKGLGRYGCTLERFFQQIDQSDHSLPRFLARIRTGNDEELRFFKDIDSKMGFVHSHNINEEDSQENIFKEVERDGIVLSQRISIHEIFESKELERLILACSDKGIEQTFFSNST

SEQ ID NO: 184044 - protein, 299 aa, Unknown
  Bacterial polypetide isolated from the Sargasso Sea
AAMRYTESRLQSLTDESLLEDIESETVDFADNFDGSQQEPTVLPARIPQLLLNGSSGIAVGMATNIPPHNLGELINGLKSIIKNPSIEDRELFEIIKGPDFPTGGQILGRDGIRETFKTGRGSITMRGVANIEQIKSIGRADKDAVIITELPFQTNKAALIERIADLVNEKKLEGISDIRDESDRDGMRIVIELKRDAYPQVVLNNLFKLTPLQNNFSANILALVKGEPTTLSLRKMLDVFLDFRVETIRRRTAFLLKKAEERDHIVKGLLLALDAMDEIINLIRSAKDSISAREKYKT

SEQ ID NO: 184045 - protein, 318 aa, Unknown
  Bacterial polypetide isolated from the Sargasso Sea
DVLGDDAARPEWLEPEFGVRDGQYYLTEQQAQAILDLRLQKLTGLEHEKLLDEYKELLEQIAELLHILGSADRLMEVIREEMELIREQFGDARRTEITANSADINIEDLINQEDVVVTLSHQGYVKYQPLTDYEAQRRGGKGKSAARIKEEDFIDRLLVANTHDTILCFSSRGRLYWMKVYQLPEASRGARGRPIVNLLPLEANERITAILPVREYEEGVNVFMATASGTVKKTALTEFSRPRSAGIIAVNLNEGDELIGVDLTSGNDEVMLFSAAGKVVRFKENAVRAMGRTATGVRGIKLAGEDSVVSLIVPRGEG

SEQ ID NO: 184046 - protein, 282 aa, Unknown
  Bacterial polypetide isolated from the Sargasso Sea
SGGLHGVGISVVNALSEYLLLEINRDGFSYTQEYKDGTPKSKLKKGGKSNKTGTSITFIPSLETFGKNRTFDHDTLFKRLRELSFLNSGLSIILKDERDGRFSNFKSDGGLEEFVTFLNKKKSVINKPFRFLKETKDGMAVELALQWNDSYQENTLCYTNNIFQKDGGSHLSGFKTALTRSLNNFMEKEGYLKSGDLTPSGEDVREGLTAVISVKLPDPKFSSQTKDKLVSSEIKPVVEQETYKHLNDFLLENPGEAKQIATKIIDASRAREAARKAREMTR

SEQ ID NO: 184047 - protein, 137 aa, Unknown
  Bacterial polypetide isolated from the Sargasso Sea
VDGSHIRTLLLTFFYRQMYEIVEKGYVYIALPPLYKITKGKEFVYASDESEKDDAIIKLSKNGNRGLEVQRYKGLGEMNPEQLWTTTMDPINRRMMRVDINDVQDANESFEILMGDDVEPRREFIDANALSVKELDI

SEQ ID NO: 184048 - protein, 161 aa, Unknown
  Bacterial polypetide isolated from the Sargasso Sea
GKIINVQKARLDKVLSSNEIGTLITALGTGIGVDEFDVEKLRYHRIIIMTDADVDGSHIRTLLLTFFYNQMYDLLEKGHVYLALPPLYKIKKGSKISYAKDEEEKDQILLELRKDSTDTSRAPEIQRYKGMGEMNPEQLWETTFDPEHRRLVQITLDQARE

SEQ ID NO: 184049 - protein, 172 aa, Unknown
  Bacterial polypetide isolated from the Sargasso Sea
MEKNSADNIKAFKPIFVQDEMSSSYLSYAMSVIVSRALPDVRDGLKPVHRRIIYAMYRGGYDWSKPFRKSARIVGDVIGKYHPHGDQSVYDALVRLVQEFSMSLPLISGQGNFGSIDGDPPAAMRYTETKLGRVSQFLTEDLEKNTVNYRNNYDETEKEPEVLPSQFPNILV

SEQ ID NO: 184050 - protein, 173 aa, Unknown
  Bacterial polypetide isolated from the Sargasso Sea
MSKNSELNKNLSYGADSIKVLKGLDAVRKRPGMYIGDTDDGSGLHHMVFEVIDNSIDEALAGHCKSITTTINSDNTVTVEDDGRGIPIDIHKGEKISAAEVIMTQLHAGGKFDHDSYKVSGGLHGVGVSVVNALSEKLELNIYREGKEYKINFENGNSLKPLKNTGKTKKRGT

SEQ ID NO: 184051 - protein, 235 aa, Unknown
  Bacterial polypetide isolated from the Sargasso Sea
MGEITAKEIVPIDIEKELKQSYLDYAMSVIVGRALPDARDGLKPVHRRALYAMHVLNNDFGRPHKKSARIVGDIIGKYHPHGDSAAYETIVRMAQWWSLRYPLVDGQGNFGSMDGDGPAAQRYTEVRMAKISQELLADLDKETVNFVENYDGTETMPDVLPTRVPNMLVNGSAGIAVGMATNMAPHNLNETLLACLAFIENPEISTSELMEFIPGPDFPTGGIINGKAGIVSAYE

SEQ ID NO: 184052 - protein, 165 aa, Unknown
  Bacterial polypetide isolated from the Sargasso Sea
MSTEENKNYGADSIKVLKGLDAVRKRPGMYIGDTDDGSGLHHMVFEVVDNSIDEALAGYCDTISISLNADGSVSVEDNGRGIPIDTHEEEGVSAAEVIMTQLHAGGKFDQDSYKVSGGLHGVGVSVVNALSNKLELNIFRDGKEYKIDFNNGDAASPLKEIGKVD

SEQ ID NO: 184053 - protein, 96 aa, Unknown
  Bacterial polypetide isolated from the Sargasso Sea
MSSSYLSYAMSVIVSRALPDIRDGLKPVHRRILYAMYKGGYDWSKQFRKSARIVGDVIGKYHPHGDQSVYDALVRMVQDFSMSLPLVQGQGNFWFY

SEQ ID NO: 184054 - protein, 192 aa, Unknown
  Bacterial polypetide isolated from the Sargasso Sea
MPKKQNKKGSYDSSNIQVLKGLEAVKKRPGMYIGDTDDGSGLHHMVFEVVDNCIDEAMAGHCTEIIVSINKNGSITVKDNGRGIPVDTHKKEKVPAAELIMTTLHSGGKFDDNSYKVSGGLHGVGVSVVNALSEELTLKICRDGGQYEQKYANGKAQTKLKKVKTSKETGTEITFKASKEIFSFVNFDIDKI

SEQ ID NO: 184055 - protein, 72 aa, Unknown
  Bacterial polypetide isolated from the Sargasso Sea
MIKTEKIQNYEADSIKVLKGLEAVRKRPGMYIGDTDDGTGLHHMVYEVVDNSIDEALAGHCKNIKVEINKDG

SEQ ID NO: 184056 - protein, 264 aa, Unknown
  Bacterial polypetide isolated from the Sargasso Sea
ILPLRGKILNTWKSRTDKILSSNEIGTLISALGTGIGNQEFDINKLRYHKVVIMTDADVDGSHIRTLLLTFFFKEMRELITNDNLYIARPPLYKVKRGKEELYLMDDDELHQALVNYGSKDITFQTGKGTKFKDSDLKRELLKIVEAQNLLKKVPERYNKKAIEEIAICGCLDVQKINDMSAKIVKQICDLIGNRFNRRFADFDRGWECSYEKEEGFIFKRELRGVVDQFSIDHDLLNSQVIQNINDNFASDNGVYAMFQETKP

SEQ ID NO: 184057 - protein, 201 aa, Unknown
  Bacterial polypetide isolated from the Sargasso Sea
MNKKNFTSISLQEEMQRSYLEYAMSVIVGRALPDARDGLKPVQRRILFAMHELGLTPDKPFRKCARVVGDVLGKYHPHGDQAVYDALVRLVQNFSTKYPTLDGHGNFGSVDNDPPAAMRYTETRLAPIAHKGFLEEIGSETVTFSNNFDGSQKEPDVLPAQLPFLLLNGSSGIAVGMATNIPPHNLGEVVDGLVALVKNKD

SEQ ID NO: 184058 - protein, 161 aa, Unknown
  Bacterial polypetide isolated from the Sargasso Sea
MQNSYLDYAMSVIVSRALPDVRDGLKPVHRRILYAMHESGYEWNKQHRKSARVVGDVIGKYHPHGDQAVYDALVRLAQDFSMSVPLLDGQGNFGSMDGDRAAAMRYTEVRMAKIASFLLEDIEKETVDFRPNYDETESEPSVLPAKYPNLLVNGAGGIAVG

SEQ ID NO: 184059 - protein, 278 aa, Unknown
  Bacterial polypetide isolated from the Sargasso Sea
PYTNNIYQKDGGTHLLGFRSALTRVVNKYANEQNLLKKSKVSLSGDDVKEGLTSVLSVKIPDPKFSSQTKDKLVSSEVRNIVETIINEKLSIWFDQNPSISKIILTKIIQAAVARDVARKARENVRRKGALELTGLPGKLADCQNSKQDGTELFIVEGDSAGGSAKQGRNRENQAVLPLRGKILNTFTDLNGSKKNGNASELRTKSLSKMISSNEIVTLINALGLDPKNEDIDLKDLRYGKIIIMTDADVDGSHIRALLLTFFNNKPFDKLIEFGHVY

SEQ ID NO: 184060 - protein, 225 aa, Unknown
  Bacterial polypetide isolated from the Sargasso Sea
MENEPNPTSKNNSIETIQIQDEMKSSYLDYAMSVIVSRAIPDLRDGLKPVHRRILYAMYETGNSHDKPYRKSARPVGDVMGKYHPHGDSAIYDALVRMAQDFSMSALLIDGQGNFGSIDGDSAAAMRYTEVRLAKITEGILSDIDKETVDFQDNYDGKDLEPAVLPAKFPNLFLNGAGGIAVGMATNIPPHNLKELIGATKKLINEPNSSLEDLLDIVPGPDFPT

SEQ ID NO: 184061 - protein, 119 aa, Unknown
  Bacterial polypetide isolated from the Sargasso Sea
MSSSYLSYAMSVIVSRALPDVRDGLKPVHRRILYAMYKGGYDWSKQFRKSARIVGDVIGKYHPHGDQSVYDALVRMVQDFSMSLPLVDGQGNFGSIDGDPAAAMRYTETRLSKVSQYLI

SEQ ID NO: 184062 - protein, 225 aa, Unknown
  Bacterial polypetide isolated from the Sargasso Sea
PLRGKILNTFVNGKKNGEDQSTKALSKMMSSSEIVTLINALGTGSKDFNIDNLRYDKIVIMTDADVDGSHIRTLLLTFFNNYPFNQLIENGHIYLAQPPLFKVTKANKSIYIKDEKALEDYILEISKIDKKIKKGSSEYKKFIQTQREKLSIQRFKGLGEMNPEELWETTLNPDNRTMLKVQYTKGTKDKSKEDQKMIEVLMGDEVAPRKDFITNNALEVTNLDI

SEQ ID NO: 184063 - protein, 284 aa, Unknown
  Bacterial polypetide isolated from the Sargasso Sea
GGTHEEGLRTAITKAINDFAKSRNLHSDISLTGDDIREGITGVISVRVKEPQFEGQTKTKLGNTEMKSKVQVLVNKELPKWLSKNTKEGRAIVERCAVAAKARMSAKKARELTKRKSILETAGLPGKLADCSSTDPIESELFIVEGDSAAGPAKQARESKTQAILPIRGKIINVQKVTENRALQNEEISSLIKAIGTGIKDEYKGEESRYGKIIFLTDADVDGAHIRTLLLTFFFKFMPGLIKEGKVWIAEPPLYRAKSSGSINYLKDDKSLEEFKKENKNKKF

SEQ ID NO: 184064 - protein, 111 aa, Unknown
  Bacterial polypetide isolated from the Sargasso Sea
MANKNTYQADSIKVLKGLEAVRKRPGMYIGDTDDGTGLHHMVYEVVDNSIDEALAGYCKNIKVRLNSDGTVTVNDDGRGIPTDIHKGEKKSAAEVIMTQLHAGGKFDHDSY

SEQ ID NO: 184065 - protein, 311 aa, Unknown
  Bacterial polypetide isolated from the Sargasso Sea
  misc_feature (19)..(19): Xaa can be any naturally occurring amino acid
EIAHELMADLEKETVDFVXNYDGTERIPDVMPTKIPNLLVNGSSGIAVGMATNIPPHNLTEVINGCLAYIDDENISVEGLMEHIPGPDFPTAAIINGRRGIEEAYRTGRGKIYIRARAEVETDAKTGRETIIVHEIPYQVNKARLIEKIAELVKDKRVEGISALRDESDKDGMRIVIEVKRDAVGEVVLNNLYSQTQLQVSFGINMVALHHGQPKIMNLKDILSAFVRHRREVVTRRTIFELRKARDRAHILEALAIALANIDPIIELIRRAPTPAEAKAGLIARPWDLGNVAAMLERAGDDAARPEWLEP

SEQ ID NO: 184066 - protein, 297 aa, Unknown
  Bacterial polypetide isolated from the Sargasso Sea
VPLISGQGNFGSIDGDPPAAMRYTETKLGKISQFLTEDLEKNTVSFRSNYDETEKEPEVLPSQYPNILVNGAGGIAVGMATSIPPHNLGEIINATIAYINNKDITISQLMKHVPGPDFPTGGIIIGKEIIKQGYNKGRGSFKIRGEIEFEEKKGGRETLIIKSIPFQVNKSILIEKIAQLVRDKKIEGIRDLRDESNREGIRVVIELRKGVEPETVRRQLYKLTNIESSFGFNTLAIVNDKPKILNLKEFISEFLKFREDTVVKRVKFDLKKAEDRAHILIGLAAAVETLMKLLNYQ

SEQ ID NO: 184067 - protein, 326 aa, Unknown
  Bacterial polypetide isolated from the Sargasso Sea
GNYGSIDGDNAAAMRYTEARMAKLSMELLHDIEKETVSFTKNFDESLEEPSVLPSRLPMLLLNGSSGIAVGMATNIPPHNLTELINGVNHFIDNPEATVPDLMQHVTGPDFPTRGIICGQSGIISAYETGRGIITVRSKTHIEETKKKRAIIVTEIPYQVNKANTIIKIAELVNDKKINGISDLRDESDKKGLRIYIELKRDAQEAIILNQLFKHTQLQTSFGINIVALVNGHPKTLNLREIFYHYVEHRKEVIRKRTEYDLKIAKNRLHILEGLRIALQHIDEIIALIKQSENAHIAREKLMENYKLSERQATAILEMRLQRLTG

SEQ ID NO: 184068 - protein, 297 aa, Unknown
  Bacterial polypetide isolated from the Sargasso Sea
GGTHLLGFRSALTRVINKYSNDRNSKKNKVSLSGEDIKEGLTAVLSIKMPDPKFSSQTKDKLVSSEIRNIVEHIIGEKVSTWFDQNPSTAKTVIEKITQAAMARDLARKARDSVRRKGTFELSGLPGKLADCQIQKREGTELFIVEGDSAGGSAKQGRVREFQAVLPLRGKILNTFVNGKKNGEDQSTKALSKMMSSSEIVTLINALGTGSKDFNIENLRYDKIVIMTDADVDGSHIRTLLLTFFNNHPFNQLIENGHIYLAQPPLFKVTKANKSIYIKDEKNLEDYILESAKFNKT

SEQ ID NO: 184069 - protein, 234 aa, Unknown
  Bacterial polypetide isolated from the Sargasso Sea
MSESNYNSSSIKVLKGLDAVRKRPGMYIGDTDDGTGLHHMVFELVDNSIDEALAGYCSEIGVIIHPDESVTVKDNGRGIPVDLHEEEGVSAAEVIMTVLHAGGKFDDNSYKVSGGLHGVGVSVVNALSSTLTLTIRRDNKVYEQTYTHGVPNAPLAAVGETDASGTKVHFIPSPETFTHIEFHYDILAKRLRELAFLNSGVRIRLTDERSGKEEVFEYEGGLRAFVEHLNANKT

SEQ ID NO: 184070 - protein, 132 aa, Unknown
  Bacterial polypetide isolated from the Sargasso Sea
MEKIESNLDKKQYKPIVVYDEMSSSYLSYAMSVIVSRALPDVRDGLKPVHRRIIYAMYKGGFDWSKQYRKSARVVGDVIGKYHPHGDQAVYDALVRLTQNFSMSLPLIDGQGNFGSIDGDPPAAMRYTETKL

SEQ ID NO: 184071 - protein, 127 aa, Unknown
  Bacterial polypetide isolated from the Sargasso Sea
MSEEFKDGHISKIDIVDEMSESYLNYSMSVIVSRALPDVRDGLKPVHRRVLFGASDLGATWNRKYKKSARIVGEVMGKYHPHGDASIYDTLVRMAQTWSLRYPLMDGQGNFGSIDGDNAAAMRYTEA

SEQ ID NO: 184072 - protein, 115 aa, Unknown
  Bacterial polypetide isolated from the Sargasso Sea
MSEESGERIIPVSIEDEMKTAYIDYSMSVIVSRALPDVRDGLKPVHRRVLYGMQELGVRANSSYRKSARIVGDVLGKYHPHGDSSVYDTMVRMAQEWSLRYPLVDGQGNFGSVDG

SEQ ID NO: 184073 - protein, 182 aa, Unknown
  Bacterial polypetide isolated from the Sargasso Sea
MASKKDYTSSNIKVLKGLEAVRKRPGMYIGDTDDGTGLHHMVFEVVDNSIDEALAGHCDLISVTIHSDESITVSDDGRGVPVDMHPEEKRSAAEVIMTVLHAGGKFDDNSYKVSGGLHGVGVSVVNALSETLTLTINRDNKTYKQEYKEGEPLAPIKAVGKSSQTGTTLKFKPSEKTFSNIE

SEQ ID NO: 184074 - protein, 302 aa, Unknown
  Bacterial polypetide isolated from the Sargasso Sea
KFSSQTKDKLVSSEVRNIVENIISEKLSIWFDQNPSISKIILTKIIQAAVARDVARKARENVRRKGALELTGLPGKLADCQNSKQEGTELFIVEGDSAGGSAKQGRNRENQAVLPLRGKILNTFTEINLSKKNGNSNDLRTKTLSKMISSTEIITLINALGLDPKNEEVDIKDLRYGKIIIMTDADVDGSHIRALLLTFFNNKPFSKLIKEGHIYLAQPPLFKINKGSKGIYIKDEKELESFIIKNSRDLKKYKKGSKDYEKFLQIEKNKLNIQRFKGLGEMNPEELWSTTLNPETRNLLQV

SEQ ID NO: 184075 - protein, 289 aa, Unknown
  Bacterial polypetide isolated from the Sargasso Sea
VFKSNNQKTPQIKDSELFEIIKGPDFPTGGQILGRDGIRETFKTGRGSITMRGVANIEQIKSIGRAEKDAVIITELPFQTNKAALIERIADLVNEKKLEGISDIRDESDRDGMRIVIELKRDAYPQVVLNNLFKLTPLQNNFSANILALVKGEPTTLSLRKMLDVFLDFRVETIRRRTTFLLKKAEERDHIVKGLLLALDAMDQIINLIRSAKDSISAREKLQNDHKLSSIQADAILQMQLRRLTALEADKIKGEHNELTRKINLYQQILNSKERIFEIILEELHKIDE

SEQ ID NO: 184076 - protein, 268 aa, Unknown
  Bacterial polypetide isolated from the Sargasso Sea
KKEGVSAAQLIMTTLHSGGKFDDNSYKVSGGLHGVGVSVVNALSKKLTLEVHRDGGEYFQEYSEGKPKAKLKKIKKSDKTGTIITFHPSNKIFTSTEFDIEKIYKRIQELSFLNAGVSINVEDKRTGKSRKFKNNGGLSSYVTHLRGRKQIVSDIFECSAEENEVGVEIAMQWTDSYSENVLCYTNNIPQKDGGTHLAGFRGSLTRVLKSFIKKENAKKTPTDLLGEDVREGLIAIISVKVPDPKFSSQTKEKRVSSEVEGVVSTIFN

SEQ ID NO: 184077 - protein, 79 aa, Unknown
  Bacterial polypetide isolated from the Sargasso Sea
MIKKTKNSSYQADSIKVLKGLEAVRKRPGMYIGDTDDGTGLHHMVYEVVDNSIDEALAGQCSNIEITINSDGTVTVRDD

SEQ ID NO: 184078 - protein, 165 aa, Unknown
  Bacterial polypetide isolated from the Sargasso Sea
MSSSYLSYAMSVIVSRALPDIRDGLKPVHRRILYAMYKGGYDWSKQFRKSARIVGDVIGKYHPHGDQSVYDALVRMVQDFSMSLPLVDGQGNFGSIDGDPAAAMRYTETRLSKVSQYLIDDIEKNTIDFKSNYDETEKEPSVLPAQFPNLLVNGAGGIAVGMATS

SEQ ID NO: 184079 - protein, 166 aa, Unknown
  Bacterial polypetide isolated from the Sargasso Sea
MSNQQSYKADSIKVLKGLDAVRKRPGMYIGDTDDGTGLHHMVYEVVDNSIDEALAGHCKNIEIDINNDGTVTVRDDGRGIPVDLHKGEKKSAAEVIMTQLHAGGKFDHDSYKVSGGLHGVGVSVVNALSEKLELEINRDGKKYFIEFKNGNAKSDLKVVGKSKITG

SEQ ID NO: 184080 - protein, 190 aa, Unknown
  Bacterial polypetide isolated from the Sargasso Sea
YTYKCFGGTGSKDFDIENLRYEKIIIMTDADVDGSHIRTLLLTFFNNKPFNELIEKGHLYLAQPPLFKVTRGTKSTYIKNEKDLEKYILKFSENGAKKLKKSDLEKFLNDEKQKLNIQRFKGLGEMNPEELWQTTLNPENRTLLKIEYSKGSKEKSKEDQNIIKILMGDEVAPRKDFITENALEVENLDI

SEQ ID NO: 184081 - protein, 294 aa, Unknown
  Bacterial polypetide isolated from the Sargasso Sea
KSGLLDALKEFCEYRSLLPKGLKLNTEDVITNAIFVVSSKMQNPQFAGQTKERLDSKEHMSFVSSSTKDVLSIWFNKHTEEGEKIAELAIISAQTRAKASNTVERKKTFKGPALPGKLSDCNSEDLNETELFLVEGDSAGGSAKQARERSFQAIMPLRGKILNTWDLESDEIIKSQEIKNLSTAIGVLPGDSNIASLRYGKICILADADSDGLHIATLLCALFLRHFKSLVQEGRIFIAMPPLFRIDCGKDVIYALDEIQKEKATKEFKAKKGKPKINIQRFKGLGEMNPSQLR

SEQ ID NO: 184082 - protein, 307 aa, Unknown
  Bacterial polypetide isolated from the Sargasso Sea
MDRSKVSLINEPIFIYGEKDGISLEVALWWNSAYNELVLPFTNNIPQGDGGTHLAGFRGALTRTVNMFVGSLGSKTKDKVSVTGDDAREGLTCVLSVKVPDPKFSSQTKDKLVSSEVRPVVESFVNEKLSEWFEENPSDAKIVVGKVIEAAIAREAARKARELTRKKNSIDVANLPGKLADCQEKDPTKREIFIVEGDSAGGSAKQGRSRKNQAVLPLRGKILNVERARPDKMLSSQEIGTLITALGTGIGNDDFDIEKLRYHKIIIMTDADVDGAHIRTLLLTFFFRKMPELIEKGHIFIAEPPLY

SEQ ID NO: 184083 - protein, 268 aa, Unknown
  Bacterial polypetide isolated from the Sargasso Sea
MSVIVSRALPDIRDGLKPVHRRIIYAMYKGGFDWSKQFRKSARIVGDVIGKYHPHGDQAVYDALVRMVQEFSMSVPLIDGQGNFGSVDGDPPAAMRYTETKLSKISQFLIDDIEKNTVDFKSNYDETEKEPVVLPAQYPNLLVNGAGGIAVGMATSIPPHNLGEVINATLALINNKDIKINELMKHIPGPDFPTGGTIIGKDIIKTGYKTGRGSFKIRGDINIEQLKNGKERLVIANIPYQINKSTLNERIVELIRDKKIDGISDIKR

SEQ ID NO: 184084 - protein, 232 aa, Unknown
  Bacterial polypetide isolated from the Sargasso Sea
QQAQAILELRLHRLTGLEHDKIIAEYEELLEFIAGLLFILRSPERLMEVIKEELEEILAEYGDARRTVINANEIDMSLEDLINEEDVVVTLSHLGYAKYQPLSDYQAQRRGGKGKAATKVKDEDFVEKLLVANTHDTILCFSDFGKMYWLKVYQLPLASRTSRGRPIVNLLPLSDGERITAILPVREYAEDKYIIMATSNGTVKKTALTAYSNPRANGIIAVNLKDGDQLIG

SEQ ID NO: 184085 - protein, 309 aa, Unknown
  Bacterial polypetide isolated from the Sargasso Sea
IIIMTDADVDGSHIRTLLLTFFYRELQDLINGGYLYIAQPPLYKLKKGKKEEYVLTDDELNSLILSNAVKGTEVRSKNKKKGIEGDGLLNTILDYSNSLSVIEKIEKQAGTIAAKAISVHKPITKTEANNKKKLETWIKGLSRTASKIAKEKGYKASVSIDYDDDGIGYINTEEEIGGVTHHGKIANSFLRSNDYKIFGRVQKAQKAFPGPVVIDNGSEITEYANIEDCLNQIVNTSKRGLNVQRYKGLGEMNPDQLWETTLDPTTRSLLQVKADDDAGLTFETLMGDEVPPRREFIEENALNAGNVDI

SEQ ID NO: 184086 - protein, 312 aa, Unknown
  Bacterial polypetide isolated from the Sargasso Sea
IKEGLICVLSIKIPDPKFSSQTKDKLVSSEVRNVVETIINEKLSVWFDQNPSVTKIVLAKIVQAALARDVARKARENVRRKGALELTGLPGKLADCQNSKQEGTELFIVEGDSAGGSAKQGRNREFQAVLPLRGKILNTYTSSNGNKKNGNGNEVRTKTLAKLISSNEIVTLINALGLDPKDEEIDLKDLRYGKIIIMTDADVDGSHIRALLLTFFNNKPFNKLIENGHIYLAQPPLFKINKGSKGIYIKDEKELEKYILENSKVLKKIKKGSKEFEKRFQEEKSLVSIQRFKGLGEMNPEELWNTTLDPSS

SEQ ID NO: 184087 - protein, 185 aa, Unknown
  Bacterial polypetide isolated from the Sargasso Sea
VEKARIDKVLSSQEIGTMVTALGCGIGRDDFDISKLRYHRIIIMTDADVDGSHIRTLLLTFFYRQMFEIVESGHIYIAMPPLYKITKGKTALYSSNEAEKENHVKELSKGGTKGLEVQRYKGLGEMNPDQLWSTTMDPDNRRMMQVTIKDAKEADDAFEVLMGDQVEPRREFIDANALSVSNLDI

SEQ ID NO: 184088 - protein, 291 aa, Unknown
  Bacterial polypetide isolated from the Sargasso Sea
KSKQTGTQITFLPSKDIFSSIKFSSNVLIKRMRELAFLNKGLKILFTDAREKKIKTLEFKFDGGLIEFVDFLDEKREKLLNKNGNDLFKKPIYIEGKKNNIELECSLKWNAGYSEDIFPYTNNIHQKDGGTHLLGFRSALTRVINKYANENNLLKKNKLAISGDDIKEGLTCILSTKIPDPKFSSQTKDKLVSSEVRMIVETIINEKLSIWFDQNPSIAKIILAKVIQAAMARDVARKARENVRRKGALELSGLPGKLADCQIGKQEGTELFIVEGDSAGGSAKQGRNRSN

SEQ ID NO: 184089 - protein, 133 aa, Unknown
  Bacterial polypetide isolated from the Sargasso Sea
HIRTLLLTFFYRQMYEIVEKGYVYIALPPLYKITKGKEFVYASDESEKDDAIKKLSKNGNRGLEVQRYKGLGEMNPEQLWTTTMDPINRRMMRVDIKDVQDANESFEILMGDDVEPRREFIDANALSVKELDI

SEQ ID NO: 184090 - protein, 310 aa, Unknown
  Bacterial polypetide isolated from the Sargasso Sea
VKGQRNFGSIDGDPAAAMRYTETRLSKVSQYLIDDIEKNTVSFKSNYDETEKEPSVLPAQFPNLLVNGAGGIAVGMATSIPPHNLGEVINGTLALIENKDIKIKDLMKHIPGPDFPTGGVIIGKDIIKQGYNKGRGSFKIRGEISIETLKNGRERLVITSIPYQVNKSVLNERIAQLVREKKIEGIRDIRDESNREGIRVSIDLRNGVEPETVKRQLYKNTQIESSFGFNTLAIVDGKPQTCNLKEFLSNFLNFREDVVIKKTKFDLQKAEERAHILIGLSVSVENLDKIIKIIRSSKTPDEAKKTILKN

SEQ ID NO: 184091 - protein, 235 aa, Unknown
  Bacterial polypetide isolated from the Sargasso Sea
MAEGEKLIPINIEEAMKSAYIDYSMSVIVSRALPDVRDGLKPVHRRVLFGMSELGLRSNSKYKKSAFIVGEVLGKYHPHGDSSVYDTMVRMAQEWSLRYMLVDGQGNFGSIDGDSPAAMRYTEARLKKISEEMVEDLDKDTVDFQLNYDDSIKEPTVLPTKIPSLLVNGASGIAVGMATNMPPHNLSEVIDGTVAYIDDNNIEIDELYKHVKAPDFPTGGVIYGYDGVKNAFETG

SEQ ID NO: 184092 - protein, 91 aa, Unknown
  Bacterial polypetide isolated from the Sargasso Sea
MIKKNTNNYQADSIKVLKGLEAVRKRPGMYIGDTDDGTGLHHMVYEVVDNSIDEALAGHCKNIEVNINSDGSVTVKDDGRGIPTDIHKEEK

SEQ ID NO: 184093 - protein, 168 aa, Unknown
  Bacterial polypetide isolated from the Sargasso Sea
LVTALGCGIGTDEFDVDKLRYHRIIIMTDADVDGSHIRTLLLTFFFKQMLQIIERGHIYIALPPLYKVTKGKKAIYCSSEVEKNNALKELSKSGNRGIEVQRYKGLGEMNPDQLWTTTMDPENRRMMKVTVEDAIEAREMFETLMGDNVEPRREFIDENALSVANLDI

SEQ ID NO: 184094 - protein, 187 aa, Unknown
  Bacterial polypetide isolated from the Sargasso Sea
MPKTKKSTNTKKYDSSNIKVLKGLDAVRKRPGMYIGDTDDGTGLHHMVYEVVDNSVDEALAGYCSEISVIIHQDDSITVKDNGRGVPVDKHKEENKSAAEVIMTVLHAGGKFDDDSYKVSGGLHGVGVSVVNALSQTLSLRIHKNGNIYEQDYAHGAPKKPLKKGAKTNRTGTTISFQPSKKTFSNT

SEQ ID NO: 184095 - protein, 298 aa, Unknown
  Bacterial polypetide isolated from the Sargasso Sea
QAALARDVQRKARENVRGKGALELTGLPGKLADCQNSKQEGTELFIVEGDSAGGSAKQGRNREYQAVLPLRGKILNTYTSTNGSKKNINGNGNEIRTKTLAKLISSNEIVTLINALGLDPKNEEMDIKDLRYGKIIIMTDADVDGSHIRALLLTFFNNKPFNKLIENGNIYLAQPPLFKINKGSKGIYIKDEKELDNYIIKNSKEFKKIKKGSKDFEKKLQEEKSKISIQRFKGLGEMNPEELWNTTLNPETRNLLQVKYSKDLKKDYGLIHTLMGNDVALRKDFIVENAINVSNLDV

SEQ ID NO: 184096 - protein, 253 aa, Unknown
  Bacterial polypetide isolated from the Sargasso Sea
MRSDRRSQIVYYEVEEHKVKNEQIENSYDADSIKVLKGLEAVKKRPGMYIGDTDDGSGLHHMVYEVVDNCVDEALAGHCDEITVSLKEGSNVTVTDNGRGIPTDIHPGEGISAAEVIMTQLHAGGKFDQNSYKVSGGLHGVGVSVVNALSEFLELKIWRDGLEHIATFENGATIRSLESIGPAKSRSGTQITFRPSKDIFSNINFSIKTLEARLRELAFLNAGLTIVLVDEREKDGKRIKMHYEGGVCEFVNT

SEQ ID NO: 184097 - protein, 273 aa, Unknown
  Bacterial polypetide isolated from the Sargasso Sea
TFMASPDMFATIEYDRSTLEHRLRELAFLNSGVALKLIDAREVDTIEVDLHYEGGLRAFVDYLDRSKSALNEHIIAISGEREGITVEIAMQWNDSYHETTLCFTNNIPQRDGGTHLAGFRGALTRTINAYAASSGMASKAKVNITGDDAREGMTCVLSVKVPDPKFSSQTKDKLVSSEVRPVVESLVGEGLGRWFEEHPTEAKKVIGKIAEAAVAREAARKARELTRRKGALDINSLPGKLADCQERDPTLSELFIVEGDSAGGSAKQGRNRA

SEQ ID NO: 184098 - protein, 232 aa, Unknown
  Bacterial polypetide isolated from the Sargasso Sea
MSSSYLSYAMSVIISRALPDVRDGLKPVHRRILYAMHKGGFDWSKQFRKSARIVGDVIGKYHPHGDQAVYDALVRMVQEFSMSLPLIDGQGNFGSIDGDPPAAMRYTETKLAKVSQFLIDDIEKNTVEFKSNYDETEIEPTVLPAQYPNLLVNGAGGIAVGMATSIPPHNLAEIIDGTLALINNKDIKIKELMKHIPGPDFPTGGIIIGKNIIKEGYKSGRGSFKIRGEISV

SEQ ID NO: 184099 - protein, 103 aa, Unknown
  Bacterial polypetide isolated from the Sargasso Sea
MAKNNSTYQADSIKVLKGLEAVRKRPGMYIGDTDDGTGLHHMVYEVVDNSIDEALAGHCKNISVDINQDGSVTVRDDGRGVPVDIHKGEKKSAAEVIMTQVTC

SEQ ID NO: 184100 - protein, 185 aa, Unknown
  Bacterial polypetide isolated from the Sargasso Sea
MKKTDDAKIYKNTEIQSLITALGLGIKGEEFNINSLRYHRVVIMTDADVDGAHIRTLLLTFFYRYQRDLVEKGFIYIACPPLYKVERGKNYKYCYNENQLKKTIEDFGEKANYNIQRFKGLGEMMPKQLWDTTMNPETRMMKRVEIEDALEADRIFNILMGDKVAPRREFIETHSANLDMATLDI

SEQ ID NO: 184101 - protein, 254 aa, Unknown
  Bacterial polypetide isolated from the Sargasso Sea
SEVRPVVESLINDLLSNWFEEHPNEAKIIVGKVVEAAAAREAARKARDLTRRKGALDISSLPGKLADCQEKDPEKCEIFIVEGESAGGSAKQGRDRSTQAILPLKGKIINCEKARLSKVLSSNEIATLITALGGGIGNSINEDDEDDESFKTEKLRYKKVIIMTDADVDGAHIKTLLLTFFYRQMRPLITDGCLYIAQPPLYKAKKGNSETYLKDDDDLENYLINSGINDSSLILNNGEVIASNDLLDLVTKSR

SEQ ID NO: 184102 - protein, 259 aa, Unknown
  Bacterial polypetide isolated from the Sargasso Sea
VSITLCNKATKKDEEFKHKYDGGITEFVKHINKKKPILVNKNEKEVFKKPVYVTSTKNNVIIECSFEWNAGYSEEVLPFTNNIPQKDGGTHLLGFRSALTRVINKYSNERNNKKNKITLSGEDIKEGLTAVLSIKMQDPKFSSQTKDKLVSSEIRLIVENIISDKVSTWFDQNPSIAKTVLEKITQAAMARDVARKARDSVRRKGTFELSGLPGKLADCQIQKREGTELFIVEGDSAGGSAKQGRVREYQAVLPLRGKI

SEQ ID NO: 184103 - protein, 286 aa, Unknown
  Bacterial polypetide isolated from the Sargasso Sea
EKDGITVEVAMWWNDSYHENVLCFTNNIPQRDGGTHMAGFRGALTRQMVSYADTSGILKREKVTLSGEDCREGLTAVLSVKVPDPKFSSQTKDKLVSSEVRPVVESCVNDALGQWLEEHPNEARILVTKIAEAATAREAARRARELTRRKGALDIASLPGKLADCSNRDPAKSELVLVEGDSAGGSAKQGRSRETQAILPLRGKILNVERARFDKMLSSQEIGTLITALGTGIGKDEYNPDKLRYHKIIIMTDADVDGAHIRTLLLTLFFRQMPELIERGHLYIAQ

SEQ ID NO: 184104 - protein, 287 aa, Unknown
  Bacterial polypetide isolated from the Sargasso Sea
MQLEKDRECTFGDTDDGTGLHHMVFEVLDNSIDEALGGFCKNIIVTMNSDNTITVEDDGRGIPIDMHKGEKMSAAEVIMTQLHAGGKFDHNSYKVSGGLHGVGVSVVNALSEKLKLSIFRDQVEYFMEFQNGNSIKPLKKIGKTKKRGTRITFSPSKDIFSSTKFSSSTLQKRMRELAFLNKGISLTLFDKSSSKTKEYKNKYEGGILEFVKYINNKKPILQNKNEKTVFKKPLYISANKNDVSVECSLEWNAGYSEEVLAFTNNIHQKDRGTHLLGFRSALTRIIK

SEQ ID NO: 184105 - protein, 304 aa, Unknown
  Bacterial polypetide isolated from the Sargasso Sea
DKTIFSGGIEFEYALLSSRLRELAYLNGGVKIVFRDERNQLSDGSFKEEIYIYQGGIKEYVEYMNAEKDSIHPEIIYVDSQKENVYVEAALQWCSDVYSDNILGFANNIRTIDGGTHIEGLKTVLTRTFNNLAKKRGKRKDIEKNLAGENIREGLTVVLSVKVPDPEFEGQTKTKLGNTEVRGIVDSLIGEALTKYMEFNPGILDLILEKAIQSFNAAEAARRARELVRRKSVLESSTLPGKLADCSSRDPSESEIYIVEGDSAGGSAKQGRDRNFQAILPLRGKILNMKKLTILKYIKTQKYS

SEQ ID NO: 184106 - protein, 307 aa, Unknown
  Bacterial polypetide isolated from the Sargasso Sea
TDDGTGLHHMVYEVVDNSIDEALGGFCKNIFVKINIDGTVTVRDDGRGIPVDIHRGEKKSAAEVIMTQLHAGGKFDHNSYKVSGGLHGVGVSVVNALSENLKLEIYRDGKKYYIEFQNGKAKAPLKVIGKSKETGTQITFKPSNQIFSSIKFSEKILTKRMRELAFLNKGIKIIFIDASQKKERSTEFKFDGGILEFVEFLDQKREKLQNKNGNDLFKKPIYIDGSKSNIEIECSLKWNSTFTEEVFPYTNNIFQKDGGTHLLGFRSALTRVINKYANEHNLLRKNKLSISGDDIKEGLTCVLSIKI

SEQ ID NO: 184107 - protein, 234 aa, Unknown
  Bacterial polypetide isolated from the Sargasso Sea
MSSSYLSYAMSVIVSRALPDVRDGLKPVHRRIIYAMYKGGYDWSKPFRKSARIVGDVIGKYHPHGDQAVYDALVRLVQDFSMSLPLIKGQGNFGSIDGDPPAAMRYTETKLSKVTQFLTDGLEKNTINYRNNYDDTEKEPVVLPSQFPNLLVNGAGGIAVGMATSIPPHNLGEVIDGTIGYIKNRDITVSQLMKHIPGPDFPTGGVIIGKDIIKQGYNKGRGSFKIRGEIDEEN

SEQ ID NO: 184108 - protein, 290 aa, Unknown
  Bacterial polypetide isolated from the Sargasso Sea
FRKPIYVQGSKNDVSIECSIQWNSGYSEDVMAFTNNIHQRDGGTHLLGFRSSLTRTINKYASDTTLLKKSKVAISGEDIREGLTGILSIKMPDPKFSSQTKDKLVSSEVRIIVESILNEKLSIWFDQNPGVSRIVLEKVIKAAIARDVARKARENVRRKGSLELSGLPGKLADCQLSTKENTELFIVEGDSAGGSAKQGRNREFQAVLPLRGKILNTFTDVNGSSRNGSQEDIQNKVFSKMMSSNEIVTLINALGTGSKSFNLDDLRYDKIIIMTDADVDGSHIRSLLLT

SEQ ID NO: 184109 - protein, 320 aa, Unknown
  Bacterial polypetide isolated from the Sargasso Sea
LGEFIKYLDESREPIINDIIKMEGEKNNIPVEVAMIYNSSFSENLHSYVNNINTHEGGTHLSGFRRGLTNTLKKYADSSGLTDKLKFDISGDDFREGLTAVISVKVAEPQFEGQTKTKLGNREVSAAVSQAVSEMLENYLEENPNDSKIIVQKVILAAQARHAARQAREMIQRKTVMTGGGLPGKLSDCSETDPLKCEVFLVEGDSAGGTAKQGRDRVFQAILPLRGKILNVEKAQQHRVFENEEIRNIYTALGVSIGTEEDSKALNLEKLRYNKIIIMCDADVDGSHISTLILTFFFRYMRELCEGGYVYIATPPLYLV

SEQ ID NO: 184110 - protein, 223 aa, Unknown
  Bacterial polypetide isolated from the Sargasso Sea
MSSSYLSYAMSVIVSRALPDIRDGLKPVHRRIIYAMYKGGFDWSKQFRKSARIVGDVIGKYHPHGDQAVYDALVRMVQDFSMSVPLIDGQGNFGSVDGDPPAAMRYTETRLSKISQYLIDDIEKNTVDFKSNYDETEKEPVVLPAQYPNLLVNGAGGIAVGMATSIPPHNLSEVINATLALINNKDIKINELMKHIPGPDFPTGGTIIGKDIIKTGYKTGRGS

SEQ ID NO: 184111 - protein, 266 aa, Unknown
  Bacterial polypetide isolated from the Sargasso Sea
MSKQSRLNQKNNEYSASSIKVLKGLDAVRKRPGMYIGDTDDGTGLHHMVFEVLDNSIDEALGGHCKNISVFINPNNTITVEDDGRGIPIDMHKGEKMSAAEVIMTQLHAGGKFDHNSYKVSGGLHGVGVSVVNALSEKLELKIFRDGVEYFIEFENGKSLKPLKKIGKSSKRGTNITFLPSKEIFSSIKFSSTVLQKRMRELAFLNKGINLTLVDKTSSKIKKYENKFDGGILEFVQFINQKKPILSNKNEKPVFKKPIYFISSKN

SEQ ID NO: 184112 - protein, 169 aa, Unknown
  Bacterial polypetide isolated from the Sargasso Sea
MTELINTKINKILSDKYLAYAISTIVSRSLPDVRDGLKPVHRRIIYSMYQLKLFNDSSFKKSARIVGDVMGKFHPHGDQAIYQSLVRMAQDFSTRVTLIEGQGNFGNIDGDNPAAMRYTEARLEKITNYFFDGIDENSVNFKENYDGQNLEPEVLPTKLPNLLLNGSTR

SEQ ID NO: 184113 - protein, 298 aa, Unknown
  Bacterial polypetide isolated from the Sargasso Sea
LIYEVVDNSIDEALAGHCTKITVFFNKDGSITVEDNGRGIPVGMHKEEKKPAVEVVMTVLHAGGKFDKDTYKVSGGLHGVGVSVVNALSEWLWVEVQRDGKIYKQDYRIGVTQNKLKEVGKTKKSGTRVCFMPDSGVFNTTVFEYDIIAERLRELAYLNKGLEINLRDKREKEGQSDCFKFRGGLSDFVKYLDENNNPLHNKVITVTKEDGEIPVDVALRYGNTYNDNILTFVNNINTIEGGTHLSGFRSALTRAMNNHASKNNLIKTKKTEKISLTGEDFREGLTAIISVKVPEPQF

SEQ ID NO: 184114 - protein, 275 aa, Unknown
  Bacterial polypetide isolated from the Sargasso Sea
KDTNDVPVEVAMRYGNTYNDNILTFVNNINTIEGGTHLSGFRSALTRAMNNHASKNNLIKSKKNEKINLTGEDFREGLTAIISVKVAEPQFEGQTKTKLGNGDVKGIVDKIVYEGILDFLEQNPSIGRRVIEKALLAARSRSAARKARELIRRKSALGGSSLPGKLSDCSNKDPVFCELYLVEGDSAGGSAKQGRDRRTQAILPLRGKVINSEKARVDKLLSNNEVQSMITALGAGFGGSEDESGEKSAGDFDSEKLRYHKIIIMTDADVDGSHI

SEQ ID NO: 184115 - protein, 267 aa, Unknown
  Bacterial polypetide isolated from the Sargasso Sea
AMSVIVGRALPDARDGLKPVHRRALYAMHVLNNDYGRPHKKSARIVGDIIGKYHPHGDGAAYETIVRMAQWWSLRYPLVDGQGNFGSMDGDGPAAQRYTEVRMAKISQELLADLDKETVNFVENYDGTETMPEVLPTKIPNMLVNGSAGIAVGMATNMAPHNLNETLSACLAFIENPEISTSELMEFIPGPDFPTGGIINGRAGIVSAYESGKGRVKIRAKTHFEDEDKDKAKIVITEMPYQVNKSKLIEKIAELSRDKKIEGVRDI

SEQ ID NO: 184116 - protein, 159 aa, Unknown
  Bacterial polypetide isolated from the Sargasso Sea
MEDDSEPISIEEEMKKSYLDYAMSVIVSRAIPDLRDGLKPVHRRILYAMNETGNTFDKSYRKSARPVGDVMGKYHPHGDGAIYDALVRMAQDFSMSLPLLDGQGNFGSMDGDSAAAMRYTEVRLAESANFILSDIEKNTVEFQDNYNGKDREPSVLPSR

SEQ ID NO: 184117 - protein, 290 aa, Unknown
  Bacterial polypetide isolated from the Sargasso Sea
SVVMLCQILLELRIWRDGLEHVMTFRDGEVEQSLEVVGDAGGKTGSQVTFLASKCIFSNTDYDFATLEHRLRELAFLNSGVRLVITDARHVETDVVELHYDGGLEAFVSYLDRSKTALNPTISVSGEKDGIVVEAALQWNDSYHESTLCFTNNIPQRDGGTHLAGFRGAVTRTINTYGAGDSAKKAKVTISGDDAREGMTCVLSVKVPDPKFSSQTKEKLVSSEVRPVVESVLGDKLNQWFEEHPADAKRIIGKIIEAAAAREAARKARELTRRKGALEVSSLPGKLADC

SEQ ID NO: 184118 - protein, 292 aa, Unknown
  Bacterial polypetide isolated from the Sargasso Sea
TVKDDGRGIPVDIHKGEKKSAAEVIMTQLHAGGKFDHDSYKVSGGLHGVGVSVVNALSEKLELTINRDGKKYFLEFKNGDAKVPLKPIGKSKNSGTEIKFLPSKEIFSSTKFSFLIIQKRMRELAFLNKGIKITLNDLTQKKIKNSEFKFDGGILEFVEFLDEKREKLKNKNDNDLFRKPIYIEGLKSNIDVQCSLKWNAGYNEDVYPYTNNIYQKDGGTHLLGFRSALTRVINKYASEQNLLKKNKFTLSGDDIKEGLTCVLSVKIPDPKFSSQTKDKLVSSGSKKILLKL

SEQ ID NO: 184119 - protein, 215 aa, Unknown
  Bacterial polypetide isolated from the Sargasso Sea
MTDLASSISPINIEDELKNSYLDYAMSVIVGRALPDVRDGLKPVHRRVLFAMSELKNDWNKPYKKSARVVGDVIGKYHPHGDSAVYDTIVRMAQPFSLRYTLVDGQGNFGSVDGDSAAAMRYTEIRMDKLAHQLLADLEKETVDYVPNYDGTEQIPAVLPTRVPNLLINGSSGIAVGMATNIPPHNLTEVVKGCLALIADPALSIEQLMEHIPGP

SEQ ID NO: 184120 - protein, 240 aa, Unknown
  Bacterial polypetide isolated from the Sargasso Sea
MTKTQPNSNYKADSIKVLKGLDAVRKRPGMYIGDTDDGTGLHHMVYEVVDNSIDEALAGYCKIITVEINKDGTISVSDDGRGIPVDFHKTEKKSAAEVIMTQLHAGGKFDHNSYKVSGGLHGVGVSVVNALSEKLELEIERDGKKYFVEFKNGNPKSPLKQIGKSKNTGTKITFLPSKEIFSSTKFSSSIIQKRMRELAFLNKGVNLVVLDKTLKAEKKVEFKYEGGIIEFVNFLNEKKD

SEQ ID NO: 184121 - protein, 314 aa, Unknown
  Bacterial polypetide isolated from the Sargasso Sea
CEDCREGLVAIISIKMSDPKFSSQTKDKLVSSEIKSLTETTLSSKLSEFLEENPKDAKLIVGKIQQAAIAREEARKAKDLIRRKDPLGIANLPGKLADCQEKDRELCELFIVEGDSAGGSAKQARDRKTQAILPLKGKILNSERSQDYKILSSSEVGSLISALGCGFNHESDDFNLDKLRYGKIIIMTDADVDGAHIRTLLLTLLARKLKPLFDDGRVFIAQPPLYKIKKGKTEKYISNDDELNKFLSNGFFDGKHIVFNDNQLTPKECSGILMNYSKINSIIKHTSKSKDNTILTCMSFIEPLSDILILVARS

SEQ ID NO: 184122 - protein, 150 aa, Unknown
  Bacterial polypetide isolated from the Sargasso Sea
LFNNAPFKKSARIVGDVMGKFHPHGDQAIYQSLVRMAQDYSSRLTLIEGQGNFGNIDGDNAAAMRYTEARLEEITELFFDGIEEDSTTFSDNYDGQNLEPDVLPSKLPNILLNGSTGIAVGMATNIPPHNLIEINDCLTKLILKPNSSES

SEQ ID NO: 184123 - protein, 259 aa, Unknown
  Bacterial polypetide isolated from the Sargasso Sea
MLNDLEKETVSFSPNYDGSEYIPDVLPTKIPNLLVNGSSGIAVGMATNIPPHNLNEVINGSISLIHNPKISIDELIKDISGPDFPTGGTIDGKAGIYEAYKTGRGIIHVRSNTSIEEDKSGKQSLIINEIPFMVNKARMLEKIAELVKDKKIEGITEIRDESDKDGLRVVIEIRKGDSADVIENNLFSQTQLEQSFGINFTVLVDGQPKEVNLKEMLHAFIKHRKEIITKRTKYDLKKAKERGHIVEGLMVAIANIDEV

SEQ ID NO: 184124 - protein, 122 aa, Unknown
  Bacterial polypetide isolated from the Sargasso Sea
MAENQEIRFEQEMRQSYLDYAMSVIVGRALPDVRDGLKPVHRRVLFSMHELNNGWNKSYKKSARIVGDVIGKYHPHGDSAVYDTIVRLAQPFSMRHPLVDGQGNFGSVDGDSPAAMRYTEVR

SEQ ID NO: 184125 - protein, 180 aa, Unknown
  Bacterial polypetide isolated from the Sargasso Sea
MPKTKKSTNTKKYDSSNIKVLKGLDAVRKRPGMYIGDTDDGTGLHHMVYEVVDNSVDEALAGYCSEISVIIHQDDSITVKDNGRGVPVDKHKEENKSAAEVIMTVLHAGGKFDDDSYKVSGGLHGVGVSVVNALSQTLSLRIHKNGNIYEQDYAHGVPKKPLKKGAKTDRTGTTISFQPQ

SEQ ID NO: 184126 - protein, 162 aa, Unknown
  Bacterial polypetide isolated from the Sargasso Sea
MIKKNNTYQADSIKVLKGLEAVRKRPGMYIGDTDDGTGLHHMVYEVVDNSIDEALAGYCKKIEVSINSDGSITVKDDGRGIPVDIHKGEKKSAAEVIMTQLHAGGKFDHNSYKVSGGLHGVGVSVVNALSQKLELNIERDGNKYFIEFKDGTAKAPLKLVGK

SEQ ID NO: 184127 - protein, 149 aa, Unknown
  Bacterial polypetide isolated from the Sargasso Sea
MAKKENKKKTGKDNNDYGAESIKVLKGLEAVRKRPGMYIGDTDDGTGLHHMVYEVVDNSVDEALAGHCKMISVILNADESVTVKDDGRGIPTEIHKEEGISAAEVIMTQLHAGGKFDQNSYKVSGGLHGVGVSVVNALSEKLDLSIKRD

SEQ ID NO: 184128 - protein, 296 aa, Unknown
  Bacterial polypetide isolated from the Sargasso Sea
AAEVIMTQLHAGGKFDHDSYKVSGGLHGVGVSVVNALSEKLDLTVFRDHKEYFVSFSNGKTKSPIKFTKKTKKSGTKINFLPSKDIFSSIKFSAATLQKKMRELAFLNKGLSINLIDETHAKTKTYENKYDGGISEFVTFLDQKKSILINKNEKAVFKKPLYLKGERSNVVVECSLEWNAGFSEEVLAFTNNIHQKDGGTHLLGFRSSLTRIINKYASEKNLTKKNKVTISGEDIKEGLTAILSIKMPDPKFSSQTKDKLVSSEIRNIVESIVGDKISVWFDQNPSVLRSVLDKVL

SEQ ID NO: 184129 - protein, 237 aa, Unknown
  Bacterial polypetide isolated from the Sargasso Sea
REFQAVLPLRGKILNTYVKNKSKVNGNGNDYATKALSKMMSSSEIVTLINALGTGSKDFDIEDLRYEKIVIMTDADVDGSHIRTLLLTFFNNYPFNQLIENGNLYLAQPPLFKVTKSGKGIYIKDEKELEKYIIENSNENIKKNKINSKEFKKIIDEERQKLSIQRFKGLGEMNPDELWETTLNPDNRILLKVQYSNGTKEKSKEDQKIIGILMGDEVAPRKEFITSNALDVANLDI

SEQ ID NO: 184130 - protein, 298 aa, Unknown
  Bacterial polypetide isolated from the Sargasso Sea
MFAMRQLRLEPDSGYKKCARVVGDVIGKYHPHGDVAVYDALVRLAQDFAVRYPLVEGQGNFGNVDGDNAAAMRYTESRLTDYAMAMLEGIDEDAVDFRENYDGSEEEPVLLPASVPNLLCNGAAGIAVGMATNIPPHNLDEVCAALLHLLKFPNATIAKLVEMVPGPDFPTGGVLAEGRDAVAEAYATGRGSFRVRAQWEVEKLSHGQYQIVVTEIPFQVQKGRIVEKMADLLNAKKLPLLGDIRDESAEDIRLILEPRNRSIEPEQLMEQIFRVTDLETRVGLNMNVLDSKVVPRVM

SEQ ID NO: 184131 - protein, 295 aa, Unknown
  Bacterial polypetide isolated from the Sargasso Sea
KKAMAKKATYSAKNIEVLEGLEPVRKRPGMYIGSTNEQGLHHLVNEVLDNSIDEVVAGHASEVSFHYKKDGSITIKDNGRGIPIDFHPKFKNKRALEIVLSTLHAGGKFDNNSYKTSGGLHGVGISVVNALSSFLEVNVHKNSKKYSQLYSKGKPKTKIKITKCKKNEKGTEIIFRPDDSIFETTQFSPRKLYDFIKMKAVLVSRTIIDFKIDKELISDNTPNYEKFYFKNGISDFLNIKNKNTAKLFDKQFSIIKNINDNEKCEIFISFNQNEKSSLISFCNTIETPDGGSHEN

SEQ ID NO: 184132 - protein, 284 aa, Unknown
  Bacterial polypetide isolated from the Sargasso Sea
NCFTNNIPQKDGGTHLAGLRSALTRVVNSYAQDTGLTKKENVQLVGEDIREGFTCVLSVKVADPKFSSQTKDKLVSSEVRPVVESLINDLLSNWFEEHPAEAKIIVGKVVEAAAAREAARKARDLTRRKGALDASSLPGKLADCQEKDPEKCEIFIVEGESAGGSAKQGRDRSTQAILPLKGKIINCEKARLSKVLSSNEIATLITALGGGVGNSTNELDDNNEDDESFKTDKLRYKKVIIMTDADVDGAHIKTLLLTFFYRQMKSLITDGCLYIAQPPLYKAK

SEQ ID NO: 184133 - protein, 119 aa, Unknown
  Bacterial polypetide isolated from the Sargasso Sea
MSDNESYNSDSIKVLKGLEAVKKRPGMYIGDTEDGTGLHHMVHELVDNSIDEALAGYCDEIKVIIHKEEAVTVKDNGRGIPVDLHPEEKVSAAEVIMTTLHAGGKLMITVTKYQAAFTG

SEQ ID NO: 184134 - protein, 211 aa, Unknown
  Bacterial polypetide isolated from the Sargasso Sea
MPKKQNKKGSYDSSNIQVLKGLEAVKKRPGMYIGDTDDGSGLHHMVFEVVDNCIDEAMAGHCSEIVVSINKNGSITVKDNGRGIPVDTHKKEKVPAAELIMTTLHSGGKFDDNSYKVSGGLHGVGVSVVNALSEELTLKICRDGGLYEQKYANGKAQTKLKKVKTSKETGTEITFKPSKEIFSFINFDIDKINKRVQELSFLNAGVNILVE

SEQ ID NO: 184135 - protein, 299 aa, Unknown
  Bacterial polypetide isolated from the Sargasso Sea
VGVSVVNALSENLTVEIHRDGKEFFQSYKNGEPESLLKERGNSSKKGTKIKFLPSTNIFSLTEFDFSTIEHRMRELAFLNSGVKIVLNDLRGVDAKEVSMHYDGGVAAFVDHLDRNKQKLHPTIIIHGEKEGVGVELALQWNDSYHENVLCFTNNIPQRDGGTHLAGFRSGLTRTINNFSKSTNKNQKLSLSGDDAREGLTCVLSVKVPDPKFSSQTKDKLVSSEVRPIVESLVNDKLIQWFEEHPSDVKVVINKIIEAALAREAARKARELTRRKGALDISNLPGKLADCQEKDATKS

SEQ ID NO: 184136 - protein, 298 aa, Unknown
  Bacterial polypetide isolated from the Sargasso Sea
VCFYPDSSIFKTIAFEYDIIAERLRELAYLNSGLEIVLQDQRTEDGDVDSFKFKGGLSDFVKYLDENNNPLHNKVITVQNDSGEVPVDVALRYSHSYNDNILTFVNNINTIEGGTHLSGFRSALTRAMNNHASKNNLIKAKKNEKISLTGEDFREGLTAIISVKVAEPQFEGQTKTKLGNGDIKGVVDKIVYEGILDFLEQNPSIGRKVIEKALLAARSRSAAKKARELIRRKSALGGSSLPGKLADCSNRDPNFCELYLVEGDSAGGSAKQGRDRKIQAILPLRGKVINSEKARIDK

SEQ ID NO: 184137 - protein, 221 aa, Unknown
  Bacterial polypetide isolated from the Sargasso Sea
RLRELAFLNTGVKIVLKDNRSTQKKEIIFKYEGGIIEYVNYLNKGKNCINNTPIYFLGIKNNVNVECALQWTDAYHENTLCFTNNIAQRDGGTHLAGFRGALTRSIVNYINQKIKNSTNISGDDAREGLTCVISVKLPDPKFSSQTKDKLVSSEVRPVVESVSLDKIEQWIEENPNEIKKVVEKVVEASDAREAARKARELTRRKTGLENSSLPGKLADCQ

SEQ ID NO: 184138 - protein, 329 aa, Unknown
  Bacterial polypetide isolated from the Sargasso Sea
FKWNAGYSEDIYPYTNNIYQKDGGTHLIGFRNALTRVINKYASEQNLLKKNKISISGDDIKEGLTCVLSIKTPDPKFSSQTKDKLVSSEVRNIVETIVNEKLSVWFDQNPSISKIVLAKVVQAALARDVARKARENVRRKGALELTGLPGKLADCQNSKQEGTELFIVEGDSAGGSAKQGRNREYQAVLPLRGKILNTYTSINGAKKNVNGNKNEIRTKTLAKLISSNEIITLINALGLDPKNEDLDIKDLRYGKIIIMTDADVDGSHIRALLLTFFNNKPFNKLIENGNIYLAQPPLFKINKGSKGIYIKDEKELEKYILDNSKELKK

SEQ ID NO: 184139 - protein, 270 aa, Unknown
  Bacterial polypetide isolated from the Sargasso Sea
MRELAFLNKGIKIIFIDSSQKKEKIYEFKFDGGTLEFVDFLDEKREKLKNKNGNELFKKPIYIEGKKNNIEIECSLKWNASYGEDIFPYTNNIYQKDGGTHLLGFRSALTRVINKYASEHNLLKKNKLAISGDDIKEGLTCVLSTKIPDPKFSSQTKDKLVSSEVRMIVETVINEKLSIWFDQNPSIAKIILAKIIQAAMARDVARKARENVRRKGALELSGLPGKLADCQIGKQEGTELFIVEGDSAGGSAKQGRNRANQAVLLLRGKI

SEQ ID NO: 184140 - protein, 281 aa, Unknown
  Bacterial polypetide isolated from the Sargasso Sea
GIIEYVKELTKKKTPIQEKIINISSSKKNISVDLALMWSNNYQEEVLCFTNNIPQKDGGTHLSGFKTSLTRTLNSIILKNNPKDKIDITGEDTREGITAIISVKMPDPKFSSQTKDKLVSSEVKGIVETLVSSKLKEYLDENPKDLKSITAKIYQAAKAREEARKAKELIRRKDPLSIGNLPGKLADCQEKDPTKCELFIVEGDSAGGSAKQARDRKTQAILPLKGKILNTERAQDHKVLSSSEISTLITALGCGVGDDCSLDENSKMIKNLRYGKIVIMT

SEQ ID NO: 184141 - protein, 277 aa, Unknown
  Bacterial polypetide isolated from the Sargasso Sea
PSVLPASFPQLLVNGSSGIAVGMATNIPPHNLAEIVDAAIHIIDEPECSIDDLLQIVKGPDFPTRGIIQGRNGIISAYKTGRGIIRVRGRAEIETMEKGDRERIVINEIPFQVNKARLVEKIAELVRDKKLEGISDLRDESDREGVRVVVELKKGTVGQVVLNTLYKNTQLQDTFGVILLALVNQQPKVLNLKEYLRYFVLFRKEVITLRTEYDLKKAREKEHVLEGLNIALDNLDAVVKLIRNSEDPVSAREDLMSTFALSEVQAKAILEMRLQRL

SEQ ID NO: 184142 - protein, 173 aa, Unknown
  Bacterial polypetide isolated from the Sargasso Sea
MNKNNNYQADSIKVLKGLEAVRKRPGMYIGDTDDGTGLHHMVYEVVDNSIDEALAGHCKKIEVSINSDGSVTVEDDGRGIPVDIHKEEKKSAAEVIMTQLHAGGKFDHDSYKVSGGLHGVGVSVVNALSKKLELYIERDGKKHFVEFINGEAKTPLKIIGNSKNTGTKINFLP

SEQ ID NO: 184143 - protein, 198 aa, Unknown
  Bacterial polypetide isolated from the Sargasso Sea
MKKDQSTEIKESKVSSISMYDEMSSSYLSYAMSVIISRALPDIRDGLKPVHRRIIYAMHKGGFDWAKQFRKSARIVGDVMGKYHPHGDQAIYDALVRMAQDFSMSLPLIEGQGNFGSIDGDPPAAMRYTETRLSKVSQHLVDDINKETVEFKSNYDETDKEPEILPAQYPNLLVNGAGGIAVGMATSIPPHNLGEIID

SEQ ID NO: 184144 - protein, 309 aa, Unknown
  Bacterial polypetide isolated from the Sargasso Sea
QYEGGIIEYVNYLNKGKNCINNTPIYFLGTKNNVNVECALQWTDAYHENTLCFTNNIAQRDGGTHLAGFRGALTRCIVNYINKKIKNSVNISGDDAREGLTCVISVKLPDPKFSSQTKDKLVSSEVRPVVESVSLDKIEQWIEENPNEIKNVADKVVEASNAREAARKARELTRRKTGLENSSLPGKLADCQEKNPEFSELFIVEGDSAGGSAKQGRDRKNQAILPLRGKILNVERASPKQILTSNEIGVLITAIGAGVGNPTGNEEQDKSEGKFNIEKMRYHKVIIMTDADVDGSHIRTLLLTFFYRH

SEQ ID NO: 184145 - protein, 181 aa, Unknown
  Bacterial polypetide isolated from the Sargasso Sea
MESSFLDYAMSVIVSRALPDVCDGLKPVHRRIIYAMNEAGYTAGKPSRKSARIVGDVMGKYHPHGDSAIYDAMVRLAQDFSMRVPLIDGQGNFGSMDGDSAAAMRYTEAKLSPIASYLVNDIDNETVNFKENYDGTAFEPELLPAEFPNLLINGSEGIAVGMATKIPPPLSQVKLLMLAVK

SEQ ID NO: 184146 - protein, 334 aa, Unknown
  Bacterial polypetide isolated from the Sargasso Sea
VQVTVRRQGQVHQQRFERGAAIGSLASEPQPAEEAGQTGTTVCFKPDTEIFTGGIVFDYATLSARLRELAYLNGGVRIVFRDERDSARNAAGEAHEDIYFYEGGIKEYVAYMNKEKDALHPDIIYVNSEKDGVQVEAALQWCSDAYSDSILGFANNIRTVDGGTHIEGLKTVLTRTLNAFAKKLGKRKESDSNLAGENIREGLTAVLSVKVPDPEFEGQTKTKLGNTEVRGIVDNLVGEGLSQFLEFNPSVIGLILEKAIQAFNAAEAARRARELVRRKSVLESSTLPGKLADCSSRDPGESEIYIVEGDSAGGSAKQGRDRRFQAIFPCAEKS

SEQ ID NO: 184147 - protein, 296 aa, Unknown
  Bacterial polypetide isolated from the Sargasso Sea
FNIEKLRYHKVIIMTDADVDGSHIRTLLLTFFYRKMKELIDKGYLYIAQPPLYKAKQGSSEVYLKDDEALEDYLITAGIKDCVLTLGNGEEIGGIDLTSLVNSARQISLQLKGLTTRVPLDIVEQAAILGALDSDVLAQHDQADQAAKYIAKRLDALETPSDRGWKGEASPDGGLSFVRNIRGVPDGPHIIDGSVIRSTEAHTISKNADALQESYSRHSVLRQKEIEFSITGPVSLVDSIMELGRKGVSMQRYKGLGEMNPDQLWETTLDPNARTLLQVREKHAEKAEDIFSTPYG

SEQ ID NO: 184148 - protein, 185 aa, Unknown
  Bacterial polypetide isolated from the Sargasso Sea
MNKSDYSSDSIKVLKGLEAVKKRPGMYIGDTDDGSGLHQMIYEVVDNSIDEALAGFCDEIKVILNPDGTLTVSDNGRGIPVDMHKSEGVSAAELIMTELHAGGKFDQNSYKVSGGLHGVGVSVVNALSEYLNLEINRDGDLYQMEFSNGKVIKSLSKISNSEKINNKSITGTNITFLPSKEIFNN

SEQ ID NO: 184149 - protein, 181 aa, Unknown
  Bacterial polypetide isolated from the Sargasso Sea
MEKNTVENNKSFKPIFVQDEMSSSYLSYAMSVIVSRALPDVRDGLKPVHRRIIYAMYKGGYDWSKPFRKSARIVGDVIGKYHPHGDQSVYDALVRLVQDFSMSVPLISGQGNFGSIDGDPPAAMRYTETKLGKIAQFLTEDLEKNTVSYRSNYDETEKEPEVLPSQYPNILVNGAGGIAVG

SEQ ID NO: 184150 - protein, 265 aa, Unknown
  Bacterial polypetide isolated from the Sargasso Sea
DRNPDENGFKKGTRVTFHASDSTFKNVTVFDFDKLEHRYRELAFLNSGVRILLRDNRGEEVLEHDLFYEGGIAAFVSYLDRNKEPLIAAPISVSAEKDGIGIDVALEWNDSYYENVLTFTNNIPQRDGGTHLAAFRAALTRTLNNYAASSGLLKKEKVSLSGEDMREGLTAIVSVKLPDPKFGSQTKDKLVSSEVRQPLESLMGEKMSEWLEENPGEAKIIIQKIIDAAAAREAAKRAREMSRKGAMSVASLPGKLSDCRERDAT

SEQ ID NO: 184151 - protein, 155 aa, Unknown
  Bacterial polypetide isolated from the Sargasso Sea
MNQNYSSESIKVLKGLEAVRKRPGMYIGDTDDGSGLHQMIYEVVDNSIDESLAGYCDKIEVLLNSDGTVTISDNGRGIPVDNHKEEGIPAAQLIMTELHAGGKFDQNSYKVSGGLHGVGVSVVNALSEKLLLEINRDGSIYNMQFANGVVLDKLK

SEQ ID NO: 184152 - protein, 294 aa, Unknown
  Bacterial polypetide isolated from the Sargasso Sea
PVHRRILYSMDELNMRPGSSYKKSARLVGEVLGKYHPHGDTSVYDAMVRLAQDFSMRYPLVDGQGNFGSIDDDPPAAMRYTEAKLASIAMEMLGDIDRGTVDFAPNFDDSLSEPVVLPSRIPNLIVNGSTGIAVGMTTNIPPHNLSEICDGIVHLIKNPRADVEELMEYVKGPDFPTGALIMGTTGIREAFETGRGRVVIRSNIEIEELGRNGRYQFVITDIPFMTNKANLVQKIATLSKEKKIEGISEIRDESDRKGMRIVIELRRDAQAQVVKNILYKQTALQTSLHYNMWR

SEQ ID NO: 184153 - protein, 235 aa, Unknown
  Bacterial polypetide isolated from the Sargasso Sea
DSSKIKVLKGLEAVRKRPGMYIGDTEDGTGLHHMVFEVVDNSIDEALAGYCDLIKVVIHANESISVSDNGRGIPVGIHEEEGRSAAEVIMTTLHAGGKFDDNSYKVSGGLHGVGVSVVNALSEDLELIISREGHIHSQNYKNGDPVSPLSKKEKTGKTGTEVRFLPSVDVFKRVEYDYDILAKRLQELSFLNSGVCIELTDERDGKTDRFEYQGGIKAFVEHLNRNTTPIHNTPV

SEQ ID NO: 184154 - protein, 287 aa, Unknown
  Bacterial polypetide isolated from the Sargasso Sea
GPTGLHHLVYEVVDNAVDEAMAGHCTQIEIEILSDGGCEVRDNGRGIPVGNHHQYEDLTAAEVVLTVLHAGGKFGGEGYKVSGGLHGVGVSVVNALSSQVEVEIDRDGKRHFMSFKDGGTPDQKLCIIGDAPNQRTGTTVRFWPDKEIFKEGIEFRAATLIERFQMMAFLNKGLEIKFLDSRRDTGVKEKTFCYDGGIMDFVQHVNASKEALFQDVGYFEEEDEEQEVEIAFQWNTGFNTDGIHSFANGIATSEGGMHEQGFRTALTRVINQYARDKNHLREKDDSL

SEQ ID NO: 184155 - protein, 313 aa, Unknown
  Bacterial polypetide isolated from the Sargasso Sea
NSGVKINLSDLRGVEAKEVSMRYDGGVAAFVEHLDRNKQKLHPTIIISGEKEGVQVELALQWNDSYHENVLCFTNNIPQRDGGTHLAGFRSGLTRTINNFSKNANKNQKISLSGDDAREGLTCVLSVKVPDPKFSSQTKDKLVSSEVRTIVESLVNDKLNQWFEEHPSDVKIVINKIVEAALAREAARKARELTRRKGALDISNLPGKLADCQEKDASKSELFLVEGDSAGGSAKQARDRKFQAVLPLKGKILNVERAGENKVIGSTEIGTLITALGSGFKDDFDLSKIRYHKIVIMTDADVDGSHIRTLLLT

SEQ ID NO: 184156 - protein, 276 aa, Unknown
  Bacterial polypetide isolated from the Sargasso Sea
MSEQVADNLTGEGYGADSIKVLRGLDAVRKRPGMYIGDTDDGTGLHHMVFEVVDNAIDEAMGGHCDQIDVALNGDGSVTVADNGRGIPVDIHAEEGVSAAEVIMTQLHAGGKFDQNTYKVSGGLHGVGVSVVNALSSELKLTIKRDGRVHCMSFRDGEAAAPLEVTGDSSGETGTEVTFTPSSKTFTRTEFDYSILEHRLRELAFLNPGIRIVLTDSRKPDTPSETFHYEGGLTEFAKYLDRSKTPVFEPPISIKGDKDEVVVEIAMQWNDSFHET

SEQ ID NO: 184157 - protein, 258 aa, Unknown
  Bacterial polypetide isolated from the Sargasso Sea
NKNGNDLFRKPIYIEGKKNNIELECSLKWNAGYAEDIFPYTNNIYQKDGGTHLLGFRSALTRVINKYANENNLLKKNKLAISGDDIKEGLTCVLSTKIPDPKFSSQTKDKLVSSEVRMIVETLVNEKLSIWFDQNPSIAKIVLAKVIQAAMARDVARKARENVRRKGALELSGLPGKLADCQIGKQEGTELFIVEGDSAGGSAKQGRNRANQAVLPLRGKILNTYVEDLNLKKNINGNGSGNGSDQRTKALSKMISSN

SEQ ID NO: 184158 - protein, 137 aa, Unknown
  Bacterial polypetide isolated from the Sargasso Sea
MSSQNNLKYQADSIKVLKGLEAVRKRPGMYIGDTDDGTGLHHMVYEVVDNSIDEALAGFCKNIEVSINSDESVTIKDDGRGIPVDIHKSEKKSAAEVIMTQLHAGGKFDHDSYKVSGGLHGVGVSVVNALSEKLKLN

SEQ ID NO: 184159 - protein, 303 aa, Unknown
  Bacterial polypetide isolated from the Sargasso Sea
TNNIHQKDGGTHLLGFRSALTRVINKYANENNLLKKNKLAISGDDIKEGLTCVLSTKIPDPKFSSQTKDKLVSSEVRMIVETLINEKLSIWFDQNPSIAKIILAKVIQAAMARDVARKARENVRRKGALELSGLPGKLADCQIGKQEGTELFIVEGDSAGGSAKQGRNRSNQAVLPLRGKILNTYVEDFNVKKNQNGNGNGSDQRTKALSKMISSNEIVTLINALGLDPKAQEIDLKDLRYGKIIIMTDADVDGSHIRALLLTFFNNKPFSKLIENGHIYLAQPPLFKLNKVQKVFTSKMKRN

SEQ ID NO: 184160 - protein, 299 aa, Unknown
  Bacterial polypetide isolated from the Sargasso Sea
GIGPNEFNSDKLRYHKVIIMTDADVDGSHIRTLLLTFFFKEMRGLIENGNLYIARPPLFKIKRGKEELYISDEENLQKSLIKYGVDDAIFKTALGNQLKEEDLINTLVKITEVIDIYSKVPGRYDKKVLEQIAISGCLDVNKFLGSKEKTKDAINYISKRINISRPDYDRGWKGEYSIDKGFVFRRELRGLEDSIVIDNNLLESQLIKNLNSNYSELFQMFEMPSELILKNETLKVYSPSQLFNTIQNLGKKGLSMQRYKGLGEMNPDQLWETTLDPKNRSLIQVKIDDEESTKGVLKI

SEQ ID NO: 184161 - protein, 230 aa, Unknown
  Bacterial polypetide isolated from the Sargasso Sea
MENNSDNSSKENITSISISDEMKKSYLDYAMSVIVSRALPDVRDGLKPVHRRILYAMYKGGYDWSKPYRKSARIVGDVMGNYHPHGDSAIYDSMVRMAQDFSMRVELVDGQGNFGSVDGDPPAAMRYTESRLSRSAELLLRDIDKETISFVPNYDESQLEPSVLPAEYPNILVNGAGGIAVGMATNIPPHNPVEVINACKELIYNAELSIEDLIEQVKGPDFPTSGFILG

SEQ ID NO: 184162 - protein, 197 aa, Unknown
  Bacterial polypetide isolated from the Sargasso Sea
MSDSTARDASNYDSSHIKVLKGLDAVRKRPGMYIGDTDDGTGLHHLVFEVVDNSIDEALAGYCSHIEVTIHANNAITVSDNGRGIPVDIHPEEQRSAAEVIMTVLHAGGKFDDNAYKVSGGLHGVGVSVVNALSSELTLTIHKNEKRYRQTYQYGTPEAPLATVGDSERSGTTIHFLPCPNIFAITEFSYETLASRL

SEQ ID NO: 184163 - protein, 265 aa, Unknown
  Bacterial polypetide isolated from the Sargasso Sea
ADCQISKQEGTELFIVEGDSAGGSAKQGRNRENQAVLPLRGKILNTYVDSNGSKKNGNANDIKTKTLSKMISSNEIVTLINALGLDPKVEEIDLKDLRYGKIIIMTDADVDGSHIRALLLTFFNNQPFNKLIENGFVYLAQPPLFKINKGSKGIYIKDEKELFQYILKNSKELKKFKKGSKEFERIYSEQKSMLSIQRFKGLGEMNPEELWNTTLNPETRSLLQVRYSKDLKKDQDIIHTLMGNDVSSRKDFIVSNAINVSNLDI

SEQ ID NO: 184164 - protein, 301 aa, Unknown
  Bacterial polypetide isolated from the Sargasso Sea
KVPDPKFSSQTKEKLVSSEVESIVSSVLNKGLNEFLLENPKEAHVILSKVSEAALAREAARKAREMTRRKGVLELAGLPGKLADCQEKDPALSEIYLVEGDSAGGSAKQGRNRKYQAILPLKGKILNVQKARIDKVLSSAEIGTLVKAMGCGIGSEDFDIDKLRYHRIIIMTDADVDGSHIRTLLLTFFYQQYYDILEKGHVYIAMPPLYKITKGKSFVYASDEDEKDKAIKDFSKSGSRGIDVQRYKGLGEMNPDQLWETTMDPENRRMMRVDIKDAQDASDMFETLMGDDVEPRREFMK

SEQ ID NO: 184165 - protein, 205 aa, Unknown
  Bacterial polypetide isolated from the Sargasso Sea
MENGTTLEESLKEAISSRYLTYAVSTIVNRALPDGRDGLKPVHRRILYAMFKLSLLSNSPYRKCAKIVGEVMGNYHPHGDKAIYDALVRLAQDFSVRYTLIDGQGNFGNIDGDNPAAQRYTEARLDKVGEFLLEGIGEDSVDFRDNYDGSEKEPEVMPASFPNLLANGASGIAVGMATNIPPHNISELSDAMLKLIKSPNISDEK

SEQ ID NO: 184166 - protein, 76 aa, Unknown
  Bacterial polypetide isolated from the Sargasso Sea
MTNNNTNSYQADSIKVLKGLEAVRKRPGMYIGDTDDGTGLHHMVYEVVDNSIDEALAGHCKKIEVSINSDGSITVQ

SEQ ID NO: 184167 - protein, 301 aa, Unknown
  Bacterial polypetide isolated from the Sargasso Sea
KKEKISEFKFDGGVLEFVDFLDEKREKLQNKNGNDLFRKPIYIEGKKNNIELECSLKWNAGYSEDIFPYTNNIYQKDGGTHLLGFRSALTRVVNKYANENNLLKKNKLAISGDDIKEGLTCVLSTKIPDPKFSSQTKDKLVSSEVRMIVETLVNEKLSIWFDQNPSIAKIILAKVIQAAMARDVARKARENVRRKGALELSGLPGKLADCQIGKQEGTELFIVEGDSAGGSAKQGRNRANQAVLPLRGKILNTYVEDFNVKKNGNGNGSDQRTKALSKMISSNEIVTLINALSLDPKAQEI

SEQ ID NO: 184168 - protein, 286 aa, Unknown
  Bacterial polypetide isolated from the Sargasso Sea
TKRTTVNSVFHFVKEASDGITIEVSLQWNDGYQENIQCYTNNIKQRDGGTHLVGFRTALTRTLNNYMEKEGMNKEKVSTSGDDAREGLVAVVSVKVPDPKFSSQTKDKLVSSEVRPAVEQETYKALTEYLLENPAEAKLIATKIIEAARAREAARKARELTRRKGVFEGGGLPGKLSDCQEKDPAKSEIYLVEGESAGGSAKQGRDRHFQAILPLKGKILNVEKARLDKVLSSEEIIILISALGCGIKGEDWQEEKLRYHRIIIMTDADVDGSHIRTLILTLFYRQ

SEQ ID NO: 184169 - protein, 169 aa, Unknown
  Bacterial polypetide isolated from the Sargasso Sea
MSKNSALNSNPSYGADSIKVLKGLDAVRKRPGMYIGDTDDGSGLHHMVFEVIDNAIDEALAGHCKNITVIINNNNTITVEDDGRGIPVDMHKSEKISAAEVIMTQLHAGGKFDHDSYKVSGGLHGVGVSVVNALSERLELNIYRDGKEYSVIFKNGNTLKPLKQIGKTK

SEQ ID NO: 184170 - protein, 207 aa, Unknown
  Bacterial polypetide isolated from the Sargasso Sea
MKNNNYQADSIKVLKGLEAVRKRPGMYIGDTDDGTGLHHMVYEVVDNSIDEALAGYCKNISVKINREGTVTVKDDGRGIPIDTHKGEKKSAAEVIMTQLHAGGKFDHDSYKVSGGLHGVGVSVVNALSEKLQLEINRDGKKFFIEFNNGDAKSPIKVIGKSKETGTQITFLPSKKVFSSIKFSGNILIKRMRKLAFLNRGIKITFVD

SEQ ID NO: 184171 - protein, 267 aa, Unknown
  Bacterial polypetide isolated from the Sargasso Sea
VLSTKIPDPKFSSQTKDKLVSSEVRMIVETVINEKLSTWFDQNPTVTKIILAKIIQAAMARDVARKARENVRRKGALELSGLPGKLADCQIGKQEGTELFIVEGDSAGGSAKQGRNRSNQAVLPLRGKILNTYVEDLTVKKNGNGNGSDKRTKALSKMISSNEIVTLINALGLDPKAEEIDLKDLRYGKIIIMTDADVDGSHIRALLLTFFNNEPFNKLIENGHIYLAQPPLFKINKGTKGIYIKDEKELEDYIINNNKEIKKIKKG

SEQ ID NO: 184172 - protein, 207 aa, Unknown
  Bacterial polypetide isolated from the Sargasso Sea
MKNNNSYKADSIKVLKGLEAVRKRPGMYIGDTDDGTGLHHMVYEVVDNSIDEALAGHCDRIEISINSDGSITVKDNGRGIPVDLHKGEKKSAAEVIMTQLHAGGKFDHDSYKVSGGLHGVGVSVVNALSEKLKLEINRDGKKYFIEFKDGKAKAALKVIGKSKISGTEINFVPSKEIFSSTKFSSSIIQKKMRELAFLNKSIKIIVN

SEQ ID NO: 184173 - protein, 224 aa, Unknown
  Bacterial polypetide isolated from the Sargasso Sea
MSSSYLSYAMSVIVSRALPDIRDGLKPVHRRILFAMYKGGYDWSKQFRKSARIVGDVIGKYHPHGDQSVYDALVRMVQDFSMSLPLIEGQGNFGSIDGDPAAAMRYTETRLSKVSQFLIDDIEKNTIEFKSNYDETEKEPSVLPAQYPNLLVNGAGGIAVGMATSIPPHNLGEIIDGTLALINNKDITVKQLMKHIPGPDFPTGGVIIGKDIIKQGYYKRTRLI

SEQ ID NO: 184174 - protein, 306 aa, Unknown
  Bacterial polypetide isolated from the Sargasso Sea
GHKNNIEFSCSLWWNDSYYEQILTFTNNIRQKDGGTHLSGFRAALTRVVNNYLDSSKVSKKQSISPNSDDIREGLTSVLSVKVQDPKFSSQTKDKLVSSEVRPVVENLVNEKLSDWFERHPNIAKEIFLKIQKAAEAREAARKARELTRRKSALEITNLPGKLADCQEKDPLLSEIFIVEGDSAGGSAKQGRDRKFQAILPLRGKILNTWKSRTDKILGSQEIGTLITALGTGIGPNEFNSDKLRYHKVIIMTDADVDGSHIRTLLLTFFFKEMRGLIENGNLYIARPPLFKIKRGKEEIYISDEE

SEQ ID NO: 184175 - protein, 241 aa, Unknown
  Bacterial polypetide isolated from the Sargasso Sea
YDALVRMVQDFSMSLPLIQGQGNFGSIDGDPAAAMRYTETRLSKVSQYLIDDIEKNTISFKSNYDETEKEPSVLPAQFPNLLVNGAGGIAVGMATSIPPHNLGEIIDGTLALIDNKDIKIRELMKHIPGPDFPTGGVIIGKDIIKQGYNNGRGSFKIRGEISIEQQKNGRERLVITSIPYQVNKSVLNERIAQLVREKKIEGIRDIRDESNREGIRVAIDLRNGVEPETIKRQLYKNTQIE

SEQ ID NO: 184176 - protein, 298 aa, Unknown
  Bacterial polypetide isolated from the Sargasso Sea
SKYKYQWIYFDYTDTLISIFINSPSFEGQTKKRITMPKLQKQLEELLQNQILLWLNSNKRESLKVIEILIERSLLRTDLSKIKKLDRKSIKEKNRLPGKLVDCTSNTIKNTELFIVEGDSAGGSAKQARFRSTQAILPLKGKILNVYSVSLSKIADNNEIQNLVHSLGCGLGKNFQLSKLRYEKIILMTDADVDGSHIATLLITFFYKYMRKIIEEGKLYLAMPPLYKISYNQENFFAYNEKDKDKILNDNKGAPQLTRFKGLGEMPATQLKDTTMDPEKRSLIQLKLADGIKYIKHN

SEQ ID NO: 184177 - protein, 296 aa, Unknown
  Bacterial polypetide isolated from the Sargasso Sea
YDGGVLEFVEFLDEKREKLLNKNGNNLFKKPIIIEGKKENVTIECSLKWNGTYTEDIYPYTNNIYQKDGGTHLLGFRSALTRVINKYANEHNLLKKNKFTISGDDIKEGLTCVISTKIPDPKFSSQTKDKLVSSEVRMIVETIINEKLSIWFDQNPSVAKIILAKIIQAALARDVARKARENVRRKGAIELSGLPGKLADCQIGKQEGTELFIVEGDSAGGSAKQGRNRENQAVLPLRGKILNTYVEDLNIKKNGNNNGTEQRTKALSKMISSNEILTLINALGLDPKSQEIDLKD

SEQ ID NO: 184178 - protein, 83 aa, Unknown
  Bacterial polypetide isolated from the Sargasso Sea
MSENYDSSSIKVLKGLDAVRKRPGMYIGDTDDGTGLHHMVFEVVDNSIDEALAGHCDDIFVTIHLDGSVSVRDNGRGIPVVYP

SEQ ID NO: 184179 - protein, 103 aa, Unknown
  Bacterial polypetide isolated from the Sargasso Sea
MSKPNNNYQADSIKVLKGLEAVRKRPGMYIGDTDDGTGLHHMVYEVVDNSIDEALAGYCKNISVRINSNGTITVNDDGRGIPVDIHKGEKKSAAEVIMTQLHA

SEQ ID NO: 184180 - protein, 290 aa, Unknown
  Bacterial polypetide isolated from the Sargasso Sea
TKKNEKFSLSGDDFREGLTVVISVKVQEPQFEGQTKTKLGNGEVKGLVDNVVYDGIQAFLEQNPKVGKRIIEKAAEAARARIAAKKARELVRKKSGLGSTTLPGKLADCSNKDPMQCELFLVEGDSAGGTAKQGRDRRTQAILPLRGKVINSEKAREDKLLANNEIQSMITALGCGFGEDKDDPNSFNPEKLRYHKIVIMTDADVDGSHIRTLLLTFFWRKMKSLVQGGYLYMAMPPLYKLKQGKKERYAYTDEERDNILRRLESENKTKIDIQRYKGLGEMNAEQLWKQ

SEQ ID NO: 184181 - protein, 287 aa, Unknown
  Bacterial polypetide isolated from the Sargasso Sea
MRELAFLNKGIKISFVDLSQKKEKIIEFRYDGGVSEFVEYLDEKREKLQNKNGKDIFKRPIYIEGKSHNIEIECSLKWNSSYSEEVYPYTNNIYQKDGGTHLLGFRSALTRVVNKYAHEHNLLKKNKLTISGDDIKEGLTCVLSTKIPDPKFSSQTKDKLVSSEVRMIVETLLNEKLSIWFDQNPSIAKVVLAKIIQAALARDVARKARESVRRKGALELSGLPGKLADCQIGKQEGTELFIVEGDSAGGSAKQGRNRTNQAVLPLRGKILNTYVEEFKNKKNGNGN

SEQ ID NO: 184182 - protein, 228 aa, Unknown
  Bacterial polypetide isolated from the Sargasso Sea
MSSSYLSYAMSVIVSRALPDIRDGLKPVHRRILFAMHKGGYDWSKQFRKSARIVGDVIGKYHPHGDQSVYDALVRMVQDFSMSLPLIDGQGNFGSVDGDPAAAMRYTETKLSKVSQFLIDDIDKNTVDFKSNYDETEKEPCVLPAQFPNLLVNGAGGIAVGMATSIPPHNLGEVINASLALIQNNDIKLSELMKHIPGPDFPTGGIIIGKNIIKEGYKTGRGSFKISR

SEQ ID NO: 184183 - protein, 284 aa, Unknown
  Bacterial polypetide isolated from the Sargasso Sea
NSKISSNITGDDAREGLTCIISVKLPDPKFSSQTKDKLVSSEVRPVVESVSLDKLEQWMEENPSEIKKIIDKIVEASNAREAARKARELTRRKTGLENSALPGKLADCQEKNPELSELFIVEGDSAGGSAKQGRDRKNQAILPLRGKILNVERANQKQILTSNEIGVLITAIGAGVGNPSGNEEFDKAEGKFDLNKMRYHKIIVMTDADVDGSHIRTLLLTFFYRHMRPLIESGRLFIAQPPLFRSKKGNSIQYIKDENQMEQHLINEGSKKLIYEVPKSKNET

SEQ ID NO: 184184 - protein, 297 aa, Unknown
  Bacterial polypetide isolated from the Sargasso Sea
LYAMHKGGFDWSKQFRKSARIVGDVIGKYHPHGDQAVYDALVRMVQEFSMSLPLIDGQGNFGSIDGDPPAAMRYTETKLAKVSQFLIDDIEKNTVEFKSNYDETEIEPTVLPAQYPNLLVNGAGGIAVGMATSIPPHNLGEIIDGTLALINNKDIKIKELMKHIPGPDFPTGGIIIGKNIIKEGYKSGRGSFKIRGEIAVENLKNNRDRLVITSIPYQVNKSVLNERIADLVRDKKIEGIRDIRDESNREGIRVAIDLRTGVEPETVKRQLFKYTSIESSFGFNTLAIVNNKPKTCN

SEQ ID NO: 184185 - protein, 286 aa, Unknown
  Bacterial polypetide isolated from the Sargasso Sea
YTETKLGKIAQFLTEDLEKQTVNYRNNYDETEKEPTVLPSQFPNLLVNGAGGIAVGMATSIPPHNLGEIIDATIALIENREITISQLMKHVPGPDFPTGGVIIGKDIIKQGYNKGRGSFKIRGEIEFEEKKGGRSVLIIKSIPFQVNKSTLIERIAQLAKDKKIEGISDIRDESNREGIRVVLELRRNTEPETVRRQLYKLTSIESSFGFNTLALVDNKPKILNLKEFISEFLKFREETVIKRIKFDLKKAEKRAHILIGLATAVENIDEVIKIIKKSKDIVIAKK

SEQ ID NO: 184186 - protein, 134 aa, Unknown
  Bacterial polypetide isolated from the Sargasso Sea
MDKKKLTSISLQEEMKRSYLEYAMSVIVGRALPDARDGLKPVQRRILFAMYELGLTPDRPFRKCARVVGDVLGKYHPHGDQAVYDALVRLVQNFSTKYPTLDGHGNFGSVDNDPPAAMRYTETRLAPIANKGIS

SEQ ID NO: 184187 - protein, 294 aa, Unknown
  Bacterial polypetide isolated from the Sargasso Sea
DEALAGHCKKMKVTLNSNGSVTVKDDGRGIPVDIHKTEKKSAAEVIMTQLHAGGKFDHDSYKVSGGLHGVGVSVVNALSEKLELTIERDGKVYFIAFKNGEAISPLKAKNKSKNSGTEITFFPSKEIFSTTKFSFTIVQKRLRELAFLNKGIKINLIDKINKKVRSEEFQYDGGISEFVEFLDEKRQKLKNKNGNDLFKKPIIVNSKKNSLELECSLKWNSTYSEDVYAYTNNIYQKDGGTHLLGFRSALTRVINKYANEHNLLKKNKVSISGDDIKEGLTCVLSIKIPDPKFL

SEQ ID NO: 184188 - protein, 215 aa, Unknown
  Bacterial polypetide isolated from the Sargasso Sea
MANNKTYQADSIKVLKGLEAVRKRPGMYIGDTDDGTGLHHMVYEVIDNSIDEALAGYCKNIFVKINSNGTVTVKDDGRGIPVDKHKGENKSAAEVIMTQLHAGGKFDHDSYKVSGGLHGVGVSVVNALSEKLDLEINRDGKKYFVEFNNGEAKKPLKEIGKSKETGTQITFLPSKEIFSSIKFSGTILIQRMRELAFFNKGIKITFIDGSQKKEK

SEQ ID NO: 184189 - protein, 236 aa, Unknown
  Bacterial polypetide isolated from the Sargasso Sea
MTELHAGGKFDQNSYKVSGGLHGVGVSVVNALSEFLILEINRDGKIYNLEFSNGIVTKQLNVVGESIKKEKKFFTGTKITFLPTKDIFNNIEFNFKVIEKRLRELAFLNTGVSIDLIDKRQSNEIKINFKYDGGIQEYVKYINDGKNVINIKPISFNGEKNNITIECALQWTESYHENTICFTNNIIQRDGGTHLAGFRGALTRSIVNYINKNTKNSNNITGDDAREGLTCIISVK

SEQ ID NO: 184190 - protein, 216 aa, Unknown
  Bacterial polypetide isolated from the Sargasso Sea
MGKNKKVLHPEPIYIEREKDGCDLQLAIQYNDGYHEEMFTFVNNVNTRDGGTHLSGFRSALTRTVNSYAVQNNLAKNSGVALTGDDVREGLILVLSIKISDPQFEGQTKGKLGNTEVKGIVEQIVNEKLGQFFEEQPVIAKQIVSKVISAAQAREAAKRAKDLVRRKSALEVSSLPGKLADCSEKDPALSELYIVEGDSAGGSAKQGRNRENQAIL

SEQ ID NO: 184191 - protein, 310 aa, Unknown
  Bacterial polypetide isolated from the Sargasso Sea
WLEENPNDAKQIIQKVIDAAAAREAARRAREMSRKGAMSIASLPGKLADCQDRNPENCELFLVEGDSAGGSAKQGRDRKTQAILPLKGKILNVERARFDRIISSKEVGTLIQAMGTGLRDEFNLEKLRYHKIVIMTDADVDGAHIRTLLLTFFHRQMPEIVKAGHLFIAQPPLYKVSRGKSEVYLKDQPAYDRYLIAQGLDGRVLEAQGGPVRGGGELQALVDHGLRMRNMLGFVPRKYNSELIEAMALAGALDPAGDRSAALDRAAAHLQMGDPDARWKAETGEDGKVRLSRVWRGVTDVHEIEPAFLE

SEQ ID NO: 184192 - protein, 311 aa, Unknown
  Bacterial polypetide isolated from the Sargasso Sea
IKEYVQYMNAEKESIHPEIIYVDSQKENVYVEAALQWCSDVYSDNILGFANNIRTIDGGTHIEGLKTVLTRTFNNLAKKRGKRKDIEKNLAGENIREGLTVVLSVKVPDPEFEGQTKTKLGNTEVRGIVDSLIGEALTKYMEFNPGILDLILEKAIQSFNAAEAARRARELVRRKSVLESSTLPGKLADCSSRDPSESEIYIVEGDSAGGSAKQGRDRNFQAILPLRGKILNIEKTDDTKIYKNTEIQSLITALGLGIKGEEFDVSSLRYHRVVIMTDADVDGAHIRTLLLTFFYRYQRELVEKGFIYIAC

SEQ ID NO: 184193 - protein, 236 aa, Unknown
  Bacterial polypetide isolated from the Sargasso Sea
EKKSAAEVIMTQLHAGGKFDHNSYKVSGGLHGVGVSVVNALSEKLELEIDRDGKKFFVEFRNGDPKSPLKQIGKSKNTGTKITFLLSKEIFSSIKFSSTIIQKRMRELAFLNRGINLVVLDKTLKKEKKVEFKYDGGIIEFVNFLNEKREKLKNKNGNDLFKKPIYLEGDKNGVNIECSLEWNSGYSEDMHTYTNNIFQKDGGTHLLGFRSSLTRILNKYVNENNILKKKQVSITG

SEQ ID NO: 184194 - protein, 178 aa, Unknown
  Bacterial polypetide isolated from the Sargasso Sea
MSKKSELNNNQSYGADSIKVLKGLDAVRKRPGMYIGDTDDGSGLHHMVFEVIDNSIDEALAGFCKNIFVSINSDNTVTIEDDGRGIPVDTHKGEKISAAEVIMTQLHAGGKFDHDSYKVSGGLHGVGVSVVNALSKKLELKIFREGKEYEINFEDGYSVKPLKQIGKTKKTGTKITFL

SEQ ID NO: 184195 - protein, 303 aa, Unknown
  Bacterial polypetide isolated from the Sargasso Sea
DRKTQAILPLKGKILNTERAQDHKVLSSSEISTLITALGCGVGDDCSLDENSKMIKNLRYGKIVIMTDADVDGAHIRTLLLTFFHTKLRLLVDNGNVYIAQPPLYKIKKGKTQKYFLDDKELNDFIYQDISNTFSVSYGKTKLEHDSVKELLLSYSKLLSIVESFSANRDPDFILNLAFTDKLSSENFKNKKILSKWLSDYEILLNSSTPINVSYSFSLQESDKSGEYGFTITKTLNGVRSNLPSMDKRFFSSDAYLEISALNLNDYHEKVFSYTKNDSDQSNSDLAISQLYDALVTSSRNSI

SEQ ID NO: 184196 - protein, 267 aa, Unknown
  Bacterial polypetide isolated from the Sargasso Sea
MSSSYLSYAMSVIVSRALPDIRDGLKPVHRRIIYAMHKGGFDWSKQFRKSARIVGDVIGKYHPHGDQAVYDALVRMVQEFSMSLPLVDGQGNFGSIDGDPPAAMRYTETKLAKVSQFLIDDIEKNTVSFKSNYDETEQEPIVLPAQYPNLLVNGAGGIAVGMATSIPPHNLGEVVDGTLALIKNKDIKINELMKHIPGPDFPTGGLIIGKDIIKQGYKTGRGSFKIRGEISVENLKNGKDRLVVSSIPYQINKSNLNERIAELVRDK

SEQ ID NO: 184197 - protein, 131 aa, Unknown
  Bacterial polypetide isolated from the Sargasso Sea
MSDENIENPESGDYDSSSIKVLKGLDAVRKRPGMYIGDTDDGTGLHHMVFELVDNSVDEALAGHCSQIDVIIHPDESVTVADNGRGIPTEQHEEGVSAAEVIMTVLHAGGKFDDNTYKVSGGLHGVGVSVV

SEQ ID NO: 184198 - protein, 264 aa, Unknown
  Bacterial polypetide isolated from the Sargasso Sea
NLFKKPVYIEGIKNNTDIQCSLKWNAGYSEDVLAFTNNIYQKDGGTHLLGFRSALTRVVNKYANDQNLLKKNKVSLSGDDIKEGLTCVLSIKIPDPKFSSQTKDKLVSSEVRYIVENFINEKLSIWFDQNPSISKIILSKIIQAAVARDVARKARESVRRKGALELTGLPGKLADCQNSKQEGTELFIVEGDSAGGSAKQGRNREYQAVLPLRGKILNTFTDKNEKNGKSGDYKTRSLSKMMSSNEIVNLINALGLDPKSEEID

SEQ ID NO: 184199 - protein, 274 aa, Unknown
  Bacterial polypetide isolated from the Sargasso Sea
RSSLTRILNKYVNENNILKKNQVSITGDDIKEGLCAVLSIKMPDPKFSSQTKDKLVSSEVRNIVENFMNEKLSIWFDQNPSIIKIVLLKIIQAAQARDVARKARESVRRKGALELTGLPGKLADCQNSKRDGTELFIVEGDSAGGSAKQGRNREFQAVLPLRGKILNTYVEETNSKRNGNSSDSKTKALSKMISSNEIVTLINALGLDPKVEEIDLNDLRYGKIIIMTDADVDGSHIRALLLTFFNNKPFNKLIENGNIFLTQPPLFKINKSGK

SEQ ID NO: 184200 - protein, 254 aa, Unknown
  Bacterial polypetide isolated from the Sargasso Sea
QSQQNKKNDYSASSIKVLKGLDAVRKRPGMYIGDTDDGTGLHHMVFEVLDNSIDEALGGYCKNISVLINSNNTITVEDDGRGIPIDMHKGEKMSAAEVIMTQLHAGGKFDHDSYKVSGGLHGVGVSVVNALSENLELRIFRDGVEYFIEFENGKSLKPLKKIGKSSKRGTNITFLPSKEIFSSIKFSSSVLQKRMRELAFLNRGISLTLIDKTSSKQKKYENKFDGGILEFVQFINQKKPILEKKNEKAVFKKP

SEQ ID NO: 184201 - protein, 256 aa, Unknown
  Bacterial polypetide isolated from the Sargasso Sea
LSIKIPDPKFSSQTKDKLVSSEVRNIVESLINEKLSIWFDQNPSVAKIILTKVIQAALARDVARKARENVRRKGALELTGLPGKLADCQNSKQDGTELFIVEGDSAGGSAKQGRNREFQAVLPLRGKILNTYMDNSSKKNNGNGKDLKTKALSKMISSNEIVTLINALGLNPNDEEIDIKDLRYGKIIIMTDADVDGSHIRALLLTFFNNSPFNKLIENGNIYLAQPPLFKIIKGSKTIYLKDEKDLENYILKNSK

SEQ ID NO: 184202 - protein, 254 aa, Unknown
  Bacterial polypetide isolated from the Sargasso Sea
MPKSKKNTNTKNYDSSNIKVLKGLDAVRKRPGMYIGDTDDGTGLHHMVFEVVDNSVDEALAGFCTHIEVIIHEDDSITVKDNGRGIPVDKHKTEKTSAAEVIMTVLHAGGKFDDDSYKVSGGLHGVGVSVVNALSETLNLRIHKNGHTYEQDYVHGVPQKPLKKGSKTDRSGTTVTFKPSPKTFTNTTYSFDILSKRLRELSFLNSGLSIKLADTRSGKEEEFYFEGGISAFVSHLNKVQSPVHESVINFSKTI

SEQ ID NO: 184203 - protein, 246 aa, Unknown
  Bacterial polypetide isolated from the Sargasso Sea
MIYRNLLPRGVKLSPEDVWMGLSYIISVRIEDPQFSGQTKEKLSSRAVSGFVTGLIKDAFTLWLNQHPEAGDQIVARAIENAQKRAKKNVKVKRKKATGGPTLPGKLADCTSDEPDLCELFIVEGDSAGGSAKQARDRVFQAILPLRGKILNSWEVDESNLLSSQEISNISQALGVEPGADELGNLRYHKICILADADSDGLHIATLICALFLKHFRKLVEDGHVYVAMPPLYRIDVGKEVHYALD

SEQ ID NO: 184204 - protein, 267 aa, Unknown
  Bacterial polypetide isolated from the Sargasso Sea
FLGFRSALTRVVNKYANEQNLLKKNKVSLSGDDVKEGLTSVLSIKIPDPKFSSQTKDKLVSSEVRNIVETIINEKLSIWFDQNPSISKIILTKIIQAAVARDVARKARENVRRKGALELTGLPGKLADCQNSKQDGTELFIVEGDSAGGSAKQGRNRENQAVLPLRGKILNTFTDLNGSKKNGNANDLRTKSLSKMISSNEIVTLINALGLDPKNEDIDLKDLRYGKIIIMTDADVDGSHIRALLLTFFNNKPFDKLIEFGHVYLAQ

SEQ ID NO: 184205 - protein, 234 aa, Unknown
  Bacterial polypetide isolated from the Sargasso Sea
MGEERIVDVELASEAKESYLSYAMSVIVGRALPDARDGLKPVHRRILYGMHELGLRSDKPHRKCARVVGDVLGKFHPHGDGSVYEALVRLAQDFSMSATLVDGHGNFGSLDDDPPAAMRYTECRLNKLAEKALLADIGSECVSFAETFDGSQTEPVVLPARVPNLLVNGSSGIAVAVATNMAPHNLGEALDAMCALAKNPDCTLEELVALMPSPDFPTGGVIINQSGMKDIYRT

SEQ ID NO: 184206 - protein, 281 aa, Unknown
  Bacterial polypetide isolated from the Sargasso Sea
YKVSGGLHGVGVSVVNALSEKLDLTIKRNGKEHAMSFANGEASKALKAVKDCKDETGTEITFYPSKSVFTMTEFSRRTLETRLREMAFLNSGISIHLEDKRKDEPWVKTMSYEGGLEEYVRHIDQTRKSLMEVPISFTGKKDEIEVDVSMWWNDSYYETVNCFTNNIPQKDGGTHLAGLRSALTRVVNSYAQESGLTKKENVQLVGEDIREGFTCVLSVKVADPKFSSQTKDKLVSSEVRPVVESLINDLLSNWFEEHPNEAKIIVGKVVEAASAREAARK

SEQ ID NO: 184207 - protein, 294 aa, Unknown
  Bacterial polypetide isolated from the Sargasso Sea
DERLSFLNKGITISITDNRKKGKDGDPVCETFHSKEGLSEFIKYLDESREPIINDIIKMEGEKNNIPVEVAMIYNSSFSENLHSYVNNINTHEGGTHLSGFRRGLTNTLKKYADSSGLTDKLKFDISGDDFREGLTAVISVKVAEPQFEGQTKTKLGNREVSAAVSQAVSEMLENYLEENPNDSKIIVQKVILAAQARHAARQAREMIQRKTVMTGGGLPGKLSDCSETDPLKCEVFLVEGDSAGGTAKQGRDRVFQAILPLRGKILNVEKAQQHRVFENEEIRNIYTALGVSI

SEQ ID NO: 184208 - protein, 293 aa, Unknown
  Bacterial polypetide isolated from the Sargasso Sea
VEYLDKDRQKLKNKNDNDLFKKSIFIEGKKDNIEIECSLKWNAGYSEDVYPYTNNIYQKDGGTHLLGFRSALTRVINKYATEQNLLKKNKVTISGDDIKEGLTCVLSVKIPDPKFSSQTKDKLVSSEVRNIVENIVNEKLSVWFDQNPSIAKIILSKVVQAALARDVARKARENVRRKGALELTGLPGKLADCQNSKQEGTELFIVEGDSAGGSAKQGRNREFQAVLPLRGKILNTYTSVNGTKKNVNGNGNEIRTKTLAKLISSNEIITLINALGLDPKNEDIDIKDLRYGK

SEQ ID NO: 184209 - protein, 328 aa, Unknown
  Bacterial polypetide isolated from the Sargasso Sea
VETLVNEKLSIWFDQNPSIAKIILAKVIQAAMARDVARKARENVRRKGALELSGLPGKLADCQIGKQEGTELFIVEGDSAGGSAKQGRNRANQAVLPLRGKILNTYVEDFNVKKNSNGNGNGSDQRTKALSKMISSNEIVTLINALGLDPKAQEIDLKDLRYGKIIIMTDADVDGSHIRALLLTFFNNKPFNKLIENGHVYLAQPPLFKINKGSKGIYIKDEKELEDYIINNNKDLKKINKGSKDYFKKIDEEKSKMNIQRFKGLGEMNPEELWSTTLDPETRNLLPVQYSKDLKKDQNLIHTLMGYDVALRKDFIVSNAINVRNLDI

SEQ ID NO: 184210 - protein, 299 aa, Unknown
  Bacterial polypetide isolated from the Sargasso Sea
MVYEVVDNSIDEALAGYCKSINVSINSDGSITVKDDGRGIPVDIHKGEKKSAAEVIMTQLHAGGKFDHESYKVSGGLHGVGVSVVNALSEKLNLIIERDGNKYFIEFRNGDTVKPLKLLGKSKISGTQITFLPSKKIFSSTKFSFNIIQKRMRELAFLNKGIKISINDLSLKKNKNVEFKFDGGILEFVEFLDKDRAKLKNKNENDLFKKPIFVEGKKENLEVECSLKWNAGYSEDVYSYTNNIYQKDGGTHLLGFRSALTRVINKYALEQNLLKKNKVSISGDDIKEGLTCVLSIKNP

SEQ ID NO: 184211 - protein, 179 aa, Unknown
  Bacterial polypetide isolated from the Sargasso Sea
DKVLGSQEVGTLIKALGCGIGEEDFDINNLRYHRIIIMTDADVDGSHIRTLLLTFFYRQMYEIVDKGHIYIALPPLYKITKGKEFFYASDEKEKDKAIKSLSKSGTRGLEVQRYKGLGEMNPEQLWTTTMDPQNRRMMRVDIKDVQDANESFEILMGDDVEPRREFIDKNALSVKELDI

SEQ ID NO: 184212 - protein, 300 aa, Unknown
  Bacterial polypetide isolated from the Sargasso Sea
GSGKVEWAVAWPVDENPFFNSYCNTVPTPLGGTHELGLRGALTKGLRAYGELVGNKQAAKLSGDDVVGGTVVMLSVFIADPQFQGQTKDKLSTVEAQKLVENTVRDHFDHWLSGAPDAAKALLEHAIERAEIRLKRRAQKQTKRQSATRKLRLPGKLSDCTRTTAQGTELFIVEGDSAGGSAKQARNRETQAILPLRGKILNVASATADKMRANQELSDLIEALGSGLGEAFMEDDLRYEKVIIMTDADVDGAHISSLLMTFFFQEMAGLVGSGHLYLAMPPLYRINQGSKSMYARDDAH

SEQ ID NO: 184213 - protein, 198 aa, Unknown
  Bacterial polypetide isolated from the Sargasso Sea
MTKSNPNNYQADSIKVLKGLEAVRKRPGMYIGDTDDGTGLHHMVYEVVDNSIDEALAGYCKKIEVNINQDNSVTVIDDGRGIPVDMHKGEKKSAAEVIMTQLHAGGKFDHDSYKVSGGLHGVGVSVVNALSEKLKLTINRDNKKYYIEFNNGDAKTSLKNIGKSKTSGTEINFIPSTDIFSTIKFSFSVLEKRMRELA

SEQ ID NO: 184214 - protein, 302 aa, Unknown
  Bacterial polypetide isolated from the Sargasso Sea
ALPDARDGLKPVHRRVLYAMSELGNDWNKPYKKSARVVGDVIGKYHPHGDTAVYDTIVRMAQDFSLRYLLVDGQGNFGSVDGDNAAAMRYTEVRMTKLAHELLADLDKETVDWVPNYDGTEQIPAVMPTKVPNLLVNGSSGIAVGMATNIPPHNLSEVIDGCLALIDNAELTVDDLMQYIPGPDFPTAGIINGRAGIIEAYRTGRGRIYIRARVEVEDIDKVGGRQQLVVTELPYQLNKARLIEKIAELVKEKKIEGITELRDESDKDGMRVVIELRRGEVPDVVLNNLYAQTQMQSVFGIN

SEQ ID NO: 184215 - protein, 278 aa, Unknown
  Bacterial polypetide isolated from the Sargasso Sea
KVLKGLEAVRKRPGMYIGDTDDGSGLHHMVFEVVDNSIDEAIVGYCKNITVTIHKNNSVTVEDDGRGIPVDLHKGEKKSAAEVIMTQLHAGGKFDQNSYKVSGGLHGVGVSVVNALSEKLDLTIFRDQKEYFISFKNGKALNSIKFIKKTKQSGTKINFLPSKEIFSNIKFSLAILQKKMRELAFLNRGLKINLIDQTHAKTKVYEHKYDGGVGEFVTFLDQKKSLMINKNEKAVFKKPIYLKGEKKEVTVECSFQWNAGFSEEVMAFTNNIHQRDGG

SEQ ID NO: 184216 - protein, 284 aa, Unknown
  Bacterial polypetide isolated from the Sargasso Sea
KVIGKSKNSGTEIKFLPSKEVFSTTKFSPNIIQKRLRELAFLNKGVKICINDFTQKKHKRIEFKFDGGITEFVDYIDDKREKLKNKNGNDSFKKPIYIDGKKNNIEIECSLKWNAAYSEDVYSYTNNIHQKDGGTHLLGFRSALTRVINKYANENNLLKKNKLTISGDDIKEGLTCVLSVKMPDPKFSSQTKDKLVSSEVRMIVETVINEKLSIWFDQNPGTSKIILTKVIQAALARDVARKARENVRRKGALELTGLPGKLADCQISKQEGTELFIVEGDSGG

SEQ ID NO: 184217 - protein, 293 aa, Unknown
  Bacterial polypetide isolated from the Sargasso Sea
DYSFKNITTRFKQMAYLNPGLTIRFRSEFHQDLWPNNSTTYMFTGGVQSYVRSLNRPRTPIHPNIASINGKLSPDDVKAKVDTPVVVDIAFQYNETFQENVLSFANCIVTPEGGTHLTGFRRSLTRAINNYGKKNGILKDDLKDVSGEDVREGLMAVISVKLGEPQFEGQTKAKLGNPEIESAVTSLMTQQLTEYLEDNPGDARSILEKASTAARAREAAKKARDLVIRKNAMEGGALPGKLADCSEKDPAKSELFLVEGDSAGGSAKQGRDRYFQAILPLRGKILNVKRLDQ

SEQ ID NO: 184218 - protein, 223 aa, Unknown
  Bacterial polypetide isolated from the Sargasso Sea
MQKIEISKNLNIKPITMYDEMSSSYLSYAMSVIISRALPDVRDGLKPVHRRIIYAMYKGGFDWTKQFRKSARIVGDVIGKYHPHGDQAVYDALVRMVQDFSMSRPLIDGQGNFGSIDGDPPAAMRYTETRLSKIAKFLIEDIEKNTVTFKSNYDETELEPEVLPSQYPNLLVNGAGGIAVGMATSIPPHNLGEIINGTLALIKNKDIKINELMKHIPGPDFPT

SEQ ID NO: 184219 - protein, 305 aa, Unknown
  Bacterial polypetide isolated from the Sargasso Sea
KISWVSSEARPAVETLINDYFMDFLLANKPQAKEILGKVLEAAYAREAARKAKEMTRRKGLLDIGGLPGKLADCQEKDPALSELFLVEGDSAGGSAKQGRDRSFQAILPLKGKIINVQKARLDKVLSSNEIGTLITALGTGIGIDEFSLEKLRYHRVIIMTDADVDGSHIRTLLLTFFYNQMFDLLEKGHIYLALPPLYKIKKGGKTHYAKDEEEKDAILKELRKEATEGSRPPEIQRYKGLGEMNPEQLWETTFDPKHRRLVQITLDEARELVDDIFETLMGDQVQPRREFIDDNALRAENIDF

SEQ ID NO: 184220 - protein, 221 aa, Unknown
  Bacterial polypetide isolated from the Sargasso Sea
MTNTPKYDSSNIKVLKGLEAVRKRPGMYIGDTDDGTGLHHMVFEVVDNSIDEALAGHCSEISVEINVDNSITVSDNGRGIPVDLHPEEKKPAAEVIMTVLHAGGKFDDNSYKVSGGLHGVGVSVVNALSEKLELEICRDGNIHNQSYSMGEPQTKLLKGSKTKETGTKVTFMPSKEIFTDTEFHFNILAKRLRELSFLNSGIKILLSDHRTDTTEEFHYAG

SEQ ID NO: 184221 - protein, 239 aa, Unknown
  Bacterial polypetide isolated from the Sargasso Sea
MAQQQDYTQDSIQVLEGLVPVRKRPGMYIGSTDERGLHHLINEIVDNSVDEFMAGHCDEIFLHIDENQYVEITDNGRGIPVEKHRTTNKPTVETVLTTLHAGGKFEQGAYQVSGGLHGVGASAVNALSQDFIVSVYREGKEHTMSFSEGIKKSDLTTSNLPENEKNKTGTKIRFKADTTIFIDDETKQPLDYDFNKILARTKEIAYLNKGLKIIFSSDFHKNLWPNNKYMYYFEGGISS

SEQ ID NO: 184222 - protein, 72 aa, Unknown
  Bacterial polypetide isolated from the Sargasso Sea
MTDKISQINLEDEMKKSYLDYAMSVIIGRALPDVRDGLKPVHRRVLYAMKVLGNDHTKAYKKSARIVGDVIG

SEQ ID NO: 184223 - protein, 255 aa, Unknown
  Bacterial polypetide isolated from the Sargasso Sea
ISAQERVKASSTVERKKTFKGPALPGKLSDCNSEDLNKTELFLVEGDSAGGSAKQARERSFQAIMPLRGKILNTWDLESSEIIKSQEIKNLSTAIGVLPGNADVSSLRYGKICILADADSDGLHIATLLCALFLRHFKPLVNDGRIFIAMPPLYRVDCGKEVLYALDELQKDKIVKDFKNKKGKPKINIQRFKGLGEMNPSQLRETVMDPESRQLVRLSISATDNANAMMDLLLSKKNAPARKEWLEKKGSLVRM

SEQ ID NO: 184224 - protein, 155 aa, Unknown
  Bacterial polypetide isolated from the Sargasso Sea
MSSSYLSYAMSVIVSRALPDVRDGLKPVHRRILYAMHKGGYDWSKQFRKSARIVGDVIGKYHPHGDQSVYDALVRMVQDFSMSLPLVDGQGNFGSVDGDPPAAMRYTETRLSKVSQYLIDDIDKNTVSFKSNYDETENEPSVLPAQFPNLLVNGA

SEQ ID NO: 184225 - protein, 91 aa, Unknown
  Bacterial polypetide isolated from the Sargasso Sea
MSAEAQTATTQYSAENIKVLEGLEAVRKRPAMYIGDVGKRGLHHLVYEVVDNSIDEALAGYCTKIIVTFNADGSVTVEDNGRGIPVDIHKE

SEQ ID NO: 184226 - protein, 107 aa, Unknown
  Bacterial polypetide isolated from the Sargasso Sea
MSEEKRSNKISNDYGANQIQVLEGLEPVRKRPGMYIGSTGPRGLHHLVYEVVDNSVDEALAGHCDQIEIVLKEDGSALISDNGRGIPTDIHPRTGKSALETVLTVLH

SEQ ID NO: 184227 - protein, 301 aa, Unknown
  Bacterial polypetide isolated from the Sargasso Sea
NYDDTETEPVVLPAQFPNLLVNGAGGIAVGMATNIPPHNLGEVIDGTLAYLENNKITILELMKSIPGPDFPTGGLILGKNDIKNGYETGRGSIKIRGEIDIEESIKDRKLILIKSVPYQINKTALIEKIALLIREKKLEGIADLRDESNKEGVRIVIETKKNINQDIIINQLYKFTPLESSFGFNTLAINEKKPELLNLKQFIQIFIKFRESTIVKRTLFELKKAKDRSHILIGLFISIENIDEIIGIIRKSKTPNDARSLLLKKKWNFKKSNLDKNILSLNELNQIDEYQLSDHQVKAIL

SEQ ID NO: 184228 - protein, 291 aa, Unknown
  Bacterial polypetide isolated from the Sargasso Sea
VIYPTLVRMAQEWNMRHVLVDKQGNFGSIAGLPAAAMRYTEARLSPIASQMLDDINLDTVDFVPTYDERNTEPVVLPSRFPNLVVNGAGGIAVGMATSIPPHNLGEVCRGLVQMIDNPDTSMAELLEIVPGPDFPTGGIVMGRESLLRGYLTGRSTITLRARAHVEEFGKNRNRIVITEIPYQQTRDAIEEKIADQVSNERIKGISAIRNESDLKEPVRLILELKRDADPDVVLNQLYQFSPLQTSFSLIFLALVDGKPRMLSFKNMLEEFLRHRTTVLRRRTQHLLARAR

SEQ ID NO: 184229 - protein, 272 aa, Unknown
  Bacterial polypetide isolated from the Sargasso Sea
FKEGLTCVLSVKIPDPKFSSQTKDKLVSSEVRNIVEGIVNEKLSIWFDQNPSISKIILTKIIQAAVARDVAKRARENVRRKGALELTGLPGKLADCQNSKQEGTELFIVEGDSAGGSAKQGRNREYQAVLPLRGKILNTFTEINESKKNGGQNDLRTKSLSKMISSNEIVTLINALGLDPKSEEIDLEDLRYGKIIIMTDADVDGSHIRALLLTFFNNIPFNKLIEKGHVYLAQPPLFKVNKGSKGIYIKDEKDLENYIIKNSKDLKKIKKN

SEQ ID NO: 184230 - protein, 302 aa, Unknown
  Bacterial polypetide isolated from the Sargasso Sea
MYIGDTDDGTGLHHMVYEVVDNSIDEALAGYCKNIDIFINSNGTVTVKDDGRGIPVDLHKGEKKSAAEVIMTQLHSGGKFDHDSYKVSGGLHGVGVSVVNALSESLKLEISRDGKKYVIEFKNGDAKANLKAVGNSKETGTQITFLPSKEIFSSIKFNPSIIQKRMRELAFLNKGIKISIHDLTSKKSKINVFKFEGGILEFVSFLDEKREKLNNKNGNLLFKKPILIEGKKDDVEIECALQWNAMYSEDVYPYTNNVYQKDGGTHLLGFRSALTRVVNKYASELNLLKKNKISISGDDVKE

SEQ ID NO: 184231 - protein, 303 aa, Unknown
  Bacterial polypetide isolated from the Sargasso Sea
PNVISVTGEHNNIVVDVALQWTDSYQETMYCFTNNIPQKDGGTHLAGFRGALTRVLNNYIEQNGIAKQAKINLTGDDMREGMIAVLSVKVPDPSFSSQTKEKLVSSDVRPAVENAFGARLEEFLQENPNEAKAIAGKIVDAARAREAARKARDLTRRKGALDIAGLPGKLADCQEKDPALSELFIVEGDSAGGSAKQGRNRKNQAVLPLRGKILNVERARFDRMLSSDQVGTLITALGTGIGRDEYNPDKLRYHKIIIMTDADVDGAHIRTLLLTFFYRQMPELIERGYVYIGLPPLYKIKQG

SEQ ID NO: 184232 - protein, 293 aa, Unknown
  Bacterial polypetide isolated from the Sargasso Sea
GYDWSKQFRKSARIVGDVIGKYHPHGDQSVYDALVRMVQDFSMSLPLVQGQGNFGSIDGDPAAAMRYTETRLSKVSQYLIDDIEKNTISFKSNYDETEKEPSVLPAQFPNLLVNGAGGIAVGMATSIPPHNLGEIIDGTLALIDNKDIKIKELMKHIPGPDFPTGGVIIGKDIIKQGYNNGRGSFKIRGEVSVESLKNGRDRLVITSIPYQVNKAVLNERIAQLVREKKIEGIRDIRDESNREGIRVAIDLRNGVEPETIKRQLYKNTQIESSFGFNTLAIVEGKPKTCTLKE

SEQ ID NO: 184233 - protein, 266 aa, Unknown
  Bacterial polypetide isolated from the Sargasso Sea
VSPVSLETEMKSAYLDYAMSVIVSRAIPDLRDGLKPVHRRILYSMHETNNTFDRPYRKSARPVGDVMGKYHPHGDQAIYDALVRMAQDFSMSLVLLDGQGNFGSIDGDSAAAMRYTEVRMANPTAALLDDIEKGTVDFQDNYDGKDIEPRILPARFPNLLVNGAGGIAVGMATNIPPHNIGEVIDASLAVIENPHIEIEELLKLLPAPDFPTGGIILGQSGSRQAYLTGKGSIVIRAKHTVEEQKKDRFSIVITEIPYQVNKSSLV

SEQ ID NO: 184234 - protein, 171 aa, Unknown
  Bacterial polypetide isolated from the Sargasso Sea
MVDINRDNTLPRDIVDEMRESYLNYSMSVIVSRALPDVRDGLKPVHRRILYGMSELGSSWNRPYKKSARIVGDVLGKYHPHGDSSVYDALVRMAQDFSMRYELVDGQGNFGSVDGDNAAAMRYTESRMTRLSSEMLKDLDKETVDWTVNFDETLKEPSVLPTTVPTLLVNG

SEQ ID NO: 184235 - protein, 153 aa, Unknown
  Bacterial polypetide isolated from the Sargasso Sea
AREAARKAREMTRRKGALDIAGLPGKLADCQERDPALSELYLVEGDSAGGSAKQGRNRKFQAILPLKGKILNVEKARFDKMLSSAEIGNLVTALGCGIGKDEFDPDKLRYHRIIIMTDADVDGSHIRTLYLTFFFREMRELIDRGHVYIAQPP

SEQ ID NO: 184236 - protein, 146 aa, Unknown
  Bacterial polypetide isolated from the Sargasso Sea
EVGTLITALGCGIGREEFNPDKLRYHSIIIMTDADVDGSHIRTLLLTFLFRQMREIIERGHVFIAMPPLYKVKRGKQEQYLKDEKAKEAYLTQTALEGAQLYVNPEAPAIKDSALETMVKDYQAVMNMIGRLSRAYPAKVLEQMLQ

SEQ ID NO: 184237 - protein, 290 aa, Unknown
  Bacterial polypetide isolated from the Sargasso Sea
MQWSVIIGRALPDARDGLKPVQRRILFAMYELGLTPDKPFRKCARVVGDVLGKYHPHGDQAVYDALVRLVQNFSTKYPILDGHGNFGSVDNDPPAAMRYTETRLAQIAHKGFLEEIGSETVSFSNNFDGSQKEPDVLPAQLPFLLLNGSSGIAVGMATNIPPHNLGEIVDGLVALVKNNDISDKKLSNIIRGPDFPTGGELIYSPAIKELYETGKGSLTIRGVINIEEVNLGKGKHKKNALIITELPYQINKAGWIEKLAELVNSGKIHGISDIRDESDRDGMRIVIELK

SEQ ID NO: 184238 - protein, 242 aa, Unknown
  Bacterial polypetide isolated from the Sargasso Sea
GRNREFQAVLPLRGKILNTYIDVNGSKSKNGNNQDLQTKAFSKMMSSTEIVTLINALGTGSKDFSIENLRYEKIIIMTDADVDGSHIRTLLLTLFNNYPFYELIEKNHIYLAQPPLYKVSKGSKSFYIKNDKELENFLIKMSDKSKNSIKKNTKEFIKFIEKEKSKLTIQRFKGLGEMNPEELWDTTLNPEKRTLLQVKYSNNTKDKSKKDQDLIKVLMGDEVAPRKDFIINRALEVSNLDI

SEQ ID NO: 184239 - protein, 248 aa, Unknown
  Bacterial polypetide isolated from the Sargasso Sea
MEAKNINQNNVDYDAESIKVLKGLDAVRKRPGMYIGDTDDGSGLHHMVYEVVDNSIDEALAGFCDSITVKLNKDDSVTVIDNGRGIPTNVHKEEGVSAAEVIMTQLHAGGKFDQNSYKVSGGLHGVGVSVVNALSEKLDLKICREGKKYCINFSHGNPESPLKEVGNTEDSGTEITFLPSKKTFSLTKFDFAKLESRLRELAYLNSGVNIKLVDERGNEEKISELSSRGGLKAYVSFLDKSRESIIKD

SEQ ID NO: 184240 - protein, 311 aa, Unknown
  Bacterial polypetide isolated from the Sargasso Sea
LKKYADASGLLDKLKFEISGDDFREGLTAIVSVKVNEPQFEGQTKTKLGNREVTSAVSQSVSQMLENYLEEHPNDAKVIVQKVILAAQARHAARKAREMVQRKTVMSGGGLPGKLADCSEQDPQLCEVFLVEGDSAGGTAKQGRDPKFQAILPLRGKILNVEKAMQHKVFENEEIRNIYTALGVSIGTEEDSRALNLEKLRYHKIVIMCDADVDGSHISTLILTFFFRYMRELIDSGYVYIATPPLYLVKKGNKKDYAWSDEERDKLMKENGTGSNIQRYKGLGEMNADQLWETTMNPDKRTLKRIDINSL

SEQ ID NO: 184241 - protein, 287 aa, Unknown
  Bacterial polypetide isolated from the Sargasso Sea
VNYVNTNTKNSNNITGEDAREGLTCIISVKLPDPKFSSQTKDKLVSSEVRPVIESTSLNKLEQWIEENPSEIKKVIDKILEASNAREAARKARELTRRKTGLENTSLPGKLADCQEKNPELSELFIVEGDSAGGSAKQGRDRKNQAILPLRGKILNVERANDKQVFTSNEIGALITAIGAGVGNPTDDNNQNKLEGKFDVSKMRYHKIIIMTDADVDGSHIRTLLLTFFYRHMKPIIDSGRLFIAQPPLYRLKKGNSTVYKKDDNDLEDYLIEEGLKNTIFENTQLS

SEQ ID NO: 184242 - protein, 279 aa, Unknown
  Bacterial polypetide isolated from the Sargasso Sea
VDFIENYDGSESEPSVMPTKFPNLLINGSSGIAVGMATNIPPHNLSEVINACLAMIDNPAIEIKELMELIPGPDFPTAGIINGAQGIHEAYVTGRGRVHIRGKVDIEPIGKKNREAIIVKELPYQVNKARLIEKIAELVRDKKIEGITELRDESDKDGMRIVIELRQGEVVDVVLNNLYKQTSLQTVFGINMVALHDGQPKLLNLKQVLEAFISHRREVVTRRTIFDLNKARDRAHILEGQAVALSNIDAVIKLIKSSPTPVDAREALLKKSWKPGAVK

SEQ ID NO: 184243 - protein, 264 aa, Unknown
  Bacterial polypetide isolated from the Sargasso Sea
GKQEGTELFIVEGDSAGGSAKQGRNRANQAVLPLRGKILNTYVEDLQVKKNGNSHKNGADQRTKALAKMISSNEIITLINALGLDPKAQEIDLKDLRYGKIIIMTDADVDGSHIRALLLTFFNNKPFNKLIENGFVYLAQPPLFKINKGSKGIYIKDEKELEDFIINNNNEFKKIKKGSKDFNKRIEVEKSKMNIQRFKGLGEMNPEELWSTTLDPETRNLLQVKYSKDSKKDQNLIHTLMGNDVSLRKDFIITNAINVHNLDI

SEQ ID NO: 184244 - protein, 248 aa, Unknown
  Bacterial polypetide isolated from the Sargasso Sea
MSSSYLSYAMSVIVSRALPDVRDGLKPVHRRIIYAMYKGGYDWSKPFRKSARIVGDVIGKYHPHGDQSVYDALVRLVQDFSMSVPLISGQGNFGSIDGDPPAAMRYTETKLGRISQFLTEDLEKNTVNFRSNYDETEKEPEVLPSQYPNILVNGAGGIAVGMATSIPPHNLGEIVNATIAFINNREITISQLMKYVPGPDFPTGGVIIGKDIIKQGYNKGRGSFKIRGEIEFEEKKGGRETLVIKSIP

SEQ ID NO: 184245 - protein, 292 aa, Unknown
  Bacterial polypetide isolated from the Sargasso Sea
WFDQNPAVVKIVLLKIIQAAQARDVARKARESVRRKGALELTGLPGKLADCQNPKRDGTELFIVEGDSAGGSAKQGRNREFQAVLPLRGKILNTYVETNGSKKNGNHSDLRTKALTKMISSNEIVTLINALGLDPKSEEIDLEDLRYGKIIIMTDADVDGSHIRALLLTFFNNKPFNKLIENGHIYLAQPPLFKLNKSGKSFYIKDERELDNFLINNSKNLKKTKKNTKLYEEILSEEKSKLNIQRFKGLGEMNPDELWNTTLDPKNRNLLQVKYSKDQKRDQDIIHTLMGN

SEQ ID NO: 184246 - protein, 332 aa, Unknown
  Bacterial polypetide isolated from the Sargasso Sea
MVTKLFMTLLVRMVQEFSMSLPLIDVRGNFGSIDGDPPAAMRYTETKLAKISQFLIDDIDKETVNFKSNYDETEKEPVVLPAQYPNLLVNGAGGIAVGMATSIPPHNLGEVIDGTLAFINNRDIKINELMKHIPGPDFPTGGTIIGKNIIKEGYKNGRGSFKIRGEIKIEQRNNGKERIVITSIPYQVNKSSLNERIVELVREKKIEGISDIRDESNREGVRVAIDLRRGVEPETVKRQLYKYTSIESSFGFNTLAIVDQKPKTCNLKDFIDHFLKFREDVVIKKTKHDLKKAEDRAHVLIGLSVSVENLDKIIKVIRSSKTPDDAKKELSK

SEQ ID NO: 184247 - protein, 313 aa, Unknown
  Bacterial polypetide isolated from the Sargasso Sea
ANENNLLKKNKLAISGDDIKEGLTCVLSTKIPDPKFSSQTKDKLVSSEVRMIVETLINEKLSIWFDQNPSIAKTILAKIIQAAMARDVARKARENVRRKGALELSGLPGKLADCQIGKQDGTELFIVEGDSAGGSAKQGRNRANQAVLPLRGKILNTYVEDLNIKKNRNGNGTDQRTKALSKMISSNEIVTLINALGLDPKAQEIDLKDLRYGKIIIMTDADVDGSHIRALLLTFFNNKPFNKLIENGHVYLAQPPLFKINKGTKGIYIKDEQELEEYIVNNNKELKKIKKTSKQYLSAIDAEKSKLNIQRLK

SEQ ID NO: 184248 - protein, 231 aa, Unknown
  Bacterial polypetide isolated from the Sargasso Sea
DTHKGEGVPAAELIMTTLHSGGKFDDNSYKVSGGLHGVGVSVVNALSKELTLTICRDGGMYQQKYSEGLAKTKLKKIKASKDTGTEITFTASDKIFTSINFEADRVNKRVQELSFLNAGVSIEVTDARTGKSKKFKNEGGVSSYVDYLRGRKPPLCQTIECQGGQEGVTVEVAMQWNDSYNESVLCYTNNIPQKDGGTHLSGFRSSLTRVLKAFVKKEELNKNSPVELLGE

SEQ ID NO: 184249 - protein, 267 aa, Unknown
  Bacterial polypetide isolated from the Sargasso Sea
MVYEVVDNSIDEALAGHCSSISVSLNPDNSVSIIDNGRGIPTNIHKEEGISAAEVIMTQLHAGGKFDQNSYKVSGGLHGVGISVVNALSEWLELTIRRDKSEYFIKFKDGIADAPLKKIGNSDLSGTMITFMPSKKTFSKTDFDFPKLESRLRELAYLNSGVNIVLIDKRKSEVFESQLSSRGGLKGYVKYLDKSKESIISEIISIKGDSSDIHVEMALQWNKSYHENCLVFTNNIPQRDGGTHLAGFRSALTRTINTASNNLGLQK

SEQ ID NO: 184250 - protein, 311 aa, Unknown
  Bacterial polypetide isolated from the Sargasso Sea
WCADAYSDSILGFANNIRTVDGGTHIEGLKTVLTRTLNAFAKKLGKRKEADSNLAGENIREGLTAVLSVKVPEPEFEGQTKTKLGNTEVRGIVDNLVGESLSQFLEFNPSVIGLILEKAIQAFNAAEAARRARELVRRKSVLESSTLPGKLADCSSRDPGESEIYIVEGDSAGGSAKQGRDRRFQAILPLRGKILNIEKTDDAKIYKNTEIQALITALGLGIKGEDFDEKNLRYHRIVIMTDADVDGAHIRTLILTFFYRYQKALVEGGYIYIACPPLYKVERGKNHTYCYNESDLQKTLKGLAKKPTTPF

SEQ ID NO: 184251 - protein, 300 aa, Unknown
  Bacterial polypetide isolated from the Sargasso Sea
SYKISGGLHGVGVSVVNALSERLSLTIRRNGKIHTMEFKDGVTTKKLKEIGSMKKTERTGTTVQFWPSKKIFSNTTLILKTLENRVRQLAFLNSNVRITLSDMRTSKVEPIEFYYQGGLTAYVQFLNSRKSTLNKIIPFNGESNGIKVEGALQWNDGYNENMLCFTNNIPQGDGGTHLQGFRSALTRSLVGYSNTVAVAKKGNITISGDDAREGMTCVLSVKVPDPKFSSQTKDKLVSSEVRPVVEKIISEQLSAWLEQTPGEAKKLVSKIIEAASAREAARKARELTRRKNVLETSSLP

SEQ ID NO: 184252 - protein, 277 aa, Unknown
  Bacterial polypetide isolated from the Sargasso Sea
LEPVRKRPGMYIGSTGPKGLHHLVYEVVDNSVDEALAGHCDLIEIVLRVDGSALISDNGRGIPTDIHPRTGKSALETVLTVLHAGGKFGSGGYKVSGGLHGVGISVVNALSEWVNVTVYRDGNEFNQRFEKGLSKGELQTKKQTGKSSKKGTTICFKPDKEIFSGGIEFEYALLSSRLRELAYLNGGVKIVFRDERNQLSDGSFKEEIYLYQGGIKEYVEYMNAEKESIHPEIIYVDSQKENVYVEAALQWCSDVYSDNILGFANNIRTIDGGTHIE

SEQ ID NO: 184253 - protein, 235 aa, Unknown
  Bacterial polypetide isolated from the Sargasso Sea
MNNENEISLIDKPLSSPFSEELSKRFLQYALSTITSRSLPDVRDGLKPVHRRLLFAMQLLKLDPDKGFKKSARVVGDVMGKFHPHGDAAIYDAMVRMAQEFSLNYLLVEGQGNFGNVDGDNAAAMRYTEARLSEFASLMLDGIDQNAIDFGPTYDGEGKEPLILPSGIPNLLANGAQGIAVGMATSIPPHNLIELFDAAKFLIENKNATSSEICEIIKGPDFPTGGGVIRKFRIV

SEQ ID NO: 184254 - protein, 329 aa, Unknown
  Bacterial polypetide isolated from the Sargasso Sea
RRIIYAMYKGVIDWSKPFRKSARIVGDVMVKYHPHGDQAVYDALVRLVQEFSMSLPLIQGQGNFGSIDGDPPAAMRYTETKLSKVSQFLTDGIEKNTIDYRNNYDDTEKEPVVLPSQYPNLLVNGAGGIAVGMATSIPPHNLGEVINGTIDFIKNRDITISQLMKRIPGPDFPTGGIIIGKDIIKQGYNKGRGSFKIRGEIDEEALKNGKTRLIIKSIPYQVNKSVLNEKIAELSREKKIEGVSDIRDESNRDGIRVVIDLRRGVEPETIKRQLYKLTSIESSFGFNTLAIVNGRPKVLNLKEFISEFVDFREKTVIRRIKYDLKKTEE

SEQ ID NO: 184255 - protein, 108 aa, Unknown
  Bacterial polypetide isolated from the Sargasso Sea
MSSSYLSYAMSVIVSRALPDVRDGLKPVHRRILYAMYKGGYDWSKQFRKSARIVGDVIGKYHPHGDQSVYDALVRMVQDFSMSLPLIQGQGKFGSIDGDPAAAMRYTE

SEQ ID NO: 184256 - protein, 227 aa, Unknown
  Bacterial polypetide isolated from the Sargasso Sea
QEKDPALSEIYIFEGDSAGGSAKQGRNRQNQAILPLKGKILNVEKARLDKVLSSQEIGTLVTALGCGIGTDEFDADKLRYHRIIIMTDADVDGSHIRTLLLTFFFRQMFEILNRGHVYIALPPLYKISKGKNIKYAASEKEKDISLKELSKTGNRGIEIQRYKGLGEMNPDQLWTTTMDPQNRRMMRVCIEDANEANNSFEVLMGDQVEPRREFIDENALSVANLDI

SEQ ID NO: 184257 - protein, 256 aa, Unknown
  Bacterial polypetide isolated from the Sargasso Sea
GKFHPHGDAAIYDAMVRLAQDFSQRYPLVDGQGNFGNIDGDNAAAMRYTEARMTTVAERLLQGIDEETVDFRETYDGEGKEPLVLPAAFPNLLANGAHGIAVGMATSIPPHNICEICDALLHLIKHPNVSFEKLFEYIPGPDFPTGGWLVENKENIIEAYRTGRGSFRVRAHWYKEELKNGTYQIVVAEIPYQVQKSKLVEKLAELLESKKLNILNDVRDESAEDLRLVLEPKSRNIDPEILMETLFKQCDLEVKV

SEQ ID NO: 184258 - protein, 293 aa, Unknown
  Bacterial polypetide isolated from the Sargasso Sea
DGSGLHHMVFEVLDNCIDEAMAGHCSNIEVIINKDGSVTVADNGRGIPVDVHKKEGVSAAQLIMTTLHSGGKFDDNSYKVSGGLHGVGVSVVNALSKKLTLEVHRDGGEYYQEYNEGKPKAKLKKIKKSSKTGTIITFFPSKEIFTSTKFEIEKIYKRIQELSFLNAGVSINVEDKKTGKSKKFKNNGGLSSYVTHLKGRKQGLSDIFECSATENEVGVEISMQWTDSYSENVLCYTNNIPQKDGGTHLAGFRGSLTRVLKTFIKKENAKKTPTDLLGEDVREGLIAIISVKV

SEQ ID NO: 184259 - protein, 284 aa, Unknown
  Bacterial polypetide isolated from the Sargasso Sea
KRSNKISNDYGAEQIQVLEGLEPVRKRPGMYIGSTGPRGLHHLVYEVVDNSVDEALAGHCDHIEIVLRADGSALISDNGRGIPTDIHPRTGKSALETVLTVLHAGGKFGSGGYKVSGGLHGVGISVVNALSEWVNVTVYRDGSEFNQRFEKGVSKGELETKKQTGKPSKKGTTICFKPDKTIFSGGIEFEYALLSSRLRELAYLNGGVKIVFRDERNQLSDGSFKEEIYLYQGGIKEYVEYMNAEKDSIHPEIIYVDSQKENVYVEAALQWCSDVFSDNILGFA

SEQ ID NO: 184260 - protein, 256 aa, Unknown
  Bacterial polypetide isolated from the Sargasso Sea
EKLSIWFDQNPSVSKIILTKIIQAAVARDVAKRARENVRRKGALELTGLPGKLADCQNSKQEGTELFIVEGDSAGGSAKQGRNREYQAVLPLRGKILNTYTEINGSKKNGNQSDLRTKSLSKMISSNEIVTLINALGLDPKTEEIELKDLRYGKIIIMTDADVDGSHIRALLLTFFNNIPFNKLIEKGHVYLAQPPLFKINKGSKGIYIKDEKDLENYIIKNCKDIKKVKKNSKEFDKIIQLEKSKLNIQRFKGLG

SEQ ID NO: 184261 - protein, 206 aa, Unknown
  Bacterial polypetide isolated from the Sargasso Sea
MDLGRDNILDKQLVKELEESYLNYSMSVIMSRALPDARDGLKPVHRRILFSMSEMSAMWNRPYKKSARVVGEVLGKYHPHGDSSIYDALVRMAQEFSMRHELVQGQGNFGSVDGDRAAAMRYTESRMSRIGSELLRDIEKETIPWTTNFDETLKEPAVLPAVYPNLLVNGSEGIAVGMATKIPPHNLSELVGGLVELMDNPECETK

SEQ ID NO: 184262 - protein, 308 aa, Unknown
  Bacterial polypetide isolated from the Sargasso Sea
LNRGITISIRDNRSERFQEFKYDGGISSFIRHINENKNVLHEEPVYFSGKSEDVEIEVAFQYNDSYTERIYSFVNTINTIDGGTHLTGFKGALTRTLNNYMTSNNIANDSKENFSGEDVREGMAAVISTRVPEPQFESQKKIKLTNVEIKGKVETLVSEYLGAYLEENPSVSKKIVAKAIDAQRARLAAKKARELTRRKNVLEFSTLPGKLADCQESDPSLSELFLVEGDSAGGSAKQGRDRKNQAILPLKGKILNVEKARFDKMLTNEEIKTMITAMGTGIGKEEFNLEKIRYHKIIIMTDADVDGS

SEQ ID NO: 184263 - protein, 293 aa, Unknown
  Bacterial polypetide isolated from the Sargasso Sea
MTEENKYNSGNIQSRDIVHEMEESYLNYSMSVIVSRALPDVRDGLKPVHRRVLYGASDLGATWNRSYKKSARIVGEVLGKYHPHGDSSVYDSLVRMAQPWSLRYNLIDGQGNFGSIDGDNAAAMRYTEARMDKIAAEMLQDIDKETVDFTNNFDDSLQEPTVLPSIIPNLLMNGSEGIAVGMATKIPPHNLCELITGLKNLLSNPEITVDEIIENHIQGPDFPTAGYIMGSDGIKSAYSTGRGRVVMRGKASIEELENGKEKIIITELPYQVNKANLVEKIADLVREKKLEGI

SEQ ID NO: 184264 - protein, 67 aa, Unknown
  Bacterial polypetide isolated from the Sargasso Sea
MPKDNAYDSSKIKVLKGLEAVRKRPGMYIGDTEDGTGLHHMVFEVVDNSIDEALAGHCDEIRVVIHA

SEQ ID NO: 184265 - protein, 297 aa, Unknown
  Bacterial polypetide isolated from the Sargasso Sea
MSSSYLSYAMSVIVSRALPDIRDGLKPVHRRILYAMYKGGYDWSKQFRKSARIVGDVIGKYHPHGDQSVYDALVRMVQEFSMSLPLVEGQGNFGSVDGDPPAAMRYTETKLAKVSQFLIDDLDKKTVDFKSNYDETEKEPSVLPAQYPNLLVNGAGGIAVGMATSIPPHNLGEVINGTLALIQNKDIKLNELMKHIPGPDFPTGGIIIGKNIIKEGYKSGRGSFKIRGEINIEQAKNNRERLVITSIPYQVNKSNLNERIAELVRDKKIEGIKDIRDESNREGIRVAIDLRSNVEPE

SEQ ID NO: 184266 - protein, 254 aa, Unknown
  Bacterial polypetide isolated from the Sargasso Sea
PLIQGQGNFGSIDGDPAAAMRYTETRLSKVSQYLIDDIEKNTITFKSNYDETEKEPSVLPAQFPNLLVNGAGGIAVGMATSIPPHNLGEIIDGTLALIDNKDIKIKELMKHIPGPDFPTGGVIIGKDIIKQGYNNGRGSFKIRGEISIEQQKNGRERLVITSIPYQVNKSVLNERIAQLVREKKIEGIRDIRDESNREGIRVAIDLRNGVEPETIKRQLYKNTQIETSFGFNTLAIVGGKPQKCTLKDFLSNFL

SEQ ID NO: 184267 - protein, 128 aa, Unknown
  Bacterial polypetide isolated from the Sargasso Sea
MTKNNSKYQADSIKVLKGLEAVRKRPGMYIGDTDDGTGLHHMVYEVVDNSIDEALAGYCKNISVDINSDGSITVRDDGRGIPIDIHKGEKKSAAEVIMTQLHAGGKFDHDSYKVSGGLHGVGVSVVNA

SEQ ID NO: 184268 - protein, 187 aa, Unknown
  Bacterial polypetide isolated from the Sargasso Sea
MPKTKKNTNKKKYDSSNIKVLKGLDAVRKRPGMYIGDTDDGTGLHHMVYEVVDNSVDEALAGYCSEISVIIHQDDSITVKDNGRGVPVDKHKEENKSAAEVIMTVLHAGGKFDDDSYKVSGGLHGVGVSVVNALSQTLSLRIHKNGNIYEQDYAHGVPKKPLKKGAKTDRTGTTISFQPSKKTFSNT

SEQ ID NO: 184269 - protein, 287 aa, Unknown
  Bacterial polypetide isolated from the Sargasso Sea
ADEFDIEKLRYHKVIIMTDADVDGAHIRTLLLTFFYRKMEELVKAGHLYIAQPPLYKVNRGKSEVYLKDDAALQDYLIETGIDEATLNFGEGASAAGADLKRIVSLTKKITKLLDNLNTSIPSFLFEQVAMAGGLNPDLGQHEKDSVGKKVSERLDLLSTEHEKGWACNYDAIRGLEIYRTLRGVTQEYVIDNESLSQKETIMLDSLKGEMLETFEKEAFFHKKEKDIRVTSPSELLKLVLKEGEKGLNLQRYKGFGEMNADQLWETTLDPAARTLLQVQIKHTTEE

SEQ ID NO: 184270 - protein, 189 aa, Unknown
  Bacterial polypetide isolated from the Sargasso Sea
MEKEKLIPIKIEDEMKSAYIDYSMSVIVSRALPDVRDGLKPVHRRVLFGMNEMGVRSSSSYKKSARIVGDVMGKYHPHGDSSVYDTMVRMAQEWSLRYLLVDGQGNFGSVDGDSPAAMRYTEARMQKISEDLLSDIDKETVDFQLNFDDTIMEPTVLPTRVPALLINGASGIAVGMATNMPPHNISEVI

SEQ ID NO: 184271 - protein, 306 aa, Unknown
  Bacterial polypetide isolated from the Sargasso Sea
GRALPDVRDGLKPVHRRVLFAMNELNNDWNKPYKKSARVVGDVIGKYHPHGDSAVYDTIVRMAQDFSLRYTLVDGQGNFGSIDGDSAAAMRYTEIRMSKIAHALLADLDKETVDFVDNYDGTEQIPAVLPTRVPNLLVNGSSGIAVGMATNIPPHNLREVVAGCLATLQNPDIDVDELMQYIPGPDFPTGAQINGRAGIVQAYRTGRGRIYVRAKAGVITDEAKGKDTIIIHEIPYQLNKSRLIERIAELVKEKKLEGITELRDESDKDGLRVVIELRRGEVGDVVLNNLYAQTQLQSVVGINMVA

SEQ ID NO: 184272 - protein, 249 aa, Unknown
  Bacterial polypetide isolated from the Sargasso Sea
MSSSYLSYAMSVIVSRALPDVRDGLKPVHRRILYAMYKGGYDWSKQFRKSARIVGDVIGKYHPHGDQSVYDALVRMVQDFSMSLPLVDGQGNFGSIDGDPAAAMRYTETRLSKVSQFLIDDIEKNTIDFKSNYDETEKEPTVLPAQFPNLLVNGAGGIAVGMATSIPPHNLGEIINGTLALIDNKDLKIRDLMKHIPGPDFPTGGIIIGKDIIKQGYNKGRGSFKIRGVISNETLKNGRDRLVINFIPY

SEQ ID NO: 184273 - protein, 173 aa, Unknown
  Bacterial polypetide isolated from the Sargasso Sea
MSNSYLSYAMSVIVSRALPDVRDGLKPVHRRIIYAMYKGGYDWDKNFRKSARIVGDVIGKYHPHGDQAVYDALVRLVQDFSMSLPLLKGQGNFGSIDGDPPAAMRYTETKLGKISQFLTEDLEKNTVSYRNNYDETEKEPTVLPSQFPNLLVNGAGGIAVGMATSIPPHNWAK

SEQ ID NO: 184274 - protein, 238 aa, Unknown
  Bacterial polypetide isolated from the Sargasso Sea
MSKNSALNSNASYGADSIKVLKGLDAVRKRPGMYIGDTDDGSGLHHMVFEVIDNAIDEALAGHCKNITVIINNDNTITVEDDGRGIPVDMHKSEKISAAEVIMTQLHAGGKFDHNSYKVSGGLHGVGVSVVNALSEKLELNIYRDGKEYSVIFKNGNTIKPLKQIGKTKKRGTRINFLPSKEVFSSVKFSSTILEKRIRELAFLNKGICVKLLDQTSKKEKEFVLKYDGWNCRICKTY

SEQ ID NO: 184275 - protein, 231 aa, Unknown
  Bacterial polypetide isolated from the Sargasso Sea
MYIGDTDDGTGLHHMVYEVVDNSIDEALAGYCKNIFVKINPNGTVTVKDDGRGIPVDIHRGEKKSAAEVIMTQLHAGGKFDHDSYKVSGGLHGVGVSVVNALSEKLELEVNRDGKKYYIEFNNGEAKKPLKEIGKSKHTGTQITFLPSSKIFSSIKFNGNILIKRMRELAFLNRGIKITFIDGSNKKEKIQDFKFDGGVLEFVEFLDSKREKLQNKNGNDLFKKPIYIEGK

SEQ ID NO: 184276 - protein, 204 aa, Unknown
  Bacterial polypetide isolated from the Sargasso Sea
MKKDTYQADSIKVLKGLEAVRKRPGMYIGDTDDGTGLHHMVYEVVDNSIDEALAGYCKNIHVYINSNGTITVKDDGRGIPVDIHKSEKKSAAEVIMTQLHAGGKFDHDSYKVSGGLHGVGVSVVNALSKNLKLEIDRDGKKHYIEFIDGKAKSPLKIVGKSRATGTQITFSPSQEVFSSIKFNVNVLTKRMRELAFLNKGIKII

SEQ ID NO: 184277 - protein, 263 aa, Unknown
  Bacterial polypetide isolated from the Sargasso Sea
MLGDIEKDTVSYSPNYDGSEHIPDVLPTKIPNLLVNGSSGIAVGMATNIPPHNLSEVLNGCINLINNPKISIDELIKDISGPDFPTGGTIDGKAGIYEAYKTGRGIIHIRSNTSIEEDKSGKQSLIINEIPFMVNKARMLEKIAELVKEKKIEGITEIRDESDKDGLRVVIEVRKGDSVDVLENNLFAQTQLEQSFGINFTVLSEGQPKEVNLKEMLQAFVKHRKDIITKRTKYDLKKAKDRGHVVEGLMVAIANIDEIITII

SEQ ID NO: 184278 - protein, 317 aa, Unknown
  Bacterial polypetide isolated from the Sargasso Sea
AAEVIMTQLHAGGKFDHNSYKVSGGLHGVGVSVVNALSERLKLTINRDNKKYYIEFKNGDAKISLKQVGKSKTSGTEINFVPSKDIFSSIKFSFSILEKRMRELAFLNKGIKIVLSDLRQKKPKTLEFKFEGGISEFVQFIDEKKESLKNKNENDLFKRPIYIEGLKNNIDVQCSLKWNAGYSEDVLPYTNNIYQKDGGTHLLGFRSALTRVINKYANEQNLLKKNKVSLSGDDVKEGLTSVLSIKIPDPKFSSQTKDKLVSSEVRNIVETIINEKLSIWFDQNPSISKIVLTKIIQAAVARDVARKARENVRRKEL

SEQ ID NO: 184279 - protein, 277 aa, Unknown
  Bacterial polypetide isolated from the Sargasso Sea
VYDALVRMVQDFSMSLPLIEGQGNFGSLDGDPPAAMRYTETRLSKVSQYLVDDINKDTVEFKSNYDETEKEPEILPAQYPNLLVNGAGGIAVGMATSIPPHNLGEIIDGTLALIENREIKIPELMKLIPGPDFPTGGLIIGKDIIKQGYKTGRGSFKIRGEISTEQLKNGKERLIISSVPYQVNKSLLNEKIAELVREKKIEGISDIRDESNREGIRVVIDLRRAVEPETIKRQLYKYTSIESSFGFNTLAIVDKKPKTCNLKDFLDSFLDFRQEVV

SEQ ID NO: 184280 - protein, 203 aa, Unknown
  Bacterial polypetide isolated from the Sargasso Sea
MQKSEVKNNSNYKPIFVHQEMSSSYLSYAMSVIVSRALPDVRDGLKPVHRRIIYAMYKGGYDWGKPFRKSARIVGDVIGKYHPHGDQAVYDALVRLVQDFSMSLPLIEGQGNFGSIDGDPPAAMRYTETKLSKVAQFLTEGLEKNTVDYRNNYDETEREPIVLPSQYPNLLVNGAGGIAVGMATSIPPHNLGEIIDGTIGFIK

SEQ ID NO: 184281 - protein, 236 aa, Unknown
  Bacterial polypetide isolated from the Sargasso Sea
MLKSKNNYQADSIKVLKGLEAVRKRPGMYIGDTDDGTGLHHMVYEVVDNSIDEALAGYCKNIAVKINANGTITVNDDGRGIPVDIHKGEKKSAAEVIMTQLHAGGKFDHDSYKVSGGLHGVGVSVVNALSEKLQLEIFRDGKKHYIEFQNGEAKSPLKVVGKAKNTGTQITFLPSKEIFSSIKFSANILIKRMRELAFLNKGIKIIFTDASQKKEKTSEFKYDGGVLEFVDFLDEK

SEQ ID NO: 184282 - protein, 237 aa, Unknown
  Bacterial polypetide isolated from the Sargasso Sea
GKLADCQEKDPALSDLFLVEGDSAGGSAKQGRDRSFQAILPLKGKIINVQKARLDKVLSSNEIGTLITALGTGIGIDEFSLEKLRYHRVIIMTDADVDGSHIRTLLLTFFYNQMFDLLEKGHIYLALPPLYKIKKGGKTHYAKDEEEKDAILKELRKEATEGSRPPEIQRYKGLGEMNPEQLWETTFDPKHRRLVQITLDEARELVDDIFETLMGDQVQPRREFIDDNALRAENIDF

SEQ ID NO: 184283 - protein, 297 aa, Unknown
  Bacterial polypetide isolated from the Sargasso Sea
KKKSAAEVIMTQLHAGGKFDHDSYKVSGGLHGVGVSVVNALSLSLKLKIERDGNKYLIEFKNGDAKSPLKKIGKSKNSGTEINFIPSKEIFSSTKFSFSILEKRLRELAFLNKGIKIVLNDFSQKKTRSSEFKYDGGILEFVEFLDNKREKLKNKNDNELFKKPIYMEGSKNNIDIQCSIKWNAGYSEDVYPFTNNIYQKDGGTHLLGFRSALTRVINKYANDQNLLKKNKVSLSGDDVKEGLTCVLSIKIPDPKFSSQTKDKLVSSEVRNIVENFINEKLSIWFDQNPSIAKVVLA

SEQ ID NO: 184284 - protein, 94 aa, Unknown
  Bacterial polypetide isolated from the Sargasso Sea
MNSSNYSSESIKVLKGLEAVKKRPGMYIGDTDDGSGLHHMIYEVVDNSIDEALAGFCTEISVFLNPDGTITVEDNGRGIPVDIHKTEGVPAAQL

SEQ ID NO: 184285 - protein, 228 aa, Unknown
  Bacterial polypetide isolated from the Sargasso Sea
EGGGLPGKLADCQSKDPSESELFIVEGDSAGGTAKQGRDRATQAILPLRGKILNVEKSRIDKILANNEVMALITAMGCSITGVEEEDEFELDKARYHKLIIMTDADVDGAHIRTLLLTFLYRHMKGLIDAGYVYVAQPPLYKVSKGKKMSYAYDDVQLERLLSEYGSGSSVQRYKGLGEMNAIQLWDTTMDPTKRTLLQVEIEDAELADKAFVELMGDDVQPRREYIE

SEQ ID NO: 184286 - protein, 281 aa, Unknown
  Bacterial polypetide isolated from the Sargasso Sea
ITDFDFEEVDTRVGETAFLNAGLKITITDERDENRHTSEHLYEGGLSEYVSQLNERREVLHSEVIKIRGDKEIEKGNVEVELALQWSDAFSESIRCYTNIIRNKDGGTHMSGLRTALTSSVNSYAKKKKLLKGDALSGDDVREGLAAVVSVKHPDPSFSSQTKDKLVSSEVTGIVQTIVYDKLGEFFEENPSVAKQIVEKALLASKAREAARKARDLTRRKGVLEGGGLPGKLADCQSRDPSECEVYLVEGDSAGGSAKTGRDRRIQAILPLRGKILNVER

SEQ ID NO: 184287 - protein, 210 aa, Unknown
  Bacterial polypetide isolated from the Sargasso Sea
MTGEIYGADSIKVLRGLDAVRKRPGMYIGDTDDGTGLHHMVFEVVDNAIDEAMGGHCDQIDVSLNGDGSVTVADNGRGIPVDIHAEEGVSAAEVIMTQLHAGGKFDQSTYKVSGGLHGVGVSVVNALSSELNLTVKRDGQIHFMRFHHGESAAPLEVVGDSAGDTGTEVTFTPSAETFTRIEFDYAILEHRLRELAFLNPGIRMSNGRPQ

SEQ ID NO: 184288 - protein, 156 aa, Unknown
  Bacterial polypetide isolated from the Sargasso Sea
EFDVSSLRYHRVVIMTDADVDGAHIRTLLLTFFYRYQRELVEKGFIYIACPPLYKVERGKNHKYCYNENELKDTIDGFGESANYNIQRFKGLGEMMPKQLWDTTMNPQTRMMKRVEIEDALEADRIFNILMGDKVAPRREFIETHSSNLDMATLDI

SEQ ID NO: 184289 - protein, 262 aa, Unknown
  Bacterial polypetide isolated from the Sargasso Sea
IVGDVIGKYHPHGDQAVYDALVRMVQDFSMSLPLIDGQGNFGSIDGDPPAAMRYTETRLSKISQFLTDDIEKNTVEFKSNYDETEKEPSVLPAQYPNLLVNGAGGIAVGMATSIPPHNLGEVIDGTLALINNKEIKIKDLMKFIPGPDFPTGGIIIGKNIIKEGYKTGRGSFKIRGEITVENLKNNRDRLVITSIPYQVNKSALNEKIADLVREKKIEGIRDIRDESNREGIRVAIDLRSSVEPETVKRQLFKYTSIESSFG

SEQ ID NO: 184290 - protein, 271 aa, Unknown
  Bacterial polypetide isolated from the Sargasso Sea
TPFAEFAELNGQKFEWAITWLGGGEDGFFNSYCNTVPTPLGGTHETGFRQAIVRGLRAFGDLSGNRKAADITADDVFANSAIMLSVFLRDPQFQGQTKDKLVSGDATRLTEQAVRDRFDHWLSADATRATFLLEAAIERAEERKRRKKEKEVARKSATRKLRLPGKLADCTANDTDLTELFLVEGDSAGGSAKQARNRKTQAVLPLRGKILNVASATPEKLNANQELSDLALALGVRPGKDFKLDDLRYGRVIIMTDADVDGAHIAALLMT

SEQ ID NO: 184291 - protein, 274 aa, Unknown
  Bacterial polypetide isolated from the Sargasso Sea
VINTNGRYDFEPKFDFDYLCNRIRELAFLNGGLKLSINDERDSKSETFFYKGGINSFVEHLNNGKKVVNSKPIFIKGSKEGTIVEIAIQYNDGYSENIYSYVNNINTIEGGTHLSGFRSALTRSINKYAKDQNLFKNQNIQITGDDTREGLAAVVSIKVPEPKFEGQTKTKLGNSETSGIVESLMNDFLGDFFEKNPSQAKKIVGKSIDAAKAREAAKKARDLTRRKSALDLGSLPGKLADCQEKDPEKSELFIVEGESAGGSAKQGRDRKTQA

SEQ ID NO: 184292 - protein, 146 aa, Unknown
  Bacterial polypetide isolated from the Sargasso Sea
MSKKAYTSDSIKVLKGLEAVQKRPGMYIGDTDDGSGLHQMIYEVVDNAVDEALAGYCKNIVVTLNEDASVTVKDDGRGIPVDIHKTENKSAAEVIMTTLHAGGKFDDDSYKVSGGLHGVGVSVVNALSERLSLTIHKDGYKYQQDY

SEQ ID NO: 184293 - protein, 342 aa, Unknown
  Bacterial polypetide isolated from the Sargasso Sea
QRTGKEEDFAFSGGVKGFVEYINKNKTVLHPTIFFAAGEKDGVAVEVSMQWNDAYNEQVLCFTNNIPQRDGGTHLTGLRAAMTRVINKYIADNEIAKKAKVDTSGDDMREGLTCVLSVKVPEPKFSSQTKDKLVSSEVRLPVEEVVAKALSDFLLETPVDAKIICGKIVEAARAREAARKAREMTRRKGVLDGMGLPGKLADCQEKDPALSELFIVEGDSAGGSAKQGRDRKFQAILPLKGKILNVERARFDKMLSSQEVLTLITAMGTGIGKDDYNLDKLRYHRIIIMTDADVDGSHIRTLLLTFFYRQMPEIIERGHVYIAQPPLLQIKHGKGGALHQRR

SEQ ID NO: 184294 - protein, 273 aa, Unknown
  Bacterial polypetide isolated from the Sargasso Sea
HMVYEVLDNSIDEALAGHCKKIEVSINSNGSITVEDDGRGIPVDFHKEEKKSAAEVIMTQLHAGGKFDHDSYKVSGGLHGVGVSVVNALSQKLELYVERDGKKHFVEFMNGETKTPLKVTGKSKNTGTKINFLPSKDIFSSTKFSFLIIQKRMRELAFLNKGIKIILNDLTQKKTKTQEFKFEGGINEFVEFLDEKRPKLKNKNDNDLFRKPVYIEGIKSNIDVQCSLKWNAGYNEDVYPYTNNIYQKDGGTHLLGFRSALTRVVNKYASEQN

SEQ ID NO: 184295 - protein, 261 aa, Unknown
  Bacterial polypetide isolated from the Sargasso Sea
IVMYDEISSSYLSYAMSVIISRALPDVRDGLKPVHRRILYAMHKGGYDWNKHYRKSSRIVGDVMGKFHPHGDQAIYDALVRMVQDFSMSLPLIDGQGNFGSIDGDRAAAMRYTETRLSKVAQFLIDDIEKNTVNFKSNYDETEKEPEVLPAQFPNLLVNGAGGIAVGMATSIPPHNLGEVINGTLALINNSEIKLNELMKHIPGPDFPTGGVIVGKNIIKEGYKVGRGSFKIRGELKVENLKNGKDRIVITSIPYQVNKSN

SEQ ID NO: 184296 - protein, 228 aa, Unknown
  Bacterial polypetide isolated from the Sargasso Sea
MAKKSQEAKYDSSNIQVLKGLEAVKKRPGMYIGDTDDGSGLHHMVFEVLDNCIDEAMAGYCSDIKVIINKNGSVTIEDNGRGIPVDVHKKEGVSAAQLIMTTLHSGGKFDDNSYKVSGGLHGVGVSVVNALSKKLTLEVHRDGGEYFQEYSDGKPKAKLKKVKKSDKTGTKITFFPSEKIFTSIDFEVDRIYKRIQELSFLNAGVSINVENEKSGKSKKFKNNGGLSS

SEQ ID NO: 184297 - protein, 129 aa, Unknown
  Bacterial polypetide isolated from the Sargasso Sea
MSNKSELKNKLSYGADAIKVLKGLDAVRKRPGMYIGDTDDGSGLHHMVFEVLDNSIDEALAGYCKNICVIINNDNTITVEDDGRGIPVDMHKSEKMSAAEVIMTQLHAGGKFDHDSYKVSGGLHGVGVS

SEQ ID NO: 184298 - protein, 196 aa, Unknown
  Bacterial polypetide isolated from the Sargasso Sea
MKNYLFRFDQNPSVAKIILAKVIQAAMARDVARKARENVRRKGALELSGLPGKLADCQIGKQEGTELFIVEGDSAGGSAKQGRNRANQAVLPLRGKILNTYVEDFNMKKNGNGNGNGSDQRTKALSKMISSNEIVTLINALGLDPKAQEIDLKDLRYGKIIIMTDADVDGSHIRALLLTFFNNKPFNKLIENGHVY

SEQ ID NO: 184299 - protein, 280 aa, Unknown
  Bacterial polypetide isolated from the Sargasso Sea
HLLGFRSALTRVVNKYANENNLLKKNKLAISGDDIKEGLTCVLSTKIPDPKFSSQTKDKLVSSEVRMIVETLVNEKLSIWFDQNPSIAKVILAKVIQAAMARDVARKARENVRRKGALELSGLPGKLADCQIGKQEGTELFIVEGDSAGGSAKQGRNRANQAVLPLRGKILNTYVEDFNAKKNGNGNGNGSDQRTKALSKMISSNEIVTLINALGLDPKAQEIDLKDLRYGKIIIMTDADVDGSHIRALLLTFFNNKPFNKLIENGHVYLAQPPLFKINK

SEQ ID NO: 184300 - protein, 179 aa, Unknown
  Bacterial polypetide isolated from the Sargasso Sea
MSSSYLSYAMSVIISRALPDVRDGLKPVHRRILYAMHKGGYDWSKQFRKSARIVGDVIGKYHPHGDQSVYDALVRMVQDFSMSLPLVDGQGNFGSVDGDPAAAMRYTETKLSKVSQFLIDDIDKETIEFKSNYDETEIEPSVLPAQFPNLLVNGAGGIAVGMATSIPPHNLGEVIDGTL

SEQ ID NO: 184301 - protein, 311 aa, Unknown
  Bacterial polypetide isolated from the Sargasso Sea
GTGLHHMVYEVVDNSIDEALAGHCKKIEISINTDGSITVEDDGRGIPVDFHKEEKKSAAEVIMTQLHAGGKFDHDSYKVSGGLHGVGVSVVNALSQKLELYVERDGKKHFVEFKNGETKTPLKVIGNSKNTGTRINFLPSKDIFSSTKFSYSVIQKRMRELAFLNKGVKIILHDLTQKKIKTSNFKFDGGINEFVEFLDEKRESLKNKNDNHLFKKPIYIEGIKNNIDIQCSLKWNAGYNEDVYPYTNNIYQKDGGTHLLGFRSALTRVVNKYASEQNLLKKSKVLLSGDDVKEGLTCVLSVKIPDPKFSS

SEQ ID NO: 184302 - protein, 270 aa, Unknown
  Bacterial polypetide isolated from the Sargasso Sea
MPTKKKSAASKTTKAPTKAQKKAPKKTDSDSYDSSSITVLKGLEAVKKRPGMYIGDTDDGTGLHHMVYEIVDNSIDEALAGHCDEITVKIIADDCVSVSDNGRGIPTDMHEEGMSAAEVIMTKLHAGGKFDDNSYKVSGGLHGVGVSVVNALSEDLRLTIHRGGKIHEQEYADGAPKGKLKATGKTDKTGTEVTFVPSPTTFSDINFQYDVLETKLRELSYLNAGLKIILIDERSSKKVEFFHKGGLAEFVTFLNTKRTTVNSVFHFVKE

SEQ ID NO: 184303 - protein, 307 aa, Unknown
  Bacterial polypetide isolated from the Sargasso Sea
ISSISLVSEMEKSYLDYAMSVIISRALPDIRDGLKPVHRRILYSMNESGYTYSRPYKKSARIVGDVMGKYHPHGDAAIYDSMVRMSQNFSMSEQLIDGQGNFGSMDGDPPAAMRYTEARLSKITEKLVTDLDKETVAYQSNYDDTTFEPTVLPAQFPNLLVNGASGIAVGMATNIPPHNLTEVINATLHQIENPECSIEDLNNFILGPDFPTGGQIIGLKGIKESYQNGKGGCILRSKTSIEEFKKDREAIIIHEIPYQVNKSRLIEKIAENVKNNIIEGISDIRDESDRNGVRVVIELKRDTDHKI

SEQ ID NO: 184304 - protein, 201 aa, Unknown
  Bacterial polypetide isolated from the Sargasso Sea
MAEPEDPNSPDDENNNEDANPLEEGILPVTISDEMRKSYLDYAMSVIVSRALPDVRDGLKPVHRRILYAMKEGNYHWNRPYRKSARVVGDVMGKYHPHGDNAIYDAMVRMAQSFSMSLKLLDGQGNFGSMDGDPPAAMRYTEVRMDQASTMLIDDIDKNTIDFQDNYDNSTQEPSVLPAKYPNLLVNGAGGIAVGMGTMFH

SEQ ID NO: 184305 - protein, 307 aa, Unknown
  Bacterial polypetide isolated from the Sargasso Sea
KVLGTKINFLPSKKIFSSTKFSFVILQKRMRELAFLNKGIQISLNDLTQKKPKNINFKFDGGILEFVEYLDQNREKLKNKNDNDLFKKPIYIEGLKNNVDIQCSLKWNAGYNEDVYPYTNNIYQKDGGTHLLGFRAALTRVINKYASEQNLLKKSKVSLSGDDVKEGLTCVLSVKIPDPKFSSQTKDKLVSSEVRNIVETIISEKLSIWFDQNPSVSKIILTKIIQAAVARDVARKARENVRRKGALELTGLPGKLADCQNSKQEGTELFIVEGDSAGGSAKQGRNRENQAVLPLRGKILNTFTEIN

SEQ ID NO: 184306 - protein, 209 aa, Unknown
  Bacterial polypetide isolated from the Sargasso Sea
MTNKNTYQADSIKVLKGLEAVRKRPGMYIGDTDDGTGLHHMVYEVVDNSIDEALAGYCKNINVKINYDGTITVNDDGRGIPVDIHKGEKKSAAEVIMTQLHAGGKFDHDSYKVSGGLHGVGVSVVNALSEKLQLEIFRDGKKHYIEFQNGEAKAPLKVVGKAKQTGTQITFLPSKEIFSSIKFSANILIKRMRELAFLNKGIKIIFTDA

SEQ ID NO: 184307 - protein, 295 aa, Unknown
  Bacterial polypetide isolated from the Sargasso Sea
RKARENVRRKGALELSGLPGKLADCQIGKQEGTELFIVEGDSAGGSAKQGRNRANQAVLPLRGKILNTYVEDFNIKKNGNGNGNGNGNGTDQRTKALSKMISSNEIVTLINALGLDPKAQEIDLKDLRYGKIIIMTDADVDGSHIRALLLTFFNNKPFNKLIENGHVYLAQPPLFKINKGSKGIYIKDEKELEDYIVNNSKELKKIKKGSKDYSKKIDEEKSKMNIQRFKGLGEMNPEELWSTTLDPETRNLLQVQYSKDLKKDQSLIHTLMGNDVALRKDFIVSNAINVRNLDI

SEQ ID NO: 184308 - protein, 266 aa, Unknown
  Bacterial polypetide isolated from the Sargasso Sea
MNDINRDHTLNRDIVDEMNESYLNYSMSVIVSRALPDVRDGLKPVHRRILYGMSELGSSWNRPYKKCARIVGEVMGKYHPHGDSSIYDALVRMAQDFSMRYELVDGQGNFGSIDGDNAAAMRYTESRMTKLSAELLKDLEKDTVDWSPNFDETLKEPTVLPTTVPTLLVNGSEGIAVGMATKIPPHNLSEIVDGLIALIDDKTITTESLMEHIKGPDFPTAGMILGVDGLRAAYETGRGKIKMRARAHIENSKNGKDSIVYTEVPY

SEQ ID NO: 184309 - protein, 289 aa, Unknown
  Bacterial polypetide isolated from the Sargasso Sea
TETRLAPIAHKGFLEEIGSDTVNFSNNFDGSQKEPDVLPAQLPFLLLNGSSGIAVGMATNIPPHNLGEIIDGLIALVENQDISDKKLSSIIKGPDFPTGGELLCGKAIEELYATGKGSITIRGVIKKEELNLGKGKHKKNALIITELPYQVSKAGWIEKLAELVNSSKINGISDIRDESDRDGMRIVIELKKDSNTELVISNLYKKTTLQTNFGAIFLALINGKPVQLNLKEYLNYFLRFREETIRKRTNYYLKNTLERLEISEGLSKATKDIKKVIKIIEESKNSAEA

SEQ ID NO: 184310 - protein, 266 aa, Unknown
  Bacterial polypetide isolated from the Sargasso Sea
MHHMVFEVLDNCIDEAMAGHCTDINVVINKNGSVTVKDNGRGIPVDVHKKEGVSAAQLILTTLHSGGKFDDNSYKVSGGLHGVGVSVVNALSKKLILEVHRDGGEYFQEYNEGKPKAKLKKVKKSDKTGTTITFFPSEKIFTSIDFEIERIYKRIQELSFLNAGVSINVEDKKSGKSKKFKNNGGLSSYVTHLKGRKQTVSDIFECSASENEVGVEIALQWTDSYSENVLCYTNNIPQKDGGTHLAGFRGSLTRVLKSFIKKENAK

SEQ ID NO: 184311 - protein, 311 aa, Unknown
  Bacterial polypetide isolated from the Sargasso Sea
KKNKINLSGEDIKEGLTAVLSIKMPDPKFSSQTKDKLVSSEVRNIVENIIGEKVSTWFDQNPSVSKVVLEKITQAAMARDVARKARDSVRRKGTFELSGLPGKLADCQIQKREGTELFIVEGDSAGGSAKQGRVREFQAVLPLRGKILNTFVNGKKNGEDQTTKALSKMMSSSEIVTLINALGTGSKDFNLENLRYDKIVIMTDADVDGSHIRTLLLTFFNNHPFNQLIENGHIYLAQPPLFKVTKANKSVYIKDEKSLEEYILQSSKVDKKIKKGTDDFKKFIQDQKEKLSIQRFKGLGEMNPEELWETT

SEQ ID NO: 184312 - protein, 269 aa, Unknown
  Bacterial polypetide isolated from the Sargasso Sea
MSIVGKVSEAALAREAARKAREMTRRKGVLEIAGLPGKLADCQEKDPTLSEIYIVEGDSAGGSAKQGRNRKNQAILPLKGKIINVEKARIDKVLGSAEVGTLIKALGCGIGREDFDIDNLRYHRIIIMTDADVDGSHIRTLLLTFFYRQMYEIVEKGHIYIALPPLYKITKGKEFVYASDESEKDNAIKKLSKNGTRGLEVQRYKGLGEMNPEQLWTTTMDPTNRRMMRVDIKDVQDANESFEILMGDDVEPRREFIDANALSVKELDI

SEQ ID NO: 184313 - protein, 630 aa, Unknown
  Bacterial polypetide isolated from the Sargasso Sea
MSKKAYDSKAIEVLSGLDPVKKRPGMYTDTSCPNHLIQEVLDNSVDEALSGYCKRIKVNLYKDNSVEVSDNGRGMPVDVHPEHKLTGVELIMCKLHAGAKFSGEDYGFSGGLHGVGVSVVNALSTKLNVKIKRDSQEYEINFSAGDKDNDLKPIGDVGATNSGTSIRFYPDKQYFETLNINKKSLKHLLKAKAVLCPGLQIDYFDEKKNERIKWIFDEGLSDYLDEFSGCNEKLLDETIILSKTSDDQALDVAVNWTEEVSNNLLKETFVNLIPTALGGSHLNGFKSGLLEAIKEFCDYRSLIPKGIKINSDDILANCIFVISSKLKNPQFAGQTKERLDSKDHMSFVSSSTKDSLSIWLNQHTEEGEKIADLAIAAAQKRIKSSTKVDRKKTFKGPALPGKLSDCNCNNIEESELFLVEGDSAGGSAKQARDRRFQAIMPLRGKILNTWDLESADIIKSQEIKDLATAIGSLPGDENVSNLRYGKICILADADSDGLHIATLLCALFLRHYKNLVTSGKIFVSMPPLYRIDAAKEVFYALDENEKESIVKRIKKQNSKIKIDIQRFKGLGEMNPSQLRETVMKPESRRLVQLTLTSSDNANSVFDLLLSKKRAPDRKEWLEKKGNLAEI

SEQ ID NO: 184314 - protein, 323 aa, Unknown
  Bacterial polypetide isolated from the Sargasso Sea
IINDKISMWFDQIPSTIKNVLEKIHQAAIARDVARKARDNIRRKGSFEITGLPGKLADCQISKKEGTELYIVEGDSAGGSAKQGRNREFQAVLPLRGKILNTYVNTNGRNAGKTVENENKALSKMMSSSEIVTLINALGTGSKEFNIENLRYEKIVIMTDADVDGSHIRTLLLTFFNNYPFNKLIENGHLYLAQPPLFKITKNNKSYYMKDEKDLENFIIQHSNTKEKKGKFNSKEMHKIIENEKQKLSIQRFKGLGEMNPEELWQTTLNPDNRNLLKVQYSNGTKEKSKEDQKIISILMGDEVAPRREFITSNALDVANLDI

SEQ ID NO: 184315 - protein, 359 aa, Unknown
  Bacterial polypetide isolated from the Sargasso Sea
GLKPVQRRIIYAMSELGLSAAAKYKKSARTVGDVLGKYHPHGDSACYEAMVLMAQPFSYRYPLVDGQGNWGAADDPKSFAAMRYTEARLSKFSEVLLKELGQGTVDWTPNFDGTLDEPVVLPSRLPHILLNGITGIAVGMATDIPPHNVREVASACCLLLDKPKTELDELLELVHAPDYPTDAEIITPKADIHKIYKTGRGSIKMRAVYSEEQGDIVITALPHQCSGGKVLEQIAAQMNAKKLPMIADLRDESDHENPTRIVIIPRSNRIKAEPLMAHLFATTDLEKNYRVNLNMLGLDGRPQVKDLRSILSEWLIFRRETVRRRLQYRLDKVLARLHILEGLLAAFLNIDEVIEIIRR

SEQ ID NO: 184316 - protein, 528 aa, Unknown
  Bacterial polypetide isolated from the Sargasso Sea
DGQGNFGSIDGDPPAAMRYTETRLAKVSQYLIDDIEKNTVSFKSNYDETELEPNVLPAQYPNLLVNGAGGIAVGMATSIPPHNLGEVIDGTLALIKNKDIKIKELMKFIPGPDFPTGGIIIGKDIIKQGYKIGRGSFKIRGEINVENLKNGKDRLVITSIPYQINKSNLNERIAELVREKKIEGISDIRDESNREGIRVAIDLRRNVEPETVKRQLYKYTSIESSFGFNSLAIVDNKPKTCGLKDFLENFLKFREDVVIKKTKYDLQKAEDRAHILVGLSVSVENIDKVIKIIRSSKNPEDAKNSLLKTKWKINKSSKLIKLVDNKNYKGLYNLSVDQIISILELRLQKLTALGINEIEIELKKLAELIIKYKKIINSKSELLKVISSDLQTIKEKFSFPRRTKIIDAILNYDIEETIHKESVIITITLQGYIKRGALSSVKQQKRGGKGKSGIKTREEDSVVQTLSVNTHTSVLFFSTQGLAYKVKAWKIPEGSSSSKGKSLFNILPLKNHQSISSIMPFPDENIDK

SEQ ID NO: 184317 - protein, 576 aa, Unknown
  Bacterial polypetide isolated from the Sargasso Sea
MYDEISSSYLSYAMSVIISRALPDVRDGLKPVHRRILYAMHKGGYDWNKHFRKSSRIVGDVMGKYHPHGDQAIYDALVRMVQDFSMSLPLIDGQGNFGSIDGDKAAAMRYTETKLSKVTQFLIDDIEKNTVNFKSNYDETEKEPEVLPAQFPNLLVNGAGGIAVGMATSIPPHNLGEVINGTLALINNNEIKISELMKHIPGPDFPTGGVIVGKNIIKEGYKIGRGSFKIRGEVKVENLKNGKDRIVITSIPYQVNKSNLNEKVAELVRDKKIEGISDIRDESNHEGIRVSIDLRRNVEPETIKRQLYKFTPLESSFGFNTLAIVENKPKTCSLKDFLENFLNFRKDVVVKRTKYNLKKAEERAHILIGLSVAVDNLDKVIKIIRSSKSPEEAKKTLVTTKWKINKSKKLILMIENKKNITSYSLSEQQVISILELRLQKLTALGIKEIENEINDLSKMIISYKKIISSKKELLNVISDELKHIRDKYSHPRRTKITDAVLNYDIEETIQKESVIITVTLQGYIKRSLLDKVKQQKRGGKGKSGIKTRDEDSVVQTLSVNTHTPVLFFSHRDWFIK

SEQ ID NO: 184318 - protein, 455 aa, Unknown
  Bacterial polypetide isolated from the Sargasso Sea
KFSSSILDKRIRELAFLNKGISISLKDDTTKKTKEFVHKYDGGIIEFVKHINKKKPILVNKNEKEVFKKPIFVTATKNNVIVECSFEWNAGYSEEVLPFTNNIPQKDGGTHLLGFRSALTRVINKYYGDKNNNKKNKLALSGEDIKEGLTAVLSIKMPDPKFSSQTKDKLVSSEIRNIVEHIIGEKVSTWFDQNPSVAKIVLEKITQAAMARDVARKARDSVRRKGTFELSGLPGKLADCQIQKREGTELFIVEGDSAGGSAKQGRVREYQAVLPLRGKILNTFVNGKKNGEDQSTKALSKMMSSSEIITLINALGTGSKEFNIENLRYDKIVIMTDADVDGSHIRTLLLTFFNNHPFNQLIENGHLYLAQPPLFKITTSNKSIYIKDEKALEDFILKSSKVDRKIKKGTDEFNRFIQDQKEKLSIQRFKGLGEMNPEELWDTTLNPDNRTMLRV

SEQ ID NO: 184319 - protein, 256 aa, Unknown
  Bacterial polypetide isolated from the Sargasso Sea
MIKKNTNNYQADSIKVLKGLEAVRKRPGMYIGDTDDGTGLHHMVYEVVDNSIDEALAGHCKNIEVNINSDGSVTVKDDGRGIPTDIHKEEKKSAAEVIMTQLHAGGKFDHDSYKVSGGLHGVGVSVVNALSENLQLTINRDGKKYYIEFKNGDSVSPLKEKGSSKTSGTEIRFLPSKKIFSFTKFSFSTIQKRLRELAFLNKGIKIVLNDLTLKKIKTLEFKFDGGINEFVEFLDEKREHLKNKKDKDLFKKPTIS

SEQ ID NO: 184320 - protein, 343 aa, Unknown
  Bacterial polypetide isolated from the Sargasso Sea
PKFSSQTKDKLVSSEVRNIVEGIVNEKLSIWFDQNPSISKIILSKIIQAAVARDVAKKARENVRRKGALELTGLPGKLADCQNSKQEGTELFIVEGDSAGGSAKQGRNREFQAVLPLRGKILNTYTEMNGSKKNVNQSDLRTKSLSKMISSNEIVTLINALGLDPKTEEINLEDLRYGKIIIMTDADVDGSHIRALLLTFFNNVPFNKLIEKGHVYLAQPPLFKINKGSKGIYIKDEKDLENYIIKNSKDQKKVKRNSKEFDKIIQLEKSKLNIQRFKGLGEMNPEELWNTTLNPETRNLLQVQYSKNLQKDQNLIQTLMGNDVASRKDFIVDNAINVVNLDI

SEQ ID NO: 184321 - protein, 434 aa, Unknown
  Bacterial polypetide isolated from the Sargasso Sea
MTNKNTYQADSIKVLKGLEAVRKRPGMYIGDTDDGTGLHHMVYEVVDNSIDEALAGYCKNINVKLNSDGTVTINDDGRGIPTDIHKGEKKSAAEVIMTQLHAGGKFDHDSYKVSGGLHGVGVSVVNALSEKLFLEINRDGKKYFIEFRNGEAKAPLKISGKSKQTGTQITFLPSKEVFSSIKFSANILIKRMRELAFLNKGIKITFIDDSQKKEKILEFKYDGGLIEFVDYLDEKREKLQNKNGNDLFRKPIYIEGKKNNVELECSLKWNAGYTEDIFPYTNNIYQKDGGTHLLGFRSALTRIINKYANENNLLKKNKLTISGDDIKEGLTCVLSTKIPDPKFSSQTKDKLVSSEVRMIVETLVNEKLSIWFDQNPSVAKIVLAKVIQAAMARDVARKARENVRRKGAIELSGLPGKLADCQIGKQEGTELFIV

SEQ ID NO: 184322 - protein, 231 aa, Unknown
  Bacterial polypetide isolated from the Sargasso Sea
MYVILDRALPHIGDGLKPVQRRIIYAMSELGLSSAAKYKKSARTVGDVIGKFHPHGDTAAYEAMVLLSQSFSTRYPLIDGQGNWGSIDDPKSFAAMRYTECRLSPYAKSLLEELGQGTVDWASNFDGTLLEPSVLPARLPNLLLNGATGIAVGMATDIPPHNLNEVVNACIKILDEPKVTVEELYKIIPGPDFPTKAEIISTVDELKEIYQSGRGSVRMRSTYAIENGEIV

SEQ ID NO: 184323 - protein, 426 aa, Unknown
  Bacterial polypetide isolated from the Sargasso Sea
MKIKNINFTDALEEKYLSYALSTITHRALPDIRDGLKPVHRRLLFAMFQLRLNSSSGFKKSARIVGDVIGKFHPHGDQSVYEALVRLAQNFSTRYPLVDGQGNFGNIDGDNAAAMRYTEARLTALAELMLKDISEDTIDYINTYDGIDHEPIVLPSAFPNLLANGSSGIAVGMATNIPPHNINELFKALSKLLKNPNYTNSQLLKLIPGPDFPTGGEIIDSDDALKDAYAKGKGTIRLRARWKKEDLGRGQYQIIVYEIPYQVNKARIIEKISDLIDNKKANYLEAIQDESAEDIRIVLIPKNRSFKAEVIFEDLCKNSDLEIRYAINFNAINHKHEPKLFSLKESLRSFIDHRFNVLKRRTKYRLIQTENRLEILKGFLIVYKNLNKVIKIIRTEADPEKKLINIFRINKRQAEAILAMRLRQLK

SEQ ID NO: 184324 - protein, 483 aa, Unknown
  Bacterial polypetide isolated from the Sargasso Sea
MSSSYLSYAMSVIVSRALPDIRDGLKPVHRRILYAMHKGGYDWSKQFRKSARIVGDVIGKYHPHGDQSVYDALVRMVQDFSMSLPLVDGQGNFGSIDGDPAAAMRYTETRLSKVSQFLIDDIDKNTIEFKSNYDETEKEPSVLPAQFPNLLVNGAGGIAVGMATSIPPHNLGEVIDGTLALIENKDITVTQLMKFIPGPDFPTGGVIIGKDMIKQGYKSGRGSFKIRGEISVEQGKNGRERLVITSIPYQVNKSVLNERIAQLVREKKIEGIRDIRDESNREGIRVAIDLRGGVEPETIKRQLYKNTQIESSFGFNTLAIVDGKPETCDLKKFLSNFLSFREDVVIKKTKFDLKKAEERAHILIGLSVSVENLDKIIKVIRSSKTPDDAKKTILKNKWKINKSQKLISLVENKKIKGLYSFSEQQVNAILELRLQKLTALGINEIEAEIKKLSEMISKYKKIISSKKELLKVIGKELIDIKEK

SEQ ID NO: 184325 - protein, 391 aa, Unknown
  Bacterial polypetide isolated from the Sargasso Sea
KTLVFRIYIVEGDSAGGSAKQGRNRKNQAILPLKGKILNVEKARFDKMLSSQEVATLITALGCGIGRDEYNPDKTRYHNIIIMTDADVDGSHIRTLLLTFFFRQMPELIERGYVYIAQPPLFKVKKGKQEQYLKDEAALTQYLTTQALDGTSIYPSQGAPGMSGEPLERLVTQYREVEAIVARLEQRYPTQITNRMLYHPMINNEMLADEGKMKEWVDAFIHELVELENSGVLYSGEPVLDPERKVYLPKITIRKHGIDTHYLFSYDFFQSTDYQRIGKLGAALEGLIEVGGYVQRGDRVKEVGSFIEALDWTIGEAKRGLYIQRYKGLGEMNPEQLWETTMDPESRRMLQVTIDDAVGADQLFTCLMGDQVEPRRDFIEANALNVANLDV

SEQ ID NO: 184326 - protein, 173 aa, Unknown
  Bacterial polypetide isolated from the Sargasso Sea
MSDILDPDNSGLNEDNDRIIQTDLRNEMSRSYLEYAMSVIVGRALPDARDGLKPVHRRILYAMYELGLTSGRPYRKCARVVGEVLGKYHPHGDTAVYDALVRMAQDFSMRMPLIDGHGNFGSVDNDPPAAMRYTESRLQSLTDESLLEDIESETVDFADNFDGSQQEPTVLPA

SEQ ID NO: 184327 - protein, 336 aa, Unknown
  Bacterial polypetide isolated from the Sargasso Sea
MKKNSNYQADSIKVLKGLEAVRKRPGMYIGDTDDGTGLHHMVYEVVDNSIDEALAGYCKNIDIHMNMDGSVTVKDDGRGIPIDIHKGEKKSAAEVIMTQLHAGGKFDHDSYKVSGGLHGVGVSVVNALSEKLELTIERDGNKYFIEFENGESIKPLKLVGKSKNKGTQIKFLPSKKIFSSVKFSFNIIQKRMRELAFLNKGIKISINDLTLKKVKNIEFKYEGGILEFVEFLDKDRTKLKNKNENDLFKKPIFMEGKRESLEIECSLKWNAGYSEDIYPFTNNIYQKDGGTHLLGFRSALTRVINKYAAEQNLLKKNKLSISGDDIKEGLTCVLSI

SEQ ID NO: 184328 - protein, 208 aa, Unknown
  Bacterial polypetide isolated from the Sargasso Sea
MEKNEIPKINNNIKPISMYDEMSSSYLSYAMSVIVSRALPDIRDGLKPVHRRIIYAMHKGGFDWSKQFRKSARIVGDVIGKYHPHGDQAVYDALVRMVQEFSMSLPLVDGQGNFGSIDGDPPAAMRYTETKLAKVSQFLIDDIEKNTVSFKSNYDETEQEPIVLPAQYPNLLVNGAGGIAVGMATSIPPHNLGEVVDGTLALIKNKEY

SEQ ID NO: 184329 - protein, 492 aa, Unknown
  Bacterial polypetide isolated from the Sargasso Sea
GGVCEFVKYLDKSRTALIENPIFIAGERDGVSLEIAMWWNDGYHENVFPFTNNIPQRDGGTHIAGFRGALTRSLNMYASSAGISKKEKISFSGEDSREGLTCVLSLKVPDPKFSSQTKDKLVSSEVRPVVESLMNEKLSEWFEEHPTEGKIILSKVVEAALAREAARKARELTRKKTAMDIANLPGKLADCQEKDPTKTELFIVEGDSAGGSAKQGRSRSNQAVLPLRGKILNVERARADRMLSSQEIGTLITALGTGIGSDEFNIDKLRYHKIIIMTDADVDGAHIRTLLLTFFFRQMRELIESGHLYIAQPPLYKVTRGKSEVYLKDEFALQDYLIHMGMEGATLKLSDGSQIAGKDLSRIVSEAKKVMAILKSFPARYSKFVLEQAALSGVLVDGLFKSKPENVIEKLTNRLNYSAEEFEKGWHGTINDNGGLRLTRLVRGVEEVRDIDSSVLNSSEARNLGKMFESLNEIYETPATLIWKTKERSVKS

SEQ ID NO: 184330 - protein, 282 aa, Unknown
  Bacterial polypetide isolated from the Sargasso Sea
MTKNNTNTYQADSIKVLKGLEAVRKRPGMYIGDTDDGTGLHHMVYEVVDNSIDEALAGHCKKIEVSINSDGSITVEDDGRGIPVDFHKEEKKSAAEVIMTQLHAGGKFDHDSYKVSGGLHGVGVSVVNALSHKLELHVERDGKKHFVEFVNGETKIPLKVTGKSKNTGTKINFLPSKDIFSSTKFSFSIIQKRMRELAFLNKGIKIIINDLTQKKIKTSEFKFEGGINEFVEFLDEKREKLKNKNDNDLFRKPIYIEGIKSNIDVQCSLKWNAGYNEDVFPL

SEQ ID NO: 184331 - protein, 495 aa, Unknown
  Bacterial polypetide isolated from the Sargasso Sea
MHQEMQRSYLEYAMSVIVGRALPDARDGLKPVQRRILYAMQELGLTPDRPYRKCARVVGDVLGKYHPHGDQAVYDALVRLVQTFASRHPLLDGHGNFGSVDDDPPAAMRYTETRLAPIAHQALLEEIGDDTVDFAANFDGSQQEPTVLPAQLPFLLLNGCSGIAVGMATSIPPHNLGEVVDGLVALIRQPELSDSKLLELIPGPDFPTGGEVLLSSGLRDTYLVGRGSIPMRGIAHIEEVQPGKGRHKRNAVVVTELPYQLSKAGWIEKLAESVNDGKIGGIADIRDESDREGMRVVVELRRDTDPAKVLADLQRRTALQSNFGAILLALVDGQPRQLSLRQLLQTFLDYRELTLIRRTSHALRKTEDRLEVVDGLITALNNLQAVIMMIQEARDAASARASLMVRLDLTERQADAVLAMPLRRLTGLEQESLRQELEELQAERERLRLLLDNRDQLLDAMVQELKGLKKRFSTPRRTRLVEGGDALMAERAASQ

SEQ ID NO: 184332 - protein, 794 aa, Unknown
  Bacterial polypetide isolated from the Sargasso Sea
MAESAPSPAEDPSEAGYSSTDLKHLSDREHVRERFGMYIGDNTARGLHHLVYEVVDNSIDECMAEYAYRVSVTVNVDGSVTVEDDGRGIPTGIHEQLSEEMDREVSTLEGVMTVLKFGGKFEKGAYQTSGGLHGVGVTVVNFLSEWCEVEVARDGHLWQQEYQRGEPTGPVRKMGTATSTGTKTTFKPDPQIFPQTKFSWDILARRLQELAFLNSGVRIVFTDASSGQTEEYHYERGVEEFVEWLNRSSDAVHPDVICLKGETEGVSWDIALQYTGDFTENVHSYVNNISTNEGGTHVSGFRSALTRSLNSYGKKTGIYKDLVPTGDDVREGITAVVSVRVAEPQFEGQTKTKLGNSEVESIITSAVGEFLGKYLEEHPKSAKAIVQKGVLAAEARTAAQKAKALLRERKGALSGGGLPGKLRDCTSKDVDKCELYLVEGDSAGGSAEGGRLREYQAILPLRGKIINAYKSREDKVLANEEVRSVISAIGAGIGPEADLTKRRYDKVVIMTDADVDGSHIRTLLLTFFYRQMYQLVVSGHVYVAQPPLFRVRNKKHVYYVQTEEEMKQQLLDQGLGEGVFLPGDGRELAGEEMQKLCRTLAGLEDALVALERRGISLRDHADRRESETKKLPMYHVFFGAEEHWFTSRDQLESFVESKEKITGGELEAGKADENKPGGGGAANPESAEHQLIVIDLHEVRSINAGLAELESMGFGIESLMPEDRTGTEEPRYLLRRGENKIGLDDLRGLLTAVRRAGEKGLAITRFKGLGEMNAEELRETTLDPSNRTLLRVSM

SEQ ID NO: 184333 - protein, 473 aa, Unknown
  Bacterial polypetide isolated from the Sargasso Sea
RALPDVRDGLKPVHRRVLFAMKELGNDWNKAYKKSARVVGDVIGKYHPHGDSAVYDTIVRMAQPFSLRYMLVDGQGNFGSIDGDSAAAMRYTEVRMARIAHELLADLDKETVDYVPNYDGTEQIPAVMPTKVPNLLINGSSGIAVGMATNIPPHNLTEVIDGCLALIANPDIELHELMQYIPGPDFPTAAIINGRKGIEEAYRTGRGKVYIRAKTEIETDEKTGREAIIVNEIPYQVNKARLIEKIAELVKEKRIEGISALRDESDKDGMRIVIELKRGESSDVMLNQLYANTQMQTVFGINMVALDQGQPKLLSLKEMLQCFVLHRREVVTRRTVYDLRKARDRAHILEGLAIALANIDDIIELIKTSPSPAEAKLRLVDRGWQLGDVSAMLERAGQDAARPEWLEAHFGIRDGKYFLTEQQAQAILDLRLHKLTGLEHEKILDEYKQLLELIAELLHILASPERLMEVICE

SEQ ID NO: 184334 - protein, 415 aa, Unknown
  Bacterial polypetide isolated from the Sargasso Sea
MSDFAKEILPVNIEDELKQSYLSYAMSVIHGRALPDVRDGLKPVHRRILYAMHDLKNNYNKPYKKSARVVGDVIGKYHPHGDSAAYDAIVRMAQDFSMRYTLIEGQGNFGSIDGDPPAAMRYTEVRMQKISDEILADLEKETVSFSENYDGSEQMPDVMPTKIPNLLINGSSGIAVGMATNVPPHNLTEVINGSLKLLENPKLSIDQIIDSISGPDFPTGGTIDGKMGIYEAYKTGRGIIYVRSKSKVEESKNGKKSLVIYEIPFMVNKARTLEKIAELVKEKKLDGISEIRDESDKDGLRIVIDVKKGESVEVLENNLFAQTQLEQSFGINFTVLVDGQPKVLNLKEILQEFLKHRKDVVLKRTKFELRKAKERGHIVEGLMVAIANIDEIIKIIKKSKDPKIAAQELVKRNES

SEQ ID NO: 184335 - protein, 676 aa, Unknown
  Bacterial polypetide isolated from the Sargasso Sea
MSDILDSGNSGLSEDKDRIIQTDLRNEMSRSYLEYAMSVIVGRALPDARDGLKPVHRRILYAMYELGLTSSRPYRKCARVVGEVLGKYHPHGDTAVYDALVRMAQDFSMRMPLIDGHGNFGSVDNDPPAAMRYTESRLKSLTDESLLEDIESETVDFSDNFDGSQQEPTVLPARIPQLLLNGSSGIAVGMATNIPPHNLGELINGLRSIIKNPSIEDRELFELIKGPDFPTGGQILGREGIRETFKTGRGSITMRGVANIEQIKSAGRAEKDAVIITELPFQTNKAGLIERIADMVNEKKLEGISDIRDESDRDGMRIVIELKRDAYPQVVLNNLFKLTPLQNNFSANILALVKGEPTTLSLRKMLDVFLDFRVETIRRRTGFLLKKAEERDHIVKGLLLALGSLDEIITLIRSAKDSNSAREKLQTDHELSSNQADAILQMQLRRLTALEADKIKAEHNELTQKIEQYQQILNSKERIFEIILEELNKIDERFSSPRKTEILDLGGGLDDIDLIANERSVVLLTEAGYLKRMPVNEFESTSRGSRGKAGTKTQEDDDVKLFISCNDHDTLLLFSDRGVAYALPAYRVPMSSRTAKGTPSVQLLPIPREEKITSLVAVDSFVEDCYLLMLTKAGFIKRTALSAFSKIRSNGLIAINLEDGDALTWVRLSKEGDSVL

SEQ ID NO: 184336 - protein, 477 aa, Unknown
  Bacterial polypetide isolated from the Sargasso Sea
MSKKYEAADIEVLSGLEPVRRRPGMYTDTSRPNHLAHEVIDNSVDEALAGHCKKISVTLYKDGSLEVVDDGRGMPVDTHPKEKIPGVELILTRLHAGGKFNKDNYQYSGGLHGVGVSVVNALSKNLEVWVRRDGTEQNMSFAGGKKQGDLEEVGKVGKANTGTTIRFWPDPQYFDSSNISASKLQHALKAKAVLCPGLEVKLKIESTGEKITWMYTGGLEQYLAETIGQTQHIPEVPFSGGFKSDNETVDWALVWLQEEGSNLSESYVNLIPTAQGGTHVNGLRTGLANAIREFCEFRSLLPRGVTLTPEDVWDNVNYVLSVKLEDPQFSGQTKERLSSRESAAFVTGVIKDEFSLWLNQHPETGDLIAQLAIERAQKRIKSAKKVVRKKVVSGPSLPGKLADCTSQEPELCELFLVEGDSAGGSAKQARDRITQAIMPLRGKILNTWEVETTEILASQEVHDISVAIGVDPVNQKI

SEQ ID NO: 184337 - protein, 527 aa, Unknown
  Bacterial polypetide isolated from the Sargasso Sea
MANKNTYQADSIKVLKGLEAVRKRPGMYIGDTDDGTGLHHMVYEVVDNSIDEALAGHCKNINVIINPDGTVTVSDDGRGIPVDIHKTEKKSAAEVIMTQLHAGGKFDHDSYKVSGGLHGVGVSVVNALSEKLLLEINRDNKKYFVEFKNGEAKSALKAIGKSKQSGTKITFLPSTEIFSSIKFSTSILIKRMRELAFLNKGIKIIFIDATLKKEKISEFKFDGGVTEFVDFLDEKREKLQNKNGNDLFRKPIYIEGKKNNIEIECSLKWNAGYGEEIFPYTNNIYQKDGGTHLLGFRSALTRVVNKYANEHNLLKKNKLAISGDDIKEGLTCVLSTKIPDPKFSSQTKDKLVSSEVRMIVETVVNEKLSTWFDQNPTVTKIILAKIIQAAMARDVARKARENVRRKGALELSGLPGKLADCQIGKQEGTELFIVEGDSAGGSAKQGRNRSNQAVLPLRGKILNTYVEDLTVKKNGNGNGSDKRTKALSKMISSNEIVTLINALGLDPKEEEIDLKDLRYGKIIIMTD

SEQ ID NO: 184338 - protein, 418 aa, Unknown
  Bacterial polypetide isolated from the Sargasso Sea
MSSSYLSYAMSVIVSRALPDVRDGLKPVHRRILYAMYKGGYDWSKQFRKSARIVGDVIGKYHPHGDQSVYDALVRMVQDFSMSLPLIQGQGNFGSIDGDPAAAMRYTETRLSKVSQYLIDDIEKNTISFKSNYDETEKEPSVLPAQFPNLLVNGAGGIAVGMATSIPPHNLGEIIDGTLALIDNKDIKIKELIKHIPGPDFPTGGVIIGKDIIKQGYNNGRGSFKIRGEISIEQQKNGRERLVITSIPYQVNKSILNERIAQLVREKKIEGIRDIRDESNREGIRVAIDLRNGVEPETIKRQLYKNTQIESSFGFNTLAIVEGKPQTCTLKDFLSNFLTFREDVVIKKTKFDLQKAEERAHILIGLSVSVENLDKIIKIIRSSKTPDDAKISILKTKWKINKSQKLISLVEGKKGKNL

SEQ ID NO: 184339 - protein, 580 aa, Unknown
  Bacterial polypetide isolated from the Sargasso Sea
LAGHCDRILVTLGEDGSASISDNGRGIPTDVHPRTGKSALETVLTVLHAGGKFGAGGYKVSGGLHGVGVSVVNALSEWVQVTVRRQGQVHRQRFERGAAIGSLASEDQPASETGETGTTVCFKPDIEIFTGGIVFDYATLSARLRELAYLNGGVRIVFRDERESARNEAGEAHEEIYFYEGGIKEYVAYMNKEKDALHPDIIYVNSEKDGVQVEAALQWCSDAYSDSILGFANNIRTVDGGTHIEGLKTVLTRTLNAFAKKLGKRKESDSNLAGENIREGLTAVLSVKVPEPEFEGQTKTKLGNTEVRGIVDNLVGEGLSQFLEFNPSVIGLILEKAIQAFNAAEAARRARELVRRKSVLESSTLPGKLADCSSRDPSESEIYIVEGDSAGGSAKQGRDRRFQAILPLRGKILNIEKTDDAKIYKNTEIQALITALGLGIKGEDFDVKNLRYHRVVIMTDADVDGAHIRTLLLTFFYRYQKALVEGGYIYIACPPLYKVERGKNHTYCYNEGDLQKTLQGFGEKANYTIQRFKGLGEMMPKQLWETTMDPTTRTMKRVEIEDALEADRIFTILMGDKVAP

SEQ ID NO: 184340 - protein, 805 aa, Unknown
  Bacterial polypetide isolated from the Sargasso Sea
MSENSYDSSSIKVLKGLDAVRKRPGMYIGDTDDGTGLHHMVFEVVDNSIDEALAGHCTDITITIHVDGSVSVKDDGRGIPVSIHEEEGVSAAEVIMTVLHAGGKFDDNSYKVSGGLHGVGVSVVNALSKKLQLTIRRDGKVHEQFYTHGVPDAPIKEIGDATKTGTEIRFWPSEQTFSDVEFHFEILAKRVRELSFLNSGVGIRLVDERDNKNEFFKYEGGISAFVDYLNRNKTPVNKDVFHFMQERDDGITVEVAMQWNDGYQENIFCFTNNIPQRDGGTHLAGFRSALTRNLNNYMENEGYNKKGKTNATGDDAREGLTAVISVKVPDPKFSSQTKDKLVSSEVKAAVEQTMGEKLNDYLLENPADAKLIVGKIVDAARAREAARKAREMTRRKGALDLGGLPGKLADCQEKDPGLSEIYIVEGDSAGGSAKQGRNRKNQAILPLKGKILNVEKARFDKMLSSQEVATLITALGCGIGRDEYNPDKTRYHNIIIMTDADVDGSHIRTLLLTFFFRQMPELIERGYVYIAQPPLFKVKKGKQEQYLKDEAALTQYLTTQALDGTSIYPSQGAPGMSGEPLERLVTQYREVEAIVARLEQRYPTHITNRMLYHPMISNEMLADEAKMKEWIDAFIHELVELENSGVLYSGEPVLDPERKVYLPKITIRKHGIDTHYLFSYDFFQSMDYQRIAKLGAALEGLIEAGGYVQRGDRVKEVGSFIEALDWTISEAKRGLYIQRYKGLGEMNPEQLWETTMDPESRRMLQVTIDDAVGADQLFTCLMGDQVEPRREFIEANALNVANLDV

SEQ ID NO: 184341 - protein, 205 aa, Unknown
  Bacterial polypetide isolated from the Sargasso Sea
QAAQARDVARKARETVRRKGALELTGLPGKLADCQNSSQEETELFIVEGDSAGGSAKQGRNREYQAVLPLRGKILNTYVDTNGGKKRGENEIRTKTLSKMISSNEIMTLINALGLDPKDEEIELKNLRYGKVIIMTDADVDGSHIRALLLTFFNNKPFNKLIEKGHIYLAQPPLFKINKNGKITYIKMRRNLKTLLKRIQRNLKK

SEQ ID NO: 184342 - protein, 363 aa, Unknown
  Bacterial polypetide isolated from the Sargasso Sea
MSDIVDSENSGLSENNDRIIQTDLRNEMSRSYLEYAMSVIVGRALPDARDGLKPVHRRILYAMYELGLTSGRPYRKCARVVGEVLGKYHPHGDTAVYDALVRMAQDFSMRMPLIDGHGNFGSVDNDPPAAMRYTESRLQSLTDESLLEDIESETVDFSDNFDGSQQEPNVLPARIPQLLLNGSSGIAVGMATNIPPHNLGELIDGLKAIIKNPSTEDKELFELIKGPDFPTGGQILGRDGIRETFKSGKGSITMRGVADIEQIKSPGRAEKDAVIITELPFQTNKAALIERIADLVNEKRLDGISDIRDESDRDGMRIVIELKRDAYPQVVLNNLFKITPLQNNFSANILALVNGEPTTLLSE

SEQ ID NO: 184343 - protein, 685 aa, Unknown
  Bacterial polypetide isolated from the Sargasso Sea
MIKKNTNNYQADSIKVLKGLEAVRKRPGMYIGDTDDGTGLHHMVYEVVDNSIDEALAGHCKNIEVNINSDGSVTVKDDGRGIPTDIHKEEKKSAAEVIMTQLHAGGKFDHDSYKVSGGLHGVGVSVVNALSENLQLTINRDGKKYYIEFKNGDSVSPLKEKGSSKTSGTEIRFLPSKKIFSFTKFSFSTIQKRLRELAFLNKGIKIVLNDLTLKKIKTLEFKFDGGINEFVEFLDEKREHLKNKNDKDLFKKPIYLEGQKNNIDIQCSLKWNSGYSEDVYPYTNNIYQKDGGTHLLGFRSALTRVINKYATEQNLQKKNKVALSGDDVKEGLTCVLSVKIPDPKFSSQTKDKLVSSEVRNIVETIVNEKLSIWFDQNPSISKIILTKIIQAAVARDVARKARENVRRKGALELTGLPGKLADCQSSKQEGTELFIVEGDSAGGSAKQGRNRENQAVLPLRGKILNTYVDLNDSKKNGSSSELRTKTLSKMISSNEIVTLINALGLDPKAEEIDMKDLRYGKIIIMTDADVDGSHIRALLLTFFNNAPFNKLIENGNIYLAQPPLFKINKGTKGIYIKDDNELENYILKNTKSLKKYKKGSKEFNNFIESEKSHLSIQRFKGLGEMNPDELWNTTLNPETRNLLQVQYSKDIKKDQEIIHTLMGNDVSSRRDFIVSNAINVLNLDI

SEQ ID NO: 184344 - protein, 438 aa, Unknown
  Bacterial polypetide isolated from the Sargasso Sea
ILKKPIYLSGEKNGVKVECSLEWNAGFSEEVLAFTNNIHQKDGGTHLLGFRSALTRIINKNVSEKNLNKKNKLSIGGEDIKEGLTAVLSIKMPDPKFSSQTKDKLVSSEIRMVVETIVSEKLSTWFDQNPSIVRVVLDKILQAAIARDVARKARDSVRRKGSLELSGLPGKLADCQISSMEGTELFIVEGDSAGGSAKQGRKREFQAVLPLRGKILNTYIDESKRKINGGNGAIENKTLSRMMSSNEIVTLINALGTGSKDFNLENLRYEKIIIMTDADVDGSHIRTLLLTFFNNHPFNELIEKGHLYLARPPLFKITKGTKSTYIKDEKDLEKYILKNSENGVKKFKKVELEEFLNKEKQNLNIQRFKGLGEMNPEELWQTTLNPENRTLLRVEYSKGTKIKSKDDQNIIKILMGDEVAPRKDFITEKALEVKNLDI

SEQ ID NO: 184345 - protein, 839 aa, Unknown
  Bacterial polypetide isolated from the Sargasso Sea
MSSFYLSYAMSVIVSRALPDVRDGLKPVHRRILYAMYKGGYDWSKQFRKSARIVGDVIGKYHPHGDQSVYDALVRMVQDFSMSLPLVDGQGNFGSIDGDPAAAMRYTETRLSKVSQFLIDDIEKNTIDFKSNYDETEKEPSVLPAQFPNLLVNGAGGIAVGMATSIPPHNLGEIINGTLALIDNKDIKIKDLMKHIPGPDFPTGGVIIGKDIIKQGYNKGRGSFKIRGEISNETLKNGRDRLVINSIPYQVNKSVLNERIAQLVREKKIEGIRDIRDESNREGIRVSIDLRTGVEPETVKRQLYKNTQIESSFGFNTLAIVDGKPKTCNLKEFLENFLKFREDVVLKKTKFDLNKAEDRAHILIGLSVSVENLDKVIKIIRGSKTPDDAKKSLLNTKWKINKSKKMVSLIETKNSKGLYNLSVVQVEAILELRLQKLTALGINEIEVEIKKLSELISSLKKIISSKKELLKVISNELKEIKEKYATPRRTKIIDAVLNYDIEETIQKETVLITVTLQGYIKRGSLKTVKIQKRGGKGKTGITTRNEDSVVQTLSVNTHTSVLFFSTEGLVYKVKAWKIPEGSASSKGKSLFNILPLKNHQSISSIMPFPESDEDSSKYHIVFATSQGKVRKNSLEDFASINTSGKIAMKLDTNDKIIGVKICKDDQDIILSTKFGKCIRFESKKLRIFKGRSSKGIKGIELASNDEIVSLSIIDNNKLKKNGKNTKDDKSELAAKQKFILSISENGFGKKTSHYDYRTTNRGGKGIIGIINSPRNGNIASSFPVYEGDEIMISTNKGRVIRLAVKEIRTAGRNTQGVRIIKLSGDEKVVSAIKIDDNLI

SEQ ID NO: 184346 - protein, 302 aa, Unknown
  Bacterial polypetide isolated from the Sargasso Sea
RKITQAAVARDVARKARDNIRRKGNFEITGLPGKLADCQISKKEGTELYIVEGDSAGGSAKQGRNREFQAVLPLRGKILNTYINTNGRNAGKTIENQTKALSKMMSSSEIVTLINALGTGSKDFNIENLRYEKIVIMTDADVDGSHIRTLLLTFFNNHPFNQLIENGHLYLAQPPLFKVTKSNKSHYMKDEKDLENFIIKNSSFKEKKGKINSKELSKIIEQEKQKISIQRFKGLGEMNPEELWQTTLNPDNRNLLKVQYSNGTKEKSKEDQKIISILMGDEVAPRREFITSNALDVANLDI

SEQ ID NO: 184347 - protein, 225 aa, Unknown
  Bacterial polypetide isolated from the Sargasso Sea
MTKNNINTYQADSIKVLKGLEAVRKRPGMYIGDTDDGTGLHHMVYEVVDNSIDEALAGHCKKIEVSINSDGSITVEDDGRGIPVDLHKEEKKSAAEVIMTQLHAGGKFDHESYKVSGGLHGVGVSVVNALSEKLELHVERDGKKHFVEFINGETKIPLKVTGKSKNTGTKIIFLPSKDIFSSTKFSFSIIQKRMRELAFLNKGIKIILNDLSQKKVKTLEFKFEG

SEQ ID NO: 184348 - protein, 527 aa, Unknown
  Bacterial polypetide isolated from the Sargasso Sea
MSSSYLSYAMSVIVSRALPDVRDGLKPVHRRILFAMYKGGYDWSKQFRKSARIVGDVIGKYHPHGDQSVYDALVRMVQDFSMSLPLVQGQGNFGSIDGDPAAAMRYTETRLSKVSQYLIDDIEKNTISFKSNYDETEKEPSVLPAQFPNLLVNGAGGIAVGMATSIPPHNLGEIIDGTLALIQNKDIKIKELMKYIPGPDFPTGGIIIGKDIIKQGYNNGRGSFKIRGEISIEQQKNGRERLVITSIPYQVNKAVLNERIAQLVREKKIEGIKDIRDESNREGIRVAVDLRNGIEPETIKRQLYKNTQIESSFGFNTLAIVDGKPKTCTLKEFLSNFLTFREDVVIKKTKHDLQKAEERAHILIGLSVSVENLDKIIKLIRSSKTPDDAKNLILKTKWKINKTQKLISLVEGKKPKNVYSLSEPQVIAILELRLQKLTALGINEIEVEIKKLAELISKYRKIISSKKELLKVISEELKNIKEKFAVPRRTKIIDAVLNYDIEETIQKQSVIITVTLQGYIKRGSLDG

SEQ ID NO: 184349 - protein, 307 aa, Unknown
  Bacterial polypetide isolated from the Sargasso Sea
CRDGLKPVHRRILYAMNESGYNYNKPFRKSARIVGDVMGKYHPHGDGAIYQSMVRMAQDFSMRLELIDGQGNFGSLDGDPPAAMRYTEARLAKVAEKIVADLEKETITFQPNYDDSTLEPSVLPAQYPNLLVNGASGIAVGMATNIAPHNLGEVIEATLHLIENPNAELVDLTKYILGPDFPTGGQIIGKKGIIDAFQTGKGGVVLRSKTSIENFKKDREAIIIHEIPYQVNKSKLIERIAETAKNNIIEGISDLRDESDRNGVRVVVELKKDVDAYIILNQLYKNTLLQTTFNSNMLALIKVSLNK

SEQ ID NO: 184350 - protein, 421 aa, Unknown
  Bacterial polypetide isolated from the Sargasso Sea
MSKNNYGADKISVLKGLEAVRKRPAMYIGDVGKRGYHHLVSEVVDNSIDEALAGFCTSIIVTIKNDGFISIEDNGRGIPVEIHKTEGKPALEVVMTVLHAGGKFDKNTYKVSGGLHGVGVSVVNALSEILIAEVHRDGFYYKQEYKIGEPTTEVEKIGKSDKTGTIISFKPDQSVFSHKGFEEEIIKGRLKELAYLNKNLSIKLINEPEETETEYCFPGGLSDFVKYLDGNEDLIHDEVISVTREDIEVPVDLALRYSTNYNSNIFSFVNNINTIEGGTHLSGFRSALTRALNSYANKNDLIKTKKNEKFSLSGDDFREGLTVVISVKVQEPQFEGQTKTKLGNGEVKGMVDNVVYDGIQAFLEQNPKVGKRIIEKAAEAARARIAAKKARELVRKKSGLGSTTLPGKLADCSNKDPLQCE

SEQ ID NO: 184351 - protein, 479 aa, Unknown
  Bacterial polypetide isolated from the Sargasso Sea
MAKKSYDSKAIEVLSGLDPVRKRPGMYTDTSNPNHLIQEVLDNSIDEALSNFCSVIQISILKNGFIEISDDGRGMPVDIHPEHKVSGVELIMCKLHAGAKFSGEDYNFSGGLHGVGVSVVNALSENLEVRIKRDSKEYKISFSNGEKKDDLEEIGQVGPRNTGTSVKFIPNPIYFETIEVQLKELKHLLKAKAVLCPGLRIKFFYEKKNEREDWIYEKGLQSYLKESVDENDLILNESILDSKKSESQEIQFAVNWSNKNIKNKISETYVNLIPTSQGGSHLNGFKSGLLDALKEFCDYRSLLPKGLKINADDVISHAIFVVSSKLQNPQFSGQTKERLDSKDHALFVANSTKDILSIWLNTHTEEGEKIAELAIDSAQTRAKVSNIVQRKKTFKGPALPGKLSDCNSEDLNETELFLVEGDSAGGSAKQARERSFQAIMPLRGKILNTWDLESSEIIKSQEIKNLSTAIGVLPGTSDV

SEQ ID NO: 184352 - protein, 661 aa, Unknown
  Bacterial polypetide isolated from the Sargasso Sea
MSENNQDSTKKNEKINSSIERVEIEDEMKKSYLDYAMSVIVSRALPDIRDGLKPVHRRILYSMYDGNYDWNKPYRKSARIVGEVMGKFHPHGDSAIYESMVRMAQNFSMSLKLLDGQGNFGSMDGDPPAAMRYTEIRLGKVASTLLDDIDKDTVNFIENYDNSLKEPSVLPAKYPNLLVNGAGGIAVGMATNIPPHNLGEIIDATILLLKNPKTEDSEIKKCILGPDFPTGGIIIGNSGIQSSYITGRGSIIIRGSTEIETNAKEKSSIIINEIPYQVNKSRLVEQIADCVRAKKIEGITDLRDESDKDGVRIVVELKRDATAEVVLNQLHKFTSLQTSFGTNILALKNGMPTQFGIREILETFIDYRIEVIIKRTSFDLNKAREKEHILIGLAIAIENIDKIIEIIRSSKDSSEAKENLVKNKWQSKNLVSLLKKHKDDRLLNKIEGAMYLSVEQAKAILELRLQRLTGLERNKVETDLLEISKKIAELLKILSSDKLIRKIIIEELSDIKSNYAVDRRTKIFENYEEKNIDDLIEKEDVVLTLTNSGYVKIVPVDFYRSQKRGGKGRSGMTTKEDDFVEKVLTVNSHDIVLFFTNKGTVHQIKVYKLPKGSPQSKGRPLINVIPLTENELTTAMLILPNEETDKTLIFVTKFGNVRRNK

SEQ ID NO: 184353 - protein, 272 aa, Unknown
  Bacterial polypetide isolated from the Sargasso Sea
MEKSSIENKSFKPIFVQDEMSSSYLSYAMSVIVSRALPDVRDGLKPVHRRIIYAMYKGGYDWSKPFRKSARIVGDVIGKYHPHGDQSVYDALVRMVQDFSMSLPLISGQGNFGSIDGDPPAAMRYTETKLGRIAQFLTEDLEKNTVNYRNNYDETEKEPEVLPSQYPNILVNGAGGIAVGMATSIPPHNLSEIINATVAYIGDKDITIGQLMKHVPGPDFPTGGVIIGKDILKQGYNKGRGSFKIRGEIDLEEKKAGRECLIIKSIPYQVNK

SEQ ID NO: 184354 - protein, 422 aa, Unknown
  Bacterial polypetide isolated from the Sargasso Sea
MYQGGIKEYVEYMNAEKDSIHPEIIYVDSQKENVYVEAALQWCSDVYSDNILGFANNIRTIDGGTHIEGLKTVLTRTLNNLAKKRGKRKDIEKNLAGENIREGLTVVLSVKVPDPEFEGQTKTKLGNTEVRGIVDSLIGEALTKYMEFNPGILDLILEKAIQSFNASEAARRARELVRRKSVLESSTLPGKLADCSSRDPSESEIYIVEGDSAGGSAKQGRDRNFQAILPLRGKILNIEKTDDTKIYKNTEIQSLITALGLGIKGEEFNESSLRYHRVVIMTDADVDGAHIRTLLLTFFYRYQRELVEKGFIYIACPPLYKVERGKNHNYCYNENQLKDTIKGFGENANYNIQRFKGLGEMMPKQLWDTTMNPQTRMMKRVEIEDALEADRIFNILMGDKVAPRREFIETHSSNLDMATLDI

SEQ ID NO: 184355 - protein, 356 aa, Unknown
  Bacterial polypetide isolated from the Sargasso Sea
HLAGFRGSLTRVLKSFIKKENAKKTPTDLLGEDVREGLIAIISVKVPDPKFSSQTKEKLVSSEVEGVVSTIFSKYFNEFLLENPKDAMSIVGKVSEAALAREAARKAREMTRRKGVLEIAGLPGKLADCQEKDPTLSEIYIVEGDSAGGSAKQGRNRKNQAILPLKGKIINVEKARIDKVLGSAEVGTLIKALGCGIGKEDFDIENLRYHRIIIMTDADVDGSHIRTLLLTFFYRQMYEIVEKGHVYIALPPLYKITKGKEFVYASDESEKDNAIKKLSKNGTRGLEVQRYKGLGEMNPEQLWTTTMDPINRRMMRVDIKDVQDANESFEILMGDDVEPRREFIDANALSVRELDI

SEQ ID NO: 184356 - protein, 627 aa, Unknown
  Bacterial polypetide isolated from the Sargasso Sea
MPTKKKSAASKTTKAPKKAQKKAPKKTNPDSYDSSSITVLKGLEAVKKRPGMYIGDTDDGTGLHHMVYEIVDNSIDEALAGHCDEITVKIIADDCVSVSDNGRGIPTDMHEEGMSAAEVIMTKLHAGGKFDDNSYKVSGGLHGVGVSVVNALSEDLKLTIHRGGKIHEQEYADGAPKGKLKVTGKTDKTGTEVTFVPSPTTFSDINFQYDVLETKLRELSYLNAGLKIILIDERSSKKIEFFHKGGLAEFVTFLNTKRTTVNSVFHFVKEAAEGITIEVSLQWNDGYQENIQCYTNNIKQRDGGTHLVGFRTALTRTLNNYMEKEGMNKEKVSTSGDDAREGLVAVVSVKVPDPKFSSQTKDKLVSSEVRPAVEQETYKALTEYLLENPAEAKLIATKIIEAARAREAARKARELTRRKGVFEGGGLPGKLSDCQEKDPAKSEIYLVEGESAGGSAKQGRDRHFQAILPLKGKILNVEKARLDKVLSSEEIIILISALGCGIKGEDWQEEKLRYHRIIIMTDADVDGSHIRTLLLTLFYRQMPELIEKGYIYIAQPPLYKLKKGKQETYVKDDSELRELLVAEILDDAKLVLNKKGESITGPGLRKIYFPTRESSKHFERLDSHLSC

SEQ ID NO: 184357 - protein, 500 aa, Unknown
  Bacterial polypetide isolated from the Sargasso Sea
NITGTKITFLPSEKTFSNIQFNFKTIEKRLRELAFLNTGVNIQLIDKRPAKEISNQFKYEGGIIEYVKYLNDGKNIIHNDPIFFSSNKNNVTVECSLQWTDSYHENTLCFTNNISQRDGGTHLAGFRGALTRSIVNYINKNTKNGNSVSGDDAREGLTCIISVKLPDPKFSSQTKDKLVSSEVRPVVESISLEKLEQWMEENPNEIKKVIDKVIEASNAREAARKARELTRRKTGLENSSLPGKLADCQEKNPEFSELFIVEGDSAGGSAKQGRDRKNQAILPLRGKILNVERANPRQILTSNEIGILITAIGAGVGNPSGNEQQDKNEGKFDLNKMRYHKIIIMTDADVDGSHIRTLLLTFFYRHMRPMIEAGRLFIAQPPLYRSKKGSSIQYIKDEKEMEQYLINEGSKNLIFDTISSENKQINISNQDLIKLINLSKEVQKLVQQLARRIDNKLVIEQAAVIAALKPESLQNKKVGQELAKYLELRLNTIQGKMGKF

SEQ ID NO: 184358 - protein, 111 aa, Unknown
  Bacterial polypetide isolated from the Sargasso Sea
MPKSKKSTETKNYDSSNIKVLKGLDAVRKRPGMYIGDTDDGTGLHHMVYEVVDNSVDEALAGYCSEISVIIHQDDSITVKDNGRGVPVDKHKGKNKSAAEVIMTVLHAGGK

SEQ ID NO: 184359 - protein, 143 aa, Unknown
  Bacterial polypetide isolated from the Sargasso Sea
MNTEYSSDSIKVLKGLEAVRKRPGMYIGDTDDGSGLHQMIYEVLDNSIDEALAGFCDNVEVVLNVDGTVTVSDNGRGIPVDLHKTEKISAAQLIMTELHAGGKFDQNSYKVSGGLHGVGVSVVNTLSEFLILEINRDGKIYNL

SEQ ID NO: 184360 - protein, 163 aa, Unknown
  Bacterial polypetide isolated from the Sargasso Sea
MANKSPKKQPKKKPKKQDDYGAEAIKVLKGLEAVRKRPGMYIGDTDDGSGLHHMVYEVVDNSVDEALAGYCTKISVILNADESVTVKDDGRGIPTEIHKDEGVSAAEVIMTQLHAGGKFDQNSYKVSGGLHGVGVSVVNALSEKLDLTIKRDGKEHFMSFTNG

SEQ ID NO: 184361 - protein, 378 aa, Unknown
  Bacterial polypetide isolated from the Sargasso Sea
DGDPPAAMRYTETKLGKIAQHLTEDLEKNTVNYRNNYDDTEKEPEVLPSQYPNILVNGAGGIAVGMATSIPPHNLGEVINGTIAFIENKDITIGQLMKHVPGPDFPTGGIIIGKDILKQGYNKGRGSFKIRGEIDLEEKKGGRECLIIKSIPYQVNKSVLIEKIAQLVRDKKIEGIRDIRDESNREGIRVVIELRKSVEPETIRRQLYKLTSIESSFGFNTLAIVNKKPKILNLKEFISEFLKFREDTVVKRIKYDLKKAEEKAHILIGLATAVENIDEIIKIIKNSKDTEIAKKSLLSKKWKIKKSVKLISLIEKKKSISSYQLSTVQVNAILELRLQKLTAYGILEIQNEINKLSDMIIEFNKVLNSKKELYKLIV

SEQ ID NO: 184362 - protein, 115 aa, Unknown
  Bacterial polypetide isolated from the Sargasso Sea
MSSSYLSYAMSVIVSRALPDVRDGLKPVHRRILYAMYKGGYDWSKQFRKSARIVGDVIGKYHPHGDQSVYDALVRMVQDFSMSLPLVQGQGNFGSIDGDPAAAMRYTETRLSKVL

SEQ ID NO: 184363 - protein, 453 aa, Unknown
  Bacterial polypetide isolated from the Sargasso Sea
RIVGDVLGKYHPHGDSSVYDALVRMAQNFSMRYQLVDGQGNFGSIDGDNAAAMRYTESRMTRLTSEMLRDLDKETVSWDLNFDETLKEPSVLPSAVPTLLINGSEGIAVGMATKIPPHNLKEVVNGLVAIIDNKKISVEELMEHVKGPDFPTAGFIMGMDGLKDAYKTGRGKIKMRARAHIETTKTGKDSIVITEVPYQTNKASLVEKIADLVRDKKVVGISDLRDESDKDGIRVVIETKRDAVPEVILNQLYQFTQLQDTFGIILLALVEGIPKIMPLKTILNHFIDFRHEIVVKRTKFELKEAEGRAHILEGLKIALDNIDEVIAIIRGSKDPSQAKEGLMNGFDLSETQSQAILDMRLQRLTGLEVDKVVAEYKELLKVISNLKGILESKNKRMEIIKKELIGIRDQYGDERRTEIIQVDSNFSMEDMIAEEEVVLTITHQGYIKRTALN

SEQ ID NO: 184364 - protein, 341 aa, Unknown
  Bacterial polypetide isolated from the Sargasso Sea
IKIFSHKNQLTKYQNININDIFDYTNTLISIFINSPSFEGQTKKRITMPKLQKQLEELLQNQILLWLNSNKRESLKLIEILIERALLRTDLSKIKKLDRKSIKEKNRLPGKLVDCTSNTIENTELFIVEGDSAGGSAKQARFRSTQAILPLKGKILNVYSVSLSKIADNNEIQNLVHSLGCGLGKNFQLSKLRYEKIILMTDADVDGSHIATLLITFFYKYMRKIIEEGKLYLAMPPLYKISYNQENFFAYNEKDKDKILNDNKGSPQLTRFKGLGEMPANQLKDTTMDPEKRSLIQLKLADGIKYNKQTEKLFEDLMGKKAEKRFNFIQENANFINNLDI

SEQ ID NO: 184365 - protein, 500 aa, Unknown
  Bacterial polypetide isolated from the Sargasso Sea
MKNDLKTNNNQAYRADSIKVLKGLDAVRKRPGMYIGDTDDGSGLHHMVFEVLDNSIDEAIVGFCKNIKVTMHKNNSVTVEDDGRGIPVDTHKGEKKSAAEVIMTQLHAGGKFDQNSYKVSGGLHGVGVSVVNALSEKLDLTIYRDQKEYFVSFENGKTIKPIKFLNKTKKSGTKINFLPSKETFSSIKFSAATLQKKIRELAFLNKGLKIDLIDETHSKPKVYENKYDGGISEFVTFLDQKKSILINKNEKAVFKKPLYLQGQKNNVIVECSLQWNAGYSEEVLPFTNNIHQKDGGTHLLGFRSSLTRIINKYASEKNLTKKNKVTIGGEDVKEGLTAILSIKMPDPKFSSQTKDKLVSSEIRNIVETIVGEKIAVWFDQNPSIVKSVLDKVLQAALARDLARKARDSVRRKGTLELSGLPGKLADCQISSMEGTELFIVEGDSAGGSAKQGRKREFQAVLPLRGKILNTYVNENKRVNGANGANEMKALSKMSLQMKLY

SEQ ID NO: 184366 - protein, 514 aa, Unknown
  Bacterial polypetide isolated from the Sargasso Sea
RNDRECTIGSTSTKGLHHLVWEVLDNSVDEVQAGHASHVRVTVESDGFVSVMDDGRGIPTDIHPVTGKSSLETVLTILHAGGKFGGDDSGYHVSGGLHGVGISVVNALSEAVDVTVWRDGKEHAQSFSRGLSLGPMTEKQQQGSGRQKGTMIRFKPDDQIFDKVKFDANIIRTRMKELAFLNSGTELHLRTYDKKTDSHKDEKLLFADGLKDYVLDLTSDATRLHDPITFSGVMEGVRVEGALCWTADSYSDTLLGYANSIRTTDGGTHLDGLKYALTRSMNAMSRKAKLLKDSDGNLGGDHVREGLSGVIAVWVPEPEFEGQTKTRLGNSEVRRIVETIANDAVTTHMEFNPSVLKSVFAKAQSAYKAAEAAKRAREMVRRKTVLTANRLPGKLSDCSSSDAERTEIFLVEGDSAGGSCKQGRDRSFQAVLPLRGKIMNVERKLDAAALYKNTEITNMISALGLGEMGEDLDTSALRYSKIIILTDADVDGAHIRTLLLTFLYRYQRDLFEKG

SEQ ID NO: 184367 - protein, 144 aa, Unknown
  Bacterial polypetide isolated from the Sargasso Sea
MPKPKKNTNTKNYDSSNIKVLKGLDAVRKRPGMYIGDTDDGTGLHHMVFEVVDNSVDEALAGFCTHIEVIIHEDDSITVKDNGRGIPVDKHKTEKTSAAEVIMTVLHAGGKFDDDSYKVSGGLHGVGVSVVNALSETLNLRIHK

SEQ ID NO: 184368 - protein, 239 aa, Unknown
  Bacterial polypetide isolated from the Sargasso Sea
MSESIFESDIVHEMRDSYMEYAMSVIVGRALPDVRDGLKPVHRRVLFSMNEQGNDYNKPYRKSANVVGDVMGKYHPHGDAAIYDTVVRLSQDFSMRYQLIDGQGNFGSVDGDSPAAMRYTEVRMRRITHEMLADLDKETVDFIPNYDDSLKEPIVLPSRIPNLLTNGSTGIAVGMASNIPPHNLNEVMEALLYYIDNRHTATVQELMQFVPGPDFPTGGTIIGKSGIYEAYSNGRGIIR

SEQ ID NO: 184369 - protein, 298 aa, Unknown
  Bacterial polypetide isolated from the Sargasso Sea
MSSSYLSYAMSVIVSRALPDVRDGLKPVHRRIIYAMYKGGYDWSKPFRKSARIVGDVIGKYHPHGDQAVYDALVRLVQEFSMSLPLIQGQGNFGSIDGDPPAAMRYTETKLSKVSQFLTDGIEKNTIDYRNNYDDTEKEPVVLPSQYPNLLVNGAGGIAVGMATSIPPHNLGEVINGTIDFIKNRDITISQLMKRIPGPDFPTGGIIIGKDIIKQGYNKGRGSFKIRGEIDEEALKNGKTRLIIKSIPYQVNKSVLNEKIADLSREKKIEGVSDIRDESNRDGIRVVVDLRRGIEPET

SEQ ID NO: 184370 - protein, 242 aa, Unknown
  Bacterial polypetide isolated from the Sargasso Sea
MPKTKKSTNTKKYDSTNIKVLKGLDAVRKRPGMYIGDTDDGTGLHHMVYEVVDNSVDEALAGYCSEISVIIHQDDSITVKDNGRGVPVDKHKEENKSAAEVIMTVLHAGGKFDDDSYKVSGGLHGVGVSVVNALSQTLSLRIHKNGNIYEQDYAHGTPKKPLKKGAKTERTGTTISFQPSKKTFSNTSFSYETLSKRLREMSFLNPGLTINLNDERTNKADSYCYEGGLKDFVRHLNKPQKP

SEQ ID NO: 184371 - protein, 185 aa, Unknown
  Bacterial polypetide isolated from the Sargasso Sea
VIVSRALPDVRDGLKPVHRRILYGMNELGSGWNRPYKKSARIVGDVLGKYHPHGDSSVYDALVRMAQNFSMRYELVDGQGNFGSIDGDNAAAMRYTESRMTRLSSEMLKDLEKETVDWGLNFDETLKEPTVLPTTVPTLLINGSEGIAVGMATKIPPHNLGEVVDGLVALIDNENISTEDLMGLH

SEQ ID NO: 184372 - protein, 352 aa, Unknown
  Bacterial polypetide isolated from the Sargasso Sea
MAKKATYSAKNIEVLEGLEPVRKRPGMYIGSTNEQGLHHLVNEVLDNSIDEVVAGYASEVSFHYKKDGSIKIKDNGRGIPIDFHPKFKNKRALEIVLCTLHAGGKFDSNAYKTSGGLHGVGISVVNALSSSLQVNVYKSNKKYSQLYSKGKPKTKIKIEKCKRNEKGTEIDFMPDESIFETIQFSPKKLYDFIMMKAVLVSGTTIEFKIDKELIKDNTPKFEKFHFKNGIGDFLDIKNKNIPKLFEKKFSITKNINENEKCEIFVSFNQNENSSLISFCNTIATPDGGSHENGFKNGVLKALKLYGKKNQVSKISNININDLLDYSDIVISIFINEPSFEGQTKKRIIMPKL

SEQ ID NO: 184373 - protein, 140 aa, Unknown
  Bacterial polypetide isolated from the Sargasso Sea
MEKNIVESKKFKPIFVQDEMSSSYLSYAMSVIVSRALPDVRDGLKPVHRRIIYAMYKGGYDWSKPFRKSARIVGDVIGKYHPHGDQSVYDALVRLVQDFSMSVPLITGQGNFGSIDGDPPAAMRYTETKLGKIAQFLTED

SEQ ID NO: 184374 - protein, 847 aa, Unknown
  Bacterial polypetide isolated from the Sargasso Sea
MGEIAAKEIVPVDIGKELKQSYLDYAMSVIVGRALPDARDGLKPVHRRVLYAMHVLNNDFGRPHKKSARIVGDVIGKYHPHGDSAAYETIVRMAQWWSLRYPLVDGQGNFGSMDGDGPAAQRYTEVRMARISQELLADLEKETVNYVENYDGTEMMPEVLPTRIPNMLVNGSAGIAVGMATNMAPHNLNESLSACLAFIDNPEITVQELMEYIPGPDFPTGAIINGRAGIVSAYETGRGRVKIRAKTEFEDEEKDKAKIIITEMPYQVVKARLIEKIAELSRDKKLEGIRDIRDESDKDGVRVVIELKSGQIPDVVLNNLYAQTQMQTVFGINNVALIDGEPKLLNLKSILSVFFNHRKEVVSRRTFFDLRKAKERGHILEGLTIALANIDEMIDLIKKSKEGSEAKKKLLAKKWKPGKIIAMLEKAGPDACKIDVNDKSVGLIGKTYQLSEQQAQAILDMRLQRLTGLEQDKLIKEYEEIIDHITYLLEILGDSDRLIEVVKEELKEVQEKYKDDRRTEIQDSAADLTEADLITPEDRVVTISHEGYAKTQPLEEYRAQRRGGTGKTAASVKDEDFVEQLLVANTHTTLLCFSNLGQVYWLKVYEIPSAGRAAKGRPLVNLIQLSEGERITSMVPVEEYDDKHFILMATRAGTVKKTVLTEFQNQRKGGKRAITLEEGDELVGTTITDGSKFVMLVTNAGKAAHFSETEVRSMGRTAKGVRGIKLEKDQHVISLIIPEEEASIFTVSENGYGKRSKSIDFRKTRRGAKGVIAMQISERNGQLIGAAQVSDDDELMLISDKGMLVRTRVAEVNIIGRNTQGVTVIRLKDSEKLISIAPISEEFIGDE

SEQ ID NO: 184375 - protein, 630 aa, Unknown
  Bacterial polypetide isolated from the Sargasso Sea
MAKNTYDSKAIEVLSGLDPVKKRPGMYTDTSCPNHLIQEVLDNSVDEAISGHCSNIKIKIEKDGFIKVSDDGRGMPVDIHPEHKVSGVELILCKLHAGAKFSGDEYNFSGGLHGVGVSVVNALSDLLQVNIKRDSKEYEMHFNNGDKKSELKVIGDVGLRNSGTTIRFKPNIKYFESDQINLKDLKHLLKAKAVLCPGLTIDFYHEKKKERIKWFFEDGLKSYLEDASDGIDLILEESILSSKDSKNQEVEFVINWTNKPPKNKLDETYVNLIPTALGGSHLNGFKSGLLDSLKEFCEYRSLIPKGLKINAEDVIANAIFVVSSKMQNPQFAGQTKERLDSKDHMSFVSSSTKDVLSIWFNKHTEEGEKIAELAIASAQARAKASSSVERKKTFKGPALPGKLSDCNSEDLNETELFLVEGDSAGGSAKQARERSFQAIMPLRGKILNTWDLESEEIIKSQEIKNLSTAIGVLPGSSDTTSLRYGKVCILADADSDGLHIATLLCALFLRHFKNLVKEGRIFIAMPPLYRIDCGKDVLYALDENQKDDIVEDFKGKKGKPKINIQRFKGLGEMNPSQLRETVMDPQTRQLVRLSVSATDNANAMMDLLLSKKNAAARKEWLEKKGSLVRI

SEQ ID NO: 184376 - protein, 401 aa, Unknown
  Bacterial polypetide isolated from the Sargasso Sea
MSEFGPTQDDDVQLVNIEEEIKQSYLEYAMAVIVGRALPDVRDGLKPVHKRVLYAMNELNNVYNRPYVKSARVVGEVIGKYHPHGDAAAYETIVRMAQDFNMRYMLVDGQGNFGSIDPDPPAAQRYTEVRMTKIASALLEDLDKDTVDFVNNYDDTLTMPSVLPTRIPNLLVNGSAGIAVGFASNIPPHNIGEVLDACIHLLNNPEASVEEIIGFVQGPDFPTGGIINGRSGIVQGYKTGRGKIYVRGRATVEVDKSEKERIIITEIPYQLRKNALLEKIAELFKEKKIEGITELRDESDKDGLRIVVELRRGESGEVVLNNLYSQTQLQSVFSINNIALVDGQPKLLNLKEMIEAFVEHRKEVVTRRTLYLLRRARQRAHILEGQAVALANIDEVIELIK

SEQ ID NO: 184377 - protein, 343 aa, Unknown
  Bacterial polypetide isolated from the Sargasso Sea
MQNPLDLLINLNLIYQVTTLEKGLTAVISVKVAEPQFEGQTKTKLGNREVSSAVSQSVSQMLEDYLEENPEDSKIIVQKVILAAQARNAARQAREMIQRKTVMTGGGLPGKLSDCSETDPSKCEVFLVEGDSAGGTAKQGRDRVFQAILPLRGKILNVEKAQQHRVFENEEIRNIYTALGVSVGTEEDSKALNLEKLRYHKIIIMCDADVDGSHISTLILTFFFRYMRELVEAGNIYIATPPLYLVKKGNKKVYAWDDKERDNYAKDFGSGVSIQRYKGLGEMNADQLWDTTMNPESRTLRQISLNFDNSQEAERWFSTLMGDDVPPRRKFIEDNAVYAKIDV

SEQ ID NO: 184378 - protein, 254 aa, Unknown
  Bacterial polypetide isolated from the Sargasso Sea
MAKNNSTYQADSIKVLKGLEAVRKRPGMYIGDTDDGTGLHHMVYEVVDNSIDEALAGHCKNISVDINQDGSVTVKDDGRGVPVDIHKGEKKSAAEVIMTQLHAGGKFDHDSYKVSGGLHGVGVSVVNALSERLELTIDRDGKKHFIEFKKGDAKSPLKVVGKSKNTGTEIKFLPSKEIFSLNKFSFLTLQKRMRELAFLNKGIKIILTDLTQKKPKSVEFKFDGGIVEFVDFLDEKREKLKNKSDNDLLKDQFI

SEQ ID NO: 184379 - protein, 353 aa, Unknown
  Bacterial polypetide isolated from the Sargasso Sea
MKNNANTNSNKEYKADSIKVLKGLDAVRKRPGMYIGDTDDGSGLHHMVFEVLDNSIDEAIVGFCKNIKVTMHKNNSVTVEDDGRGIPVDTHKGEKKSAAEVIMTQLHAGGKFDQNSYKVSGGLHGVGVSVVNALSEKLDLTIYRDQKEYFISFENGKTIKPIKFLKKTKKSGTKINFLPSKETFSSIKFNAVTLQKKIRELAFLNKGLKVDLIDETSSKPKVYENKYDGGISEFVTFLDQKKSILINKNEKAVFKKPLYLQGQKNNVTVECSLQWNAGYSEEVLPFTNNIHQKDGGTHLLGFRSSLTRIINKYASEKNLTKKNKVTIGGEDIKEGLTAILSIKMPDPKFSSQT

SEQ ID NO: 184380 - protein, 264 aa, Unknown
  Bacterial polypetide isolated from the Sargasso Sea
MSKNNYGADKISVLKGLEAVRKRPAMYIGDVGKRGYHHLVSEVVDNSIDEALAGFCTSIIVTIKNDGFISIEDNGRGIPVEIHKTEGKPALEVVMTVLHAGGKFDKNTYKVSGGLHGVGVSVVNALSENLVAEVHRDGFHYKQEYKIGQPTTEVEKIGKSDKTGTIVSFKPDETVFSHKGFEEEVIKGRLKELAYLNKNLSIKLVNEPEETETEYCFPGGLSDFVKYLDGNEDLIHDEVIIVSKEDIEVPVDLALRYSTNYNSN

SEQ ID NO: 184381 - protein, 293 aa, Unknown
  Bacterial polypetide isolated from the Sargasso Sea
MSSSYLSYAMSVIVSRALPDIRDGLKPVHRRIIYAMHKGGFDWSKQFRKSARIVGDVIGKYHPHGDQAVYDALVRMVQEFSMSLPLVDGQGNFGSIDGDPPAAMRYTETKLAKVSQFLIDDIEKNTVSFKSNYDETEQEPIVLPAQYPNLLVNGAGGIAVGMATSIPPHNLGEVVDGTLALIKNKDIKINELMKHIPGPDFPTGGLIIGKDIIKQGYKTGRGSFKIRGEISVENLKNGKDRLVVSSIPYQINKSNLNERIAELVRDKKIEGISDIRDESNSEGIRVSIDLRRN

SEQ ID NO: 184382 - protein, 346 aa, Unknown
  Bacterial polypetide isolated from the Sargasso Sea
MSEEKRSNKISNDYGADQIQVLEGLEPVRKRPGMYIGSTGPKGLHHLVYEVVDNSVDEALAGHCDQIEIVLKDDGSALISDNGRGIPTDIHQRTGKSALETVLTVLHAGGKFGSGGYKVSGGLHGVGISVVNALSEWVNVTVLRDGNEFNQRFEKGIAKGELKSQKQQNKPLRKGTTICFKPDTSIFTDGIEFDYALLSSRLRELAYLNGGVKIIFRDERQNLSDGSFKEEIYLYDGGIKQYVEYINKEKESIHSEVIYVDSQKDNVYVEAALQWCSDVYSDNILGFANNIRTIDGGTHIDGLKTVLTRTFNAIAKKRGKRKEVDKNLSGENIREGLTVVLSVKVP

SEQ ID NO: 184383 - protein, 221 aa, Unknown
  Bacterial polypetide isolated from the Sargasso Sea
EGTELFIVEGDSAGGSAKQARERLTQAILPLRGKIINVKNANAAKILANTEIGNLLQALGCQRGKKYNSKDLRYEKIIIMTDADVDGDHISTLLLTFFFSEIPNLIKDGKLFLAVPPLYKISSGKEVLYVNDDKTKDRLIKKNGKNYEISRFKGLGEMMPAQLKETTMNKETRKLIKVTLPNLKSKVSKVSKFIDNLMGKNPENRLKFISDNANKNLNLDV

SEQ ID NO: 184384 - protein, 532 aa, Unknown
  Bacterial polypetide isolated from the Sargasso Sea
DTVDFIPNYDDSLKEPIVLPSRIPNLLTNGSTGIAVGMASNIPPHNLKEVMDAFLYYIDNRHTATVQELMQFVPGPDFPTGGTIIGKSGIYEAYSTGRGIIRIRAKTHFEQTNDGKDLIIVTELPFMVNKAVLLEKIADLVRQKKMEGIADLRDESDRKGMRIYIQLKRGENPEVVLSNLYKHTSLQSSFGIIMLAIVDRQPKVLALPQLLEFFLQHRIEVVTRRTRYELRQAEDKMHLLEGLMIALQNLDDVLEIIRKAESGVTAEAALVERYALSKRQAHGILDMKLQRLTGMEQDKIRSDHEELGEAIADYKDILEKEERVIKIIRDESEEIRDKYGDERRTQIIEGDSSIMIEELINEEDMVVTISREGYIKRSSVSEYRLQRRGGKGRLGMGTKDEDFVEQLFVANTHDYLLFFTNKGQVFRKIVFELPQAGPTGRGKAVINMLPLREGESICACLNVPKEAENKYIFLCTEGGVAKKTPMLDCAKIRVSGLRVITLDEGDSVISVQLTDGDQELFFATRDGMGLRV

SEQ ID NO: 184385 - protein, 249 aa, Unknown
  Bacterial polypetide isolated from the Sargasso Sea
VEGDSAGGSAKQGRKREFQAVLPLRGKILNTYVNENKKRNGANGSHENKTLSKMMSSNEIVTLINALGTGSTNFNMEDLRYEKIIIMTDADVDGSHIRTLLLTFFNNKPFNELIEKGHLYLAQPPLFKITKGGKTSYIKNEKDLEKYILKSLDNVKKFSKKELEKIIDEERQKLNIQRFKGLGEMNPEELWQTTLNPDNRVLLKVEYSKGTKEKSKEDQNIIKILMGDEVAPRKDFITEKALEVENLDI

SEQ ID NO: 184386 - protein, 688 aa, Unknown
  Bacterial polypetide isolated from the Sargasso Sea
IYDSSSIKVLKGLDAVRKRPGMYIGDTDDGSGLHHMVFEVVDNSIDEALAGHCTDVWVTIHTDNSVSVRDNGRGIPTDMHEEGVSAAEVIMTVLHAGGKFDDNSYKVSGGLHGVGVSVVNALSDKLELTIRRKQKVHSQIYRLGVPDAPLAVVGETEGTGTSIRFWPSPTIFSDINFHYDILAKRLRELSFLNSGVSIILTDERDDKTDHFKYEGGIEAFVQYLNRTKTPVHQKAFYFTSQREEDGISVEVAMQWNDSFQEGIYCFTNNIPQRDGGTHLAGFRSALTRVLNTYMEHEGYAKKMKISATGDDAREGLTAVISVKVPDPKFSSQTKDKLVSSEVKSAVESAMHEKLNEYLLENPGEAKIIVGKIVDAARAREAARKAREMTRRKGALDIAGLPGKLADCQEKDPALSELYLVEGDSAGGSAKQGRNRKNQAILPLKGKILNVEKARFDKMISSQEVGTLITALGCGIGRDEYNPDKTRYHSIILMTDADVDGSHIRTLLLTFFYRQTPELIERGYIYIAQPPLYKVKKGKQEQYIKDDPALTEYLTTLALDEATLHVNADAPGIGGAQLETLVQLYHKVTATITRLSRKIPSNLLNELVYVPAIRPDLCKDAALAETWAKNLVTRLQEREGDGSSYAYAVVEDRERQLFVPKSDHPSARYRQRIPAALRLHHVSRLRPHV

SEQ ID NO: 184387 - protein, 223 aa, Unknown
  Bacterial polypetide isolated from the Sargasso Sea
MSSSYLSYAMSVIVSRALPDIRDGLKPVHRRIIYAMHKGGFDWSKQFRKSARIVGDVIGKYHPHGDQAVYDALVRMVQEFSMSLPLVDGQGNFGSIDGDPPAAMRYTETKLAKVSQFLIDDIEKNTVSFKSNYDETEQEPVVLPAQYPNLLVNGAGGIAVGMATSIPPHNLGEVIDGTLALIKNKDIKLNELMKHIPGPDFPTGGLIIGKDIIKQGYKTGRGS

SEQ ID NO: 184388 - protein, 393 aa, Unknown
  Bacterial polypetide isolated from the Sargasso Sea
MTDKISQINLEDEMKKSYLDYAMSVIIGRALPDVRDGLKPVHRRVLYAMKVLGNDHTKAYKKSARIVGDVIGKYHPHGDSAVYETIVRMAQDFSLRYTLVDGQGNFGSIDGDRAAAMRYTEVRMEKITQELLSDIDKETVEFIPNYDESEWEPSVLPTRLPNLLINGSAGIAVGMATNIPPHNLKEIIDGCLFILDNDQATIDDLIKLIPAPDFPTAATIHGIDGIKQAYETGRGKVYVRAKTSIEENGDRESIIISELPYQVNKARLIEKIAELVRDKKLEGISEIRDESDKDGLRVAIDLKRGTVSDVLLNNLYKQTVLESTFSINMVALSNGQPQLMNLKSMLDAFLGHRRDVVTKRTIYQLNRSINRAHILEGQTIALTNIDEMIAIIK

SEQ ID NO: 184389 - protein, 224 aa, Unknown
  Bacterial polypetide isolated from the Sargasso Sea
MNESQSNKNYSAENIKVLEGLEAVRKRPAMYIGDVGKRGLHHLVYEVVDNSIDEALAGYCTKVTVVFNKDGSVTVEDNGRGIPVDIHKEEKKPAVEVVMTVLHAGGKFDKGSYKVSGGLHGVGVSVVNALSEWLWVEVKRDGKVYKQDYKIGEPQADLKATGSAKKTGTKVCFYPDNKIFKTITFEYDIISERLRELAYLNKGIEINLKDERDEEGRNDVFKFK

SEQ ID NO: 184390 - protein, 563 aa, Unknown
  Bacterial polypetide isolated from the Sargasso Sea
MSEFNRDNTLPRDIVDEMKESYLNYSMSVIVSRALPDVRDGLKPVHRRILYGMSELGSSWNRPYKKSARIVGDVLGKYHPHGDSSVYDALVRMAQDFSMRYELVDGQGNFGSIDGDNAAAMRYTESRMTKLSNEMLKDLEKETVEWDLNFDETLKEPSVLPSAVPTLLVNGSEGIAVGMATKIPPHNLSEIIDGLIALIDDESIGTEVLMQHIKGPDFPTAGLILGMDGLEQAYETGRGKIKMRARAHIETNKKGRNSIVVTEVPYQTNKAALVEKIADLVRDKKVVGISDLRDESDKDGIRVVVETKRDAVPEVILNQLYKHTQLQDTFGIILLALVDGIPKIMPLKTVLNHFIDFRHEVVVRRTEFELKEAEGRAHILEGLKIALDNIDEVIKVIRGSKDPAQAKEGLMNSFNLSEAQSQAILDMRLQKLTGLEVDKVVAEYKELIQIISNLKSVLENKTKRMNIIKTELLEIKDQYGDERRTEIIPVDTDFSMEDMIAEEEVVLTITHQGYIKRTALNTYRTQRRGGRGVQGAMSKDEDFVEHLFIANTHNYMLFFTDTG

SEQ ID NO: 184391 - protein, 199 aa, Unknown
  Bacterial polypetide isolated from the Sargasso Sea
MVDFNRDNTLPRDIVDEMRESYLNYSMSVIVSRALPDVRDGLKPVHRRILYGMSELGSSWNRPYKKSARIVGDVLGKYHPHGDSSVYDALVRMAQDFSMRYELVDGQGNFGSIDGDNAAAMRYTESRMTKLSSEMLKDLEKDTVSWEPNFDETLKEPSVLPSSVPALLINGSEGIAVGMATKIPPHNLVEIVNGIVALI

SEQ ID NO: 184392 - protein, 356 aa, Unknown
  Bacterial polypetide isolated from the Sargasso Sea
EGLTAILSIKMPDPKFSSQTKDKLVSSEIRNIVETIVGEKIAVWFDQNPSVVKSVLDKVLQAALARDLARKARDSVRRKGTLELSGLPGKLADCQISSMEGTELFIVEGDSAGGSAKQGRKREFQAVLPLRGKILNTFVNENKRVNGANGANETKALSKMMSSNEIVTLINALGTGSKDFDIENLRYEKIIIMTDADVDGSHIRTLLLTFFNNKPFNELIEKGHLYLAQPPLFKVTRGTKSTYIKNEKDLEKYILKSSENGAKKLKKSDLEKFLNDEKQKLNIQRFKGLGEMNPEELWQTTLNPENRTLLKIEYSKGSKEKSKEDQNIIKILMGDEVAPRKEFITEKALEVENLDI

SEQ ID NO: 184393 - protein, 218 aa, Unknown
  Bacterial polypetide isolated from the Sargasso Sea
MQKDEISKNQNIKSISMYDEMSSSYLSYAMSVIISRALPDARDGLKPVHRRIIYAMHKGGFDWSKQFRKSARIVGDVIGKYHPHGDQAVYDALVRMVQDFSMSLPLVDGQGNFGSIDGDPPAAMRYTETRLSKISQFLIDDIEKNTVEFKSNYDETEKEPSVLPAQYPNLLVNGAGGIAVGMATSIPPHNLGEVIDGALALIDDKNIKINELMKHIPG

SEQ ID NO: 184394 - protein, 775 aa, Unknown
  Bacterial polypetide isolated from the Sargasso Sea
MSEMSAMWNRPYKKSARVVGEVLGKYHPHGDSSIYDAMVRMAQEFSMRHELVQGQGNFGSVDGDRAAAMRYTESRMSKIGSELLRDIDKETIPWTSNFDETLKEPAVLPAVYPNLLVNGSEGIAVGMATKIPPHNLSELVDGLVELLHNPEAEVKDLMKHIKGPDFPTSGKALGIQGIVDAYETGRGKVIMQGRAHVEPASKGRDSLVVTELPYQVNKANLIEKIAYLARDKKIEGIAELRDESDKDGMRIVIEIKRDAVPEVVLNQLYKQTQLQDTFGIILLALVDGTPKVMNLKEILEVFISFRLDVVVKRTKFDLSKAEARAHILEGLKIALKNIDKIVETIKKSKDPVSAKEALMEGFGLSEKQSQAILDMRLQRLTGLETDKIMSEYKDIIQHISELKGILESKSKRVEIIKEELLEVKEKYGEERRTEIIKDFTTLSIEDMIAEEEMVLTITHNGYIKRTNLNTYRSQRRGGRGVQGATSRDEDFVEHLFVANTHSYILFFTDKGKCYWVKVYDIPEGGRAAKGRAIVNLIGCEPDEKVSAFISVKEFNDEHFVVMATEKGIVKKTKLSAYSNPRKKGIYAVEIRDGDRLIEARVSTGDNDILLGTRNGKSIRFSEEQIRPSGRKTMGVKGITLSSKDDKLVGMLLIKREGTTVLVATEKGFGKRTEISQYRAQKRGGKGVLTMKTTDKVGKMVTIKEVVDKDDLMIITNQGVLIRQPVAQIRAIGRATQGVKLIKLGEGTLVSSITRIMSEEEDGDENNSAEPAGDSE

SEQ ID NO: 184395 - protein, 471 aa, Unknown
  Bacterial polypetide isolated from the Sargasso Sea
MSGDTYDSGSIKVLKGLEAVKKRPGMYIGDTDDGTGLHHMVFEVLDNSIDEGMAGFCKQIDVVIGKDGSVSVSDDGRGIPVDMHEEGVSAAEVIMTTLHSGGKFDENSYKVSGGLHGVGVSVVNALSSKLILEIERDGAKYKQEYSDGEPKTKLEKVGKSEKSGTKVTFTPSKKIFTQTKFDVEVLKKRIRELSFLNKGIAIHVLDEASGSKLEFKSDGGLLEFVKHLTGKKEVIGTPFYAQANMKGIGVEIAAQWTGTYRENVQCFTNNIPQVDGGTHLAGFRGGLTRAIKNFIKKEDLMRKKEVEITGEDVREGMIAVISLKMPDPKFSSQTKDKLVSSEARPAVETLINDYFMDFLLANKPQAKEILGKVLEAAYAREAARKAKEMTRRKGLLDIGGLPGKLADCQEKDPALSELFLVEGDSAGGSAKQGRDRSFQAILPLKGKIINVQKARLDKVLSSNEIGTLITA

SEQ ID NO: 184396 - protein, 90 aa, Unknown
  Bacterial polypetide isolated from the Sargasso Sea
MSEDKRSNKISNDYGAEQIQVLEGLEPVRKRPGMYIGSTGPRGLHHLVYEVVDNSVDEALAGHCDHIEIVLRADGSALISDNGRGIPTDI

SEQ ID NO: 184397 - protein, 731 aa, Unknown
  Bacterial polypetide isolated from the Sargasso Sea
MKKILNKNIDDILSEKYLAYAVSTIISRSLPDVRDGLKPVHRRIIYSMYQLKLFKGSSFKKSARIVGDVMGKFHPHGDQAIYDSLVRLAQEFSTRIPLIEGQGNFGNIDGDNAAAMRYTEARLENIANYFFDGLEENAVDLKENYDGQNLEPSVLPSQLPNILLNGSSGIAVGMATNIPPHNIFELNNALIELIKKPEISLSKLLKITLGPDLPTGGVAIITPDEQKQIYKTGKGTFNIRANYFIENLKNGTYQIIITDIPYQVNKSRLIEQIANLIVNKKIPLDDIYDESDENIRIVLKPKNRNIDSHKLIELCFKVSDLSIRYSCNFNVLVDGTYPKLLGLKEILNNFINYRYLTIKRKSKFNIERINKRLDILKGYLIVYKFIDTIIKIIRTKENPKKIIIKKYKLKDIQADAILNMRLGSLKKLDEYETKNEIKRLNEELKLLNKLIKNKGFLNEYLINEINKTNQELKDEIYKRKTKVLIQKDIQEDIDFDEFETVEKLTIVIDKEGFLKSYKDHLSIDQIKKNQKNTKNIFHIHSNQKLLIFVSSGRVFTVNPNELPSGKSNPKSYIYFIETESSEKLVGALVPGENKNCLVTSLNGKGFIVDSNSLISNQKKGKKLFNLKISDILIKVLNANKQYIAITNKSGKLLIFNIESLPILQKGSGVKLMKLKKNELIADIKLFDQQEALTWYSGSKVKKLNDITFWIGKRAQSGKKVPKYFNKNFKFE

SEQ ID NO: 184398 - protein, 418 aa, Unknown
  Bacterial polypetide isolated from the Sargasso Sea
EALAGHCKNINVRINSDGTITVNDDGRGIPVDMHKGEKKSAAEVIMTQLHAGGKFDHDSYKVSGGLHGVGVSVVNALSEKLQLEISRDGKKHFIEFKNGEAIAPLKIVGKSKNSGTQITFLPSKEIFSSIKFSANILIKRMRELAFLNKGIKIIFTDASLKKEKVSEFKFDGGVLEFVNFLDEKREKLENKNGNDLFKKPIYIEGKKDNIELECSLKWNASYAEDIFPYTNNIFQKDGGTHLLGFRSALTRVVNKYANEHNLLKKNKLAISGDDIKEGLTCVLSTKIPDPKFSSQTKDKLVSSEVRMIVETVVNEKLSIWFDQNPSVAKIILAKVIQAAMARDVARKARENVRRKGALELSGLPGKLADCQIGKQEGTELFIVEGDSAGGSAKQGRNRANQAVLPLRGKILNTYVEDL

SEQ ID NO: 184399 - protein, 517 aa, Unknown
  Bacterial polypetide isolated from the Sargasso Sea
KYHPHGDSAVYEAMVRMAQDFSMRYTLVEGQGNFGSIDGDSPAAMRYTEVRMAKITDMILNDIEKETVSYSPNYDGTEQIPDVMPTRIPALLVNGSSGIAVGMATNVPPHNLTEVLNGCLLLLDNPKASIDEIIQIITGPDFPTGGTIDGRIGIYEGYKTGRGIIHVRAKTSVEEDKSGKSSLIINEIPYMVNKAKMLERIAEMVKEKKIDGISEIRDESDKDGLRVVIEVKRGESVEVLENNLFAQSQLEQSFGINFTVLVDGQPRVLNIKEILQEFIKHRKDVVTKRTKFDLRKAKERGHIVEGLMVAIANIDEVIKIIKKSKDTKIAATELCKKSWKAGPIEAILKKAGKDACRPKGLSSEYGIKGKSYKLSPTQAKSILELRLGRLTGLEQDNLSAEFNEILAVILELQKILDDKDTLLQLIKDELIEVRENFGDERKTNINDTRHDISNEDLIPEETRVLTLSRSGYAKTQPLDEYREQRRGGVGKAGASVKEEDLIQNLYVLSSHSQLLCF

SEQ ID NO: 184400 - protein, 654 aa, Unknown
  Bacterial polypetide isolated from the Sargasso Sea
MSDFAKEIISVNIEDELKQSYLSYALSVIHGRALPDIRDGLKPVHRRILYAMYDLRNYYNKPYKKSARVVGDVIGKYHPHGDSAVYDAMVRMAQDFSMRYPIVEGQGNFGSIDGDPPAAMRYTEVRMAKITDQMLDDIEKETISYSPNYDGSENIPDVLPTKIPNLLINGSSGIAVGMATNIPPHNLNEVLNGCVNLIKNPKISIDELIKDISGPDFPTGGTIDGKAGIFEAYKTGRGIIHIRSNTSIEEDKSGKQSLVINEIPFMVNKAKMLEKIAELVKEKKIEGITEIRDESDKDGLRVVIEVRKGDSVDVLENNLFAQTQLEQSFGINFTVLSEGQPKEVNLKEMLQAFVKHRKDVITKRTKFDLKKARERGHVVEGLMVAIANIDEIIAIIKKSRDPKIAASELCKKVWKSGPVEAILKKVGNDACKPKGLSKDLGLKGKKYKLSSDQSKAILELRLGRLTGLEQDNLSKEFSDIVEKIIGLQKILDDKSTLQDLMINELEEIKNNFGDERRTLINDTRRGITNEDLIPEEMRVLTVSRSGYAKTQPLEEYREQRRGGQGKAAASVKEEDLIQNLYVLSSHVQILCFTTKGKVYWLKVYEIPVASRTSKGRPLVNMLNLDDDERVSEILPVEEFSDKKFIFMATRKGNN

SEQ ID NO: 184401 - protein, 920 aa, Unknown
  Bacterial polypetide isolated from the Sargasso Sea
MTDLASSISPINIEDELKNSYLDYAMSVIVGRALPDVRDGLKPVHRRVLFAMSELKNDWNKPYKKSARVVGDVIGKYHPHGDSAVYDTIVRMAQPFSLRYTLVDGQGNFGSVDGDSAAAMRYTEIRMDKLAHQLLADLEKETVDYVPNYDGTEQIPAVLPTRVPNLLINGSSGIAVGMATNIPPHNLTEVVKGCLALIADPALSIEQLMEYIPGPDFPTAAIINGRKGIIDAYKTGRGRAVMRALAEVETEDNGRERIIVTEIPYQVNKAKLIEKIAELVKDKKIEGISGLRDESDKDGMRIVIEIKRGEVGEVVLNNLYAQTQMQCSFGINMVALTNGQPKLFNLKEMLECFILHRREVVTRRTVFELRKARERAHILEALAVALANIDPIIALIKASPTPADAKVKLVEQGWALGHVQGMLEKAGDDAARPEWLEPEFGIRDGLYYLTEQQAQAILELRLHRLTGLEHDKIIAEYEELLEFIAGLLFILRSPERLMEVIKEELEEILAEYGDARRTVINANEIDMSLEDLINEEDVVVTLSHLGYAKYQPLSDYQAQRRGGKGKAATKVKDEDFVEKLLVANTHDTILCFSDFGKMYWLKVYQLPLASRTSRGRPIVNLLPLADGERITAILPVREYAEDKYIIMATSNGTVKKTALTAYSNPRANGIIAVNLKDGDQLIGVDITNGDDEIMLFSNEGKVVRFKEGEEVAVLDENGNPVLDEEGNPQINFKGVRPMGRGATGVRGIKLEEGQKVVSLIVPKGDGAILTVTENGYGKRTELSEYPSKSRATKGVVSIKVSERNGAVVGAVQVGGNDEIMLISDKGTLVRTPANGVSIIGRNTQGVTIIRTASDEKVVGLQRIDEIQGDEDEVELDENGMPIVPVVAEGDSVQQEPLEEEDELEEELDEDEELDDEQDED

SEQ ID NO: 184402 - protein, 319 aa, Unknown
  Bacterial polypetide isolated from the Sargasso Sea
MSSSYLSYAMSVIVSRALPDIRDGLKPVHRRILYAMYKGGYDWSKQFRKSARIVGDVIGKYHPHGDQSVYDALVRMVQDFSMSLPLVQGQGNFGSIDGDPAAAMRYTETRLSKVSQFLIDDIEKNTISFKSNYDETEKEPSVLPAQFPNLLINGAGGIAVGMATSIPPHNLGEIIDGTLALIRDKEIKIRELMKHIPGPDFPTGGVIIGKDIIKQGYNKGRGSFKIRGEVSIEQQKNGRERLVITSIPYQVNKSVLNERIAQLVREKKIEGIKDIRDESNREGIRVAIDLRNGVEPETIKRQLYKNTQIESSFGFNTLA

SEQ ID NO: 184403 - protein, 479 aa, Unknown
  Bacterial polypetide isolated from the Sargasso Sea
MIYNNIILYNIIVKKKYTSSDIEVLKGIEPVQKRPGMYTDTSNPNHLVQELIDNSVDEAISGFCNSILITLDKDNSITVEDDGRGMPVDKHPDYKVSGVEVIMTNLHSGAKFSNKNYKFSGGLHGVGVSIVNALAAMLEISVYRLDSKKEHRMSFLNGSIKKKLGEHVKSKNKKQGTIIKFIPNEKYFDTIDVDIKSLLNLIKAKSILQPELKLTLDDKKYGSGISAFYHKGTLREYIISQFNKDTNILPNETYSNSIDCGDFSMDWSCAWVDSDVDNIQESFVNLIPTSQGGTHVNAFRNAVVDSIRNYCTEKKLMTKQIKILPDDVWKHITFIVSLKMMNPQFAGQTKNKLQSNNISSKLTSEIKDNFDIWLNKNPQKAEQIAKHIIANAELRLDSESYKPKLPTTKNLLLPSRLADCTLNDSRVTELFIVEGDSAGGSAKQARDKSFQAILPLRGKILNTWEINHAKILDSKEVKD

SEQ ID NO: 184404 - protein, 655 aa, Unknown
  Bacterial polypetide isolated from the Sargasso Sea
MSEDKRSNKISNDYGAEQIQVLEGLEPVRKRPGMYIGSTGPRGLHHLVYEVVDNSVDEALAGHCDHIEIVLRADGSALISDNGRGIPTDIHPRTGKSALETVLTVLHAGGKFGSGGYKVSGGLHGVGISVVNALSEWVNVTVYRDGSEFNQRFEKGVSKGELETKKQTGKPSKKGTTICFKPDKTIFSGGIEFEYALLSSRLRELAYLNGGVKIVFRDERNQLSDGSFKEEIYLYQGGIKEYVEYMNAEKDSIHPEIIYVDSQKENVYVEAALQWCSDVYSDNILGFANNIRTIDGGTHIEGLKTVLTRTFNNLAKKRGKRKDIEKNLAGENIREGLTVVLSVKVPDPEFEGQTKTKLGNTEVRGIVDSLIGEALTKYMEFNPGILDLILEKAIQSFNAAEAARRARELVRRKSVLESSTLPGKLADCSSRDPSESEIYIVEGDSAGGSAKQGRDRNFQAILPLRGKILNIEKTDDTKIYKNTEIQSLITALGLGIKGEEFEESSLRYHRVVIMTDADVDGAHIRTLLLTFFYRYQRELVEKGFIYIACPPLYKVERGKNHNYCYNENQLKDTIQGFGENANYNIQRFKGLGEMMPKQLWDTTMNPQTRMMKRVEIEDALEADRIFNILMGDKVAPRREFIETHSSNLDMATLDI

SEQ ID NO: 184405 - protein, 552 aa, Unknown
  Bacterial polypetide isolated from the Sargasso Sea
MEIVLSTLHAGGKFDNNSYKTSGGLHGVGISVVNALSSHLQVIVFKSGKKYSQTYAKGKAKTKIKIEKCKKNEKGTEINFIPDESIFETTQFSPKKLYEFIKMKAVLVSGTSIEFKVDKELIKDSTPNFEKFHFKNGIADFLDNNSKNSNRLFDKKFSIIKKINENEKCEIFTCFNQNEKSSFISFCNTIETPDGGSHENGFKNGILKAIKLYGQKNQIAKISNININDLSDYSDIVISIFINEPSFEGQTKKRIIMPKLQKHLENLIQNEFVLWLNSNKKIAKTLLETLIERSLLRTDLTKIKELERKSIKERNKLPGKLVDCSSKGIEGTELFIVEGDSAGGSAKQARDRELQAILPLRGKILNVFSVSLSKIADNNEIQNLIQSLGCGIGKNFDLAKLRYEKVILMTDADVDGSHIATLLITFIYKYMRPIIDNNRLFLAMPPLFKIQHKEKIFYAYDENEKDKIIKSEFKKIIPTLSRYKGLGEMPADQLKSTTMNPEKRKLLNVNIKQGKKELKETEKLFESLMGKKAEYRFKFIQENANFTNQIDI

SEQ ID NO: 184406 - protein, 826 aa, Unknown
  Bacterial polypetide isolated from the Sargasso Sea
MDLGRDNILDKQLVKELEESYLNYSMSVIMSRALPDARDGLKPVHRRILFSMSEMSAMWNRPYKKSARVVGEVLGKYHPHGDSSIYDAMVRMAQEFSMRHELVQGQGNFGSVDGDRAAAMRYTESRMSKIGSELLRDIDKETIPWTNNFDETLKEPAVLPAVYPNLLVNGSEGIAVGMATKIPPHNLSELVDGLVELLANPEAEVKDLMKHIKGPDFPTSGKALGIQGIVDAYETGRGKVIMQGRAHVEPASKGRDSLIVTELPYQVNKANLIEKIAYLARDKKIEGIAELRDESDKDGMRIVIEIKRDAVPEVVLNQLYKQTQLQDTFGIILLALVDGTPKVMNLKEILEVFISFRLDVVVKRTKFDLAKAEARAHILEGLKIALKNIDKIVETIKKSKDPVSAKEALMEGFGLSEKQSQAILDMRLQRLTGLETDKIMSEYKDIIQHISELKGILESKSKRVEIIKEELLEVKEKYGEERRTEIIKDFTTLSIEDMIAEEEMVLTITHNGYIKRTNLNTYRSQRRGGRGVQGATSRDEDFVEHLFVANTHSYILFFTDKGKCYWVKVYDIPEGGRAAKGRAIVNLIGCEPDEKVSAFISVKEFNDDHFVVMATEKGIVKKTKLSAYSNPRKKGIYAVEIRDGDKLIEARVSTGDNDILLGTRNGKSIRFSEEQIRPSGRKTMGVKGITLSSKDDRLVGMLLIKREGTTVLVATEKGFGKRTEISQYRAQKRGGKGVLTMKTTEKVGKMVTIKEVVDKDDLMIITNQGVLIRQPVSQIRAIGRATQGVKLIKLGEGTLVSSITRIMSEEDDGDENNSAEPEGSSE

SEQ ID NO: 184407 - protein, 454 aa, Unknown
  Bacterial polypetide isolated from the Sargasso Sea
MAYLNKKLSIKLINEPEETETEYCFPGGLSDFVKYLDGNEDLIHDEVISVTKEDIEVPVDLALRYSTNYNSNIFSFVNNINTIEGGTHLSGFRSALTRALNSYANKNDLIKTKKNEKFSLSGDDFREGLTVVISVKVQEPQFEGQTKTKLGNGEVKGMVDNVVYDGIQAFLEQNPKVGKRIIEKAAEAARARIAAKKARELVRKKSGLGSTTLPGKLADCSNKDPLQCELFLVEGDSAGGTAKQGRDRRTQAILPLRGKVINSEKAREDKLLANNEIQSIITALGCGFGEDEDDPNSFNPEKLRYHKIVIMTDADVDGSHIRTLLLTFFWRKMKSLVQGGFLYMAMPPLYKMKQGKKERYAYTDEERDQVLQRMESENKAKIDIQRYKGLGEMNAEQLWETTMNAETRTLMQVTVDHIMEEETNVRFRELMGTEVEHRRSFITERAKFATNIDI

SEQ ID NO: 184408 - protein, 811 aa, Unknown
  Bacterial polypetide isolated from the Sargasso Sea
MPKPVKKSPKKPLQKAKNEASYDSSNITVLKGLEAVKKRPGMYIGDTDDGTGLHHMIYEVLDNSIDEALAGYCENVTVTVHDDSKVTISDDGRGIPVDIHKDEGISAAEVIMTKLHAGGKFDDNSYKVSGGLHGVGISVVNALSEYLLLEINRDGFSYTQEYKDGTPKSKLKKGGKSNKTGTSITFIPSLETFGKNRTFDHDTLFKRLRELSFLNSGLSIILKDERDGRSSNFKSDGGLEEFVTFLNKKKSVINKPFRFLKETKDGMAVELALQWNDSYQENTLCYTNNIFQKDGGSHLSGFKTALTRSLNNFMEKEGYLKSGDLTPSGEDVREGLTAVISVKLPDPKFSSQTKDKLVSSEIKPVVEQETYKHLNDFLLENPGEAKQIATKIIDASRAREAARKAREMTRRKGVLDGIGLPGKLADCQEKDPSLSELYIVEGESAGGSAKQGRNRHNQAIYPMKGKILNVERARIDKVLNSDEIVNIITALGCGLKEDFDLEKLRYHSVVIMTDADVDGSHIRTLLLTFFYRHMPEVLEAGHIFIAQPPLYKVGRGKSEEYIKNDSMLRSFLVNKISQETVLHLTKTKKLTEQDFSSMLASYNSMVDFVESSTNNAPTLFIEAILNSKDYAQKNIAGWLKEINSNLNKISSDDIEIKVELDNESKSRLIISQTEHGNTLATILPLSFFKSKGYKLILEFKKKIFGIKPNSSFFMKGEAKKEFTDNFIDSFEELFEDSKKGLTIQRYKGLGEMNADQLWESTMNPDSRSLLKVTIEDAEAADEIFYNLMGDDVESRREFIETNAGLVSNIDI

SEQ ID NO: 184409 - protein, 240 aa, Unknown
  Bacterial polypetide isolated from the Sargasso Sea
MPKTKKSTNTKKYDSSNIKVLKGLDAVRKRPGMYIGDTDDGTGLHHMVYEVVDNSVDEALAGYCSEISVIIHQDDSITVKDNGRGVPVDKHKGENKSAAEVIMTVLHAGGKFDDDSYKVSGGLHGVGVSVVNALSQTLSLRIHKNGNIYEQDYAHGAPKKPLKKGAKTERTGTTISFQPSKKTFSNTSFSYETLSKRLREMSFLNPGLTINLNDERTNKADSYCYEGGLKDFVRHLIKPK

SEQ ID NO: 184410 - protein, 601 aa, Unknown
  Bacterial polypetide isolated from the Sargasso Sea
MVDFNRDNTLPRDIVDEMRESYLNYSMSVIVSRALPDVRDGLKPVHRRILYGMSELGSSWNRPYKKSARIVGDVLGKYHPHGDSSVYDALVRMAQDFSMRYELVDGQGNFGSIDGDNAAAMRYTESRMTKLSSEMLKDLDKDTVDWEPNFDETLKEPSVLPSSVPTLLINGSEGIAVGMATKIPPHNLMELVNGIVALIEKPDILTDELMGHIKGPDFPTAGLILGMDGLKEAYETGRGKIKMRARAHIESNKNGKDSIVITEVAYQTNKANLVEKIADLVRDKKVQGITDLRDESDKDGIRVVIETKRDAVPEVILNQLYKHTQLQDTFGIILLALVNGIPKIMSLKTVLQHFIDFRHDVVVRRTEFELREAEARAHILEGLKIALDNIDEVISIIRESKDPVMAKEGLMNGFNLTEIQSQAILDMRLQRLTGLEVDKVVKEYKELIQHIAHLRGILESKSQRMDIIKSELLEVRDQYGDERRTEIVPVDSDFSMEDMIAEEEVVLTITHQGYIKRTALNTYRTQRRGGRGVQGAMSKEEDFVEHLFIANTHNYMLFFSDQGKCYWLKVYDIPQGGRAARGRAIVNLIGCDPGEKVEAFV

SEQ ID NO: 184411 - protein, 360 aa, Unknown
  Bacterial polypetide isolated from the Sargasso Sea
GTHLSGFRRGLTNTLKKYAESSGLTDKLKFDISGDDFREGLTAVISVKVAEPQFEGQTKTKLGNREVSSAVSQSVSQMLEDYLEENPEDSKIIVQKVILAAQARNAARQAREMIQRKTVMTGGGLPGKLSDCSETDPSKCEVFLVEGDSAGGTAKQGRDRVFQAILPLRGKILNVEKAQQHRVFENEEIRNIYTALGVSVGTEEDSKALNLEKLRYHKIIIMCDADVDGSHISTLILTFFFRYMRELVEAGNIYIATPPLYLVKKGNKKVYAWDDKERDNYAKDFGTGVSIQRYKGLGEMNADQLWDTTMNPESRTLRQISLNFDNSQEAERWFSTLMGDDVPPRRKFIEDNAVYAKIDV

SEQ ID NO: 184412 - protein, 734 aa, Unknown
  Bacterial polypetide isolated from the Sargasso Sea
MKIKNINFTDALEEKYLAYALSTITHRALPDIRDGLKPVHRRLLFAMFQLRLNSSSGFKKSARIVGDVIGKFHPHGDQSVYEALVRLAQNFSTRYPLVDGQGNFGNIDGDNAAAMRYTEARLTALAELMLKDISEDTIDYINTYDGIDHEPIVLPSSFPNLLANGSSGIAVGMATNIPPHNINELFKALSKLLKNPNYTNSQLLKLIPGPDFPTGGEIIDSDDALKDAYVKGKGTIRLRARWKKEDLGRGQYQIIVYEIPYQVNKARIIEKISDLIDNKKANYLEAIQDESAEDIRIVLIPKNRSFKAEVIFEDLCKNSDLEIRYAINFNAINHKLEPKLFSLKESLKSFIDHRFNVLKRRTKYRLIQTENRLEILKGFLIVYKNLNKVIKIIRTEADPEKKLISVFRINKRQAEAILAMRLRQLKKLEEKEIKKENEDLNTYKKELNKLLKSKKEQIKELNLEFTKSLEIFSKDENATNRKTVVNTEYKEIDYSTEEFESKDPVTVILSKNGWIKTIKGHQDDYTNVKYKEGDAEKFIIKLKNNSKLLLFSTLGKFYTINCNKISAGRGFGDPVSLLIDKNDNEEILFATTYEQEKEYLITSSAGKGFFVNTSDLMASTKSGKRVMNLKGNEKAISCFQKKGDLIAVFSGEKKAVKLLIFDHSEIPLMQKGRGVTLQKFKSGKTLSGICFDSKEGILNENNGKTLLAANEIKKWLGKRAQAGKIEPKSLHSKI

SEQ ID NO: 184413 - protein, 218 aa, Unknown
  Bacterial polypetide isolated from the Sargasso Sea
MSSSYLSYAMSVIISRALPDIRDGLKPVHRRILYAMHKGGFDWSKQFRKSARIVGDVIGKYHPHGDQAVYDALVRMVQDFSMSLPLIDGQGNFGSIDGDPPAAMRYTETRLAKVAQFLIDDIEKETVSFKSNYDETEFEPNVLPAQYPNLLVNGAGGIAVGMATSIPPHNLGEVIDGTLALIKNKDIKMNELMKLIPGPDFPTGGIIIGKDIIKQGYK

SEQ ID NO: 184414 - protein, 874 aa, Unknown
  Bacterial polypetide isolated from the Sargasso Sea
MDTKIYPNIDITDELEKSYLDYAMSVIVSRALPDVRDGLKPVHRRILYSMYESSYHHNKPYKKSARIVGDVMGKYHPHGDSAIYESMVRMAQDFTMRLPLIDGQGNYGSMDGDPAAAMRYTEARLDKISSYMLEELEYETVQLRANYDETLTEPKVLPSRFPNIFVNGASGIAVGMATNIPPHNLGEIIDATLLLVDEPDTTSKQLHKIVKGPDFPTGGIISGTAGLSSMYETGRGSVTVLSKLHEEKIKSRNAIIITEIPYLQNKSKLLERIADVVNNKTIEGINDIRDESNKEGVRIVVELKSSAVPEIIKNQLFQYTPLKTSFSSNMLALKETKPLTLNLKDGLTYFINFRKDVITKRTVYKLNKAREKANILIGLSIAVNNIDAVINLIKKSKTPLEAKEKLLSTKWTVKSNVTQYIKLINPSFKLSGSKILLDEEQAKAILELRLQKLTALERDDLFNNLKSLVEDINIYLKILNSDKQLLKVLKSELKEIKDNFSTVRKTEIQKHDIEDIDTEDLIIEEDVVVTVSHQGYLKRVLKSSYKVQKRGGKGKKAMTTRDEDFLEQVFAATTRDTILFFTSVGKVYSMKAYELPAGTPTSRGKAIVNLIPITKNEKISSILTLPKDIDDFENYNLVFATSLGNIRKNKLKDVAMSGSRKLSRTGKTAIKLKTGDRLIGVISVIENDDVQLATTNGKSIRFATKDLREFSGLGSAGVRGIKLAKDDKVVSVCSLLHNKISIDVRESYLKAKNEAKKDISKINNKFKELANTEEYLLSITENGYGKLSSAYEYRITNRGGSGVTNITVTPKNGRVIQSLKVNLDDNIALISDTGKLLRCNVGDNIRVVGRVSQGVSVFKVDANEKIVSVARLED

SEQ ID NO: 184415 - protein, 316 aa, Unknown
  Bacterial polypetide isolated from the Sargasso Sea
MKIKNINFTKALEEKYLAYALSTITHRALPDVRDGLKPVHRRLLYAMYQLRLSSNSGYKKSARIVGDVIGKFHPHGDQSVYEALVRLAQDFSTRYPLVDGQGNFGNIDGDNAAAMRYTEARLTALAELMIQDISEETIDYISTYDGVDLEPIVLPSYFPNLLANGSSGIAVGMATNIPPHNIIELFSALTKLLKNPNYTSSQLINIIPGPDFPTGGEIVDSKTAIREAYLKGRGTIRLRAKWKKEDLGRGQYQLVIYEIPYQVNKSKIIERVSELIDSKKINYLGAIQDESAEDIRIVLVPKNRTFKPEVIFEGFV

SEQ ID NO: 184416 - protein, 641 aa, Unknown
  Bacterial polypetide isolated from the Sargasso Sea
MPKKQNKKGSYDSSNIQVLKGLEAVKKRPGMYIGDTDDGSGLHHMVFEVVDNCIDEAMAGHCSEIVVSINKNGSITVKDNGRGIPVDTHKKEKVPAAELIMTTLHSGGKFDDNSYKVSGGLHGVGVSVVNALSEELTLKICRDGGQYEQKYSNGKAQTKLKKVKASKETGTEITFKPSKEIFSFVNFDIDKINKRVQELSFLNAGVNILVEDKKTGKSKKFSNSGGLSSYVKFLKGRKQNISEIFHCEGEQDGLTVEIALQWNDAYSENVLCYTNNIPQKDGGTHLSGFRSSLTRVMKAFVRKEELNKKSPVELLGEDVREGLTAIVSVKIPDPKFSSQTKEKLVSSEVETVVSNVFNKNFKDYLLENPKEAMSILTKISEAALAREAARKAREMTRRKGVLEVAGLPGKLADCQEKDPALSEIYIVEGDSAGGSAKQGRNRQNQAILPLKGKILNVEKARLDKVLSSQEIGTLVKALGCGIGTDEFDADKLRYHRIIIMTDADVDGSHIRTLLLTFFFRQMFEILNRGHVYIALPPLYKVSKGKSIKYAASEKEKDAALKELSKTGNRGIEIQRYKGLGEMNPDQLWTTTMDPQNRRMMKVRIDDANEANNSFEVLMGDQVEPRREFIDENALSVANLDI

SEQ ID NO: 184417 - protein, 417 aa, Unknown
  Bacterial polypetide isolated from the Sargasso Sea
MGGLSSYVTHLKGRKQIVSEIFECSTIENDVGVEIAMQWTDSYSENVLCYTNNIPQKDGGTHLAGFRGSLTRVLKSFIKKENAKKTPTDLLGEDVREGLIAIISVKVPDPKFSSQTKEKLVSSEVEGVVSTVFSKYFNEFLLENPKDSISIIAKVSEAALAREAARKAREMTRRKGVLEIAGLPGKLADCQEKDPKLSEIYIVEGDSAGGSAKQGRNRKNQAILPLKGKIINVEKARIDKVLGSAEVGTLIKALGCGIGEEDFDINNLRYHRIIIMTDADVDGSHIRTLLLTFFYRQMYEIVDNGHIYIALPPLYKITKGKEFIYASDEKEKDAAIKNLSKNGSRGLEVQRYKGLGEMNPEQLWTTTMDPVNRRMMRVDIKDVQDANESFEVLMGDDVEPRREFIDANALSVKELDI

SEQ ID NO: 184418 - protein, 639 aa, Unknown
  Bacterial polypetide isolated from the Sargasso Sea
MAKKNNEAKYDSSNIQVLKGLEAVKKRPGMYIGDTDDGSGLHHMVFEVLDNCIDEAMAGHCSEILVKINKDSSVTVEDNGRGIPVDVHKKEGVSAAQLILTTLHSGGKFDDNSYKVSGGLHGVGVSVVNALSKKLTLEVHRDGGEYFQEYAEGKPKAKLKKLKKSNKTGTKITFYPSNKIFTSTDFDIDKIHKRIQELSFLNAGVSITVEDKRSGKLKKFKNSGGLTSYVKFLKGRKQQVSEVFECSAIENDVGVEIAMQWTDSYTENVLCYTNNIPQKDGGTHLAGFRGSLTRVLKSFIKKENAKKTPTDLLGEDVREGLMAIISVKVPDPKFSSQTKEKLVSSEVESVVSTIFSKYFNDFLLENPKDAMSIISKVSEAALAREAARKAREMTRRKGVLEIAGLPGKLADCQEKDPKLSEIYIVEGDSAGGSAKQGRNRKNQAILPLKGKIINVEKARIDKVLGSAEVGTLIKALGCGIGEEDFDINNLRYHRIIIMTDADVDGSHIRTLLLTFFYRQMYEIVDKGHIYIALPPLYKISKGKEHIYASDEAEKEAAVKKLSKNGTRGLEVQRYKGLGEMNPEQLWTTTMDPENRRMMRVDIKDVQDANESFEILMGDDVEPRREFIDKNALSVKELDI

SEQ ID NO: 184419 - protein, 404 aa, Unknown
  Bacterial polypetide isolated from the Sargasso Sea
MSDFAKEIISVNIEDELKQSYLSYALSVIHGRALPDIRDGLKPVHRRILYAMYDLKNYHNRPYKKSARVVGDVIGKYHPHGDSAVYDAMVRMAQDFSMRYPIVEGQGNFGSIDGDPPAAMRYTEVRMAKITDQMLSDIEKETVSYSPNYDGSEDIPDVLPTKIPNLLVNGSSGIAVGMATNIPPHNLNEVLYGCINLIKNPKISIDELIKDISGPDFPTGGTIDGKAGIYEAYKTGRGIIHIRSNTSIEEDKSGKQSLIINEIPFMVNKARMLEKIAELVKEKKIEGITEIRDESDKDGLRVVIEVRKGDSIDVLENNLFAQTQLEQSFGINFTVLSEGQPKEVNLKEMLQAFVKHRKDIITKRTKFDLKKAKERGHVVEGLMVAIANIDEVITIIKKSKDPKM

SEQ ID NO: 184420 - protein, 839 aa, Unknown
  Bacterial polypetide isolated from the Sargasso Sea
MSSSYLSYAMSVIVSRALPDIRDGLKPVHRRILYAMYKGGYDWSKQFRKSARIVGDVIGKYHPHGDQSVYDALVRMVQDFSMSLPLVQGQGNFGSIDGDPAAAMRYTETRLSKVSQFLIDDIEKNTVSYKSNYDETEKEPSVLPAQFPNLLVNGAGGIAVGMATSIPPHNLGEIIDGTLALIADKDIKIKELMKHIPGPDFPTGGVIIGKDIIKQGYNNGRGSFKIRGEVSIEQQKNGRERLVITSIPYQVNKSVLNERIAQLVREKKIEGIKDIRDESNREGIRVAIDLRNGVEPETIKRQLYKNTQIESSFGFNTLAIVEGKPKTCTLKDFLANFLSFREDVVIKKTKFDLQKAEERAHILIGLSVSVENLDKIIKIIRSSKTPDDAKGSILKTKWKINKSQKLISLVEGKKGKNLYSLSEPQVLAILELRLQKLTALGINEIEVEIKKLAELIANFKKIISSKKELLKVIGEELRNIKEKFAVPRRTKIIDAVLNYDIEETIQKQSVIITVTLQGYIKRGSLDGVKKQKRGGKGKSGITTRDQDSVIQTLSVNTHTSVLFFSTEGLVYKVKAWKIPEGSSTSKGKSLFNILPLKSHQAISSIMPMPEDETESKNYQIIFATALGKVRKNSLDDFSSINASGKIAMKLDNNDKIVGVKICKDDQDVILSTKFGKCIRFEAKKLRVFKGRSSKGIKGIELAPNDQIVSLSVIDSDKIKKNGKKSKDEKSELNAKEKFVLSISENGFGKKTSHFDYRVTNRGGKGIIGIVNSPRNGNITSSFPVNEGDEILISTNKGRVIRVAVKEIRTAGRNTQGVRIIKLSGEEKVVSAIKIDDNLI

SEQ ID NO: 184421 - protein, 275 aa, Unknown
  Bacterial polypetide isolated from the Sargasso Sea
MDKSQTEIKNNIKPIEMYDEMSSSYLSYAMSVIVSRALPDIRDGLKPVHRRIIYAMHKGGFDWSKQYRKSARIVGDVIGKYHPHGDQAVYDALVRMVQDFSMSLPLIDGQGNFGSVDGDPPAAMRYTETRLAKISQNLIDDIDKDTVEFKSNYDETEKEPEVLPAQYPNLLVNGAGGIAVGMATSIPPHNLSEVINATLALIENKDIKINELMKHIPGPDFPTGGTIIGKDIIKTGYKTGRGSFKVRGNVSIEQLKNGKERLVINSIPYQINKSV

SEQ ID NO: 184422 - protein, 630 aa, Unknown
  Bacterial polypetide isolated from the Sargasso Sea
MAKNTYDSKAIEVLSGLDPVKKRPGMYTDTSCPNHLIQEVLDNSVDEAIAGHCSNIKVKIYKDGRIMVSDDGRGMPVDIHPEHKVSGVELILCKLHAGAKFSGEEYNFSGGLHGVGVSVVNALSENLKVNIKRDSQEFEMHFNNGDKKKDLKVVGEVGARNTGTSITFKPNVKYFESDEIKIKDLKHLLKAKAVLCPGLTIDFNYEKKSEKIKWHFEDGLKSYLDDSSEGLDLVLDESIVSSKSTETQEVDFVINWLNKSYKDTLDETYVNLIPTAQGGSHLNGFKSGLLEAMKEFCEIRSLLPKGLKINAEDVIANATFVISSKLQNPQFAGQTKERLDSKDHMVFVSSATKDILSIWLNTHTEEGEKIAELAISAAQSRAKASSTVERKKTFKGPALPGKLSDCNSEDLNETELFLVEGDSAGGSAKQARERSFQAIMPLRGKILNTWDLESQEIIKSQEIKNLSTAIGVLPGNSDISGLRYGKICILADADSDGLHIATLLCALFLRHYKSLVQDGRIYIAMPPLYRVDCGKEVLYALDEIQKDKVVDDFKKKKGKPKINIQRFKGLGEMNPSQLRETVMDPKSRQLVRLSISATDNANAMMDLLLSKKNAPARKEWLEKKGSLVRL

SEQ ID NO: 184423 - protein, 323 aa, Unknown
  Bacterial polypetide isolated from the Sargasso Sea
MTITQKNTSPKSYQADSIKVLKGLEAVRKRPGMYIGDTDDGSGLHHMVFEVVDNSIDEAIVGFCKNITVIMQKDSSVTVEDDGRGIPVDTHKGEKKSAAEVIMTQLHAGGKFDQNSYKVSGGLHGVGVSVVNALSEKLDLTIYRDQKEYFISFKNGKAINSIKFVKKTKKSGTKINFLPSKEIFSNIKFSAATLQKKMRELAFLNKGLKIDLIDETHSKIKNYENKYDGGIGEFVTFLDQKKSILINKNEKAVFKKPLYLKGQKKDVIVECSFQWNAGFSEEVMAFTNNIHQKDGGTHLLGFRSALTRLINKYASEKNLNKKN

SEQ ID NO: 184424 - protein, 845 aa, Unknown
  Bacterial polypetide isolated from the Sargasso Sea
MTDINRDHTLNRDIVDEMNESYLNYSMSVIVSRALPDVRDGLKPVHRRILYGMSELGSSWNRPYKKCARIVGEVMGKYHPHGDSSIYDALVRMAQDFSMRYELVDGQGNFGSIDGDNAAAMRYTESRMTKLSAELLKDLEKDTVEWGPNFDETLKEPTVLPTTVPTLLVNGSEGIAVGMATKIPPHNLSEIIDGLVALINNKNITTEELMEHIKGPDFPTAGMILGIDGLKLAYETGRGKIKMRARAHIETAKNGKDSIVITEVPYQTNKANVVEKIADLVRDKKIVGITDLRDESDKDGIRVVIETKRDAVPEVILNQLYQQTQLQDTFGIILLALVDGVPKIMPIKKVLEHFVDFRHEVVVRRTEFDLKAAEARAHILEGLKIALDNIDEIISIIKGSKDPAQAKEGLMNAFNLSEIQSQAILDMRLQKLTGLEVEKVVAEYKEVIKLISFLKGILDSKSQRMDIIKEEMLLVKDEFGDERRTEIIPVDSNFSMEDMIAEEEVVLTITHSGYIKRTALNTYRTQRRGGRGVQGATSNDEDFVEHLFIANTHNYMLFFTNLGKCYWLKVYDIPQGGRATKGRAIVNLIGCEPGEKVEAFVSVKEFDDNHYIVMATRKGLVKKTVLSAYSKPRKGGIYAIEIRDGDTLIEARITNGENDILLGTRGGKSIRFSEKNIRPTGRKTMGVKGITLSSKEDYVIAMLVVKREGTILVATEKGLGKRTDVIQYRTQTRGGKGVMTMRVTEKTGKMVSIMEVVDADDLIVITDKGVLMRQPVSQIRTIGRVTQGVKLVKLDDGTKISSISRVINDDNTPPKDIEQSDTTEAIKEEENPSQPEEPEEPQEQV

SEQ ID NO: 184425 - protein, 653 aa, Unknown
  Bacterial polypetide isolated from the Sargasso Sea
MSEAQKYSAESIKVLEGLEAVRKRPAMYIGDVGKRGLHHLVYEVVDNSIDEALAGHCSKIIVTFNPDNSVTVEDNGRGIPVGLHKEEKKPAVEVVMTVLHAGGKFDKDTYKVSGGLHGVGVSVVNALSEWLWVEVKREGKKHRQDYKIGATQTKLKVTGDAKKTGTKVCFLPDKDIFQVTVFEYNIIAERLRELAYLNKGLEIILRDVRLEETKEESFKFKGGLSDFVKYLDINNNPLHNKIITVDKQNTEVPVEVALRYSSTYNDNILTFVNNINTIEGGTHLSGFRSALTRSMNNYASKNNLVKAKKNEKLTLTGEDFREGLTAIISVKVAEPQFEGQTKTKLGNGEVKGIVDRVVYEGILEFLEQNPSVGRRIVEKALLAARSRSAARKARELIRRKSALGGSSLPGKLADCSNRDPEWCELYLVEGDSAGGSAKQGRDRKTQAILPLRGKVINAEKARIDKLLSNNEIQSMITAIGAGFGGSEDEEGEKSAGDFDPDKIRYHKIIIMTDADVDGSHIRTLLLTFFYRKMKEVIDGGHLYIALPPLYRVSQGKKEAYVYDDNERDLIIERMQKENKNSKVSIQRYKGLGEMNADQLWETTMDPDRRTLLKVTVESAEEAVKTFQNLMGSDVEARRSFIQERAKEVVNLDV

SEQ ID NO: 184426 - protein, 556 aa, Unknown
  Bacterial polypetide isolated from the Sargasso Sea
MSEFNRDNTLPRDIVDEMKESYLNYSMSVIVSRALPDVRDGLKPVHRRILYGMSELGSSWNRPYKKSARIVGDVLGKYHPHGDSSVYDALVRMAQDFSMRYELVDGQGNFGSIDGDNAAAMRYTESRMTKLSSEMLKDLEKETVEWDLNFDETLKEPSVLPSAVPTLLVNGSEGIAVGMATKIPPHNLSEIIDGLVALIDDESIGTEVLMQYIKGPDFPTAGLILGMDGLKQAYETGRGKIKMRARAHIETNKKGRNSIVITEVPYQTNKAALVEKIADLVRDKKVVGISDLRDESDKDGIRVVVETKRDAVPEVILNQLYKHTQLQDTFGIILLALVDGIPKIMPLKTVLNHFIDFRHEVVVRRTEFELKEAEGRAHILEGLKIALDNIDEVIKVIRGSKDPAQAKEGLMNSFNLSEAQSQAILDMRLQKLTGLEVDKVVAEYKELIQIISNLKSVLENKTKRMNIIKTELLEIKDQYGDERRTEIIPVDTDFSMEDMIAEEEVVLTITHQGYIKRTALNTYRTQRRGGRGVQGAMSKDEDFVEHLFIANTHNYM

SEQ ID NO: 184427 - protein, 221 aa, Unknown
  Bacterial polypetide isolated from the Sargasso Sea
CGRFSQQGRDRRTQAILPLRGKVINSEKARVDKLLSNNEVQSMITALGAGFGGSEDESGEKSAGDFDSEKLRYHKIIIMTDADVDGSHIRTLLLTFFYRKMKEVIDGGYLYLALPPLYRVSQGKKESYAYDDNERDLLIERMQKDNKNTKVSIQRYKGLGEMNPGQLWETTMDPEKRTLMKVTVESAAEAAETFQNLMGSDVEARRSFIERNAKFVVNLDV

SEQ ID NO: 184428 - protein, 506 aa, Unknown
  Bacterial polypetide isolated from the Sargasso Sea
MNKHKKYDASSIEVLEVLEPFRRRPGMYIGGTDNASMHHLFSELIDNAMDEAVANFASFIEVKVETDNTISIYDNGRGIPIDPHPNFPDKSALEVIMTTLHAGGKFSNKVYQTSGGLHGVGISVVNALSEFVDVDVYRDKKIYNQKFSKGHPTSKLKEIKKKTNKKGTKISFKPDPEIFGPDNNFNCNKLYDFSKSKAYLFAGVEIRWFCDSEISKKENIPENDIFKFSQGLIDLVQNEVDEKMSLLSEIFSGNREKDKNNLSFEWAINWSLGANTFLNSYCNTVPTPQGGTHELGLKGGLLKAIRSHGERTGNKIAQKVNSDDIAKNLIGAISVFLPEPKFQGQTKDKLSNKSIQKVIENAIKDRFETLLSNSPQQTEALLKYVYSITEERLKKKQDKETTRKSAIRKLRLPGKLADCSQGNSEGTELFIVEGDSAGGSAKQARDRRFQAILPLRGKVLNVANSTKSKIRDNQQISDLIQALGCGSGDLYNEENLRYEKIIIMTR

SEQ ID NO: 184429 - protein, 837 aa, Unknown
  Bacterial polypetide isolated from the Sargasso Sea
MSSSYLSYAMSVIISRALPDIRDGLKPVHRRILYAMHKGGFDWSKQFRKSARIVGDVIGKYHPHGDQAVYDALVRMVQDFSMSVPLIDGQGNFGSIDGDPPAAMRYTETKLAKISQFLIDDIEKNTVSFKSNYDETEQEPTVLPAQYPNLLVNGAGGIAVGMATSIPPHNLGEIIDGTLALIKNKDIKVKELMKHIPGPDFPTGGVIIGKDIIREGYKTGRGSFKIRGEINVENLKNGKDRLVITSIPYQVNKSNLNEKIAELVRDKKIEGISDIRDESNREGIRVAIDLRRSVEPETIKRQLYKYTSIETSFGFNSLAIVDNKPKTCSLKDFLENFLKFREDVVIKKTKYDLKKAEDRVHVLLGLSVSVENIDKVIKIIRSSKNPEEAKNTLIKTKWKITKSAKLIKLVDSKNYKGSYNLSETQVTSILELRLQKLTALGINEIEEEIKKLSELITKYKKIINSKTELLKVISNELSQIKEKFSSPRRTQIIDAVLNYNIEETIQKESVIITITLQGYIKRGALSNVKQQKRGGKGKTGIKTRDEDSVVQTLSVNTHTSVLFFSTEGLAYKVKAWKIPEGSAASKGKSLFNILPLKNHQSISSIMPFPDSDVDTKDMHIIFATSEGKIRKNNLEDFTSINASGKIAMKLDGNDKIIGVKICRDDQDIILSTKLGKCIRFESKKLRVFKGRSSKGIRGINLAENDTIVSLSIIDHDSNKKAKTKDHKSEIKAKEKFILSITENGYGKRTSNYDYRVTNRGGKGIIGIVNSQRNGNVSSSFPVFEGDQILISTNKGRVIRTAVKEIRIAGRNTQGVRIIKLTGDEKVVSAIKLDDNLI

SEQ ID NO: 184430 - protein, 404 aa, Unknown
  Bacterial polypetide isolated from the Sargasso Sea
MQKEQISKDNNIKPISMYDEMSSSYLSYAMSVIISRALPDVRDGLKPVHRRILYAMHKGGFDWSKQFRKSARIVGDVIGKYHPHGDQAVYDALVRMVQDFSMSLPLIDGQGNFGSIDGDPPAAMRYTETRLAKVAQYLIDDIEKETVSFKSNYDETEFEPSVLPAQYPNLLVNGAGGIAVGMATSIPPHNLGEVIDGTLALIKNKDIKIKDLMKLIPGPDFPTGGVIIGKDIIKQGYKIGRGSFKIRGEIDVENLKNGKDRLVITSIPYQINKSNLNERIAELVREKKIEGISDIRDESNREGIRVAIDLRRGIEPETVKRQLYKYTSIESSFGFNSLAIVDNKPKTCSLKDFLESFLKFREDVVIKKTKFDLKKAEERAHILVGLSVSVENIDKVIKIIRSSK

SEQ ID NO: 184431 - protein, 373 aa, Unknown
  Bacterial polypetide isolated from the Sargasso Sea
MSDNAKEILPVNIEEELKNSYLDYAMSVIVGRALPDVRDGLKPVHRRVLFAMNELKNDFNKPYKKSARVVGDVIGKYHPHGDSAVYDTIVRMAQPFSLRYMLVDGQGNFGSVDGDSAAAMRYTEVRMAKIAHELLADLDKETVDFVPNYDGTEHIPEVLPTKVPNLLVNGSSGIAVGMATNIPPHNLTEVINGCVALIQDPSITIDDLMTHIPGPDFPTAAMISGRKGIEDAYRTGRGKIYLRAKAEIETDSNGKETIVVNEIPYQVNKARLIEKIAELVKEKRIEGVSALRDESDKDGMRIVIEVKRNESAEVLLNHLYANTQLQTVFGINMVALDNGQPKVFNLKETLECFILHRREVVTRRTVFELRKAP

SEQ ID NO: 184432 - protein, 544 aa, Unknown
  Bacterial polypetide isolated from the Sargasso Sea
MRRITHEILADLDKETVDFIPNYDDSLKEPVVLPSRIPNLLTNGSTGIAVGMASNIPPHNLNEVMEALLYYIDHRYTATVQELMQFVPGPDFPTGGTIIGKSGIYEAYSNGRGIIRIRAKTHFEQTSDGRDLIIVTELPFMVNKSALLEKIADLVRQKKVEGIADLRDESDRKGMRIYIQLKRGENPDVVLSNLYKHTSLQSSFGIIMLAIVDRQPKVLTLPQLLEYFLQHRIEVVTRRTRYELRQAEVKMHLLEGLMIALQNLDDVLEIIRKAESGATAEGALVERYALSKKQAHGILDMKLQRLTGMEQDKIRSDHEEVGKAIADYKDILEKDERVIKIIRDESVEIRDKYGDERRTQIIEGDGSILIEELINEEDMVVTISREGYIKRSSVSEYRLQRRGGKGRLGMGTKDEDFVEQLFVANTHDYLLFFTNKGQVFRKIVFELPQAGPTGRGKAVINMLPLREGESICACLNVPKEAENKYIFLCTEGGVAKKTPMLDCAKIRVSGLRVITLDEGDSVISVQLTNGNQELFFATRDGMGL

SEQ ID NO: 184433 - protein, 844 aa, Unknown
  Bacterial polypetide isolated from the Sargasso Sea
MDFAKEILPVNIEDELKQSYLSYAMSVIHGRALPDVRDGLKPVHRRILYAMHDLKNNYNKPYKKSARVVGDVIGKYHPHGDSAAYDAIVRMAQDFSMRYTLIEGQGNFGSIDGDPPAAMRYTEVRMQKISDEILADLEKETVSFSENYDGSEQMPDVMPTKIPNLLINGSSGIAVGMATNVPPHNLTEVINGSLKLLENPKLSIDQIIESISGPDFPTGGTIDGKMGIYEAYKTGRGIIYVRSKSKVEESKTGKKSLVIYEIPFMVNKARTLEKIAELVKEKKLDGISEIRDESDKDGLRIVIDVKKGESVEVLENNLFAQTQLEQSFGINFTVLVDGQPKVLNLKEILQEFLKHRKDVVLKRTKFELRKAKERGHIVEGLMVAIANIDEIIKIIKKSKDPKVAAQELIKKKWKPGPVEAILKKVGKDACKPKGVAKGVGLTGKSYKLSNDQAKAILELRLGRLTGLEQDNLSIEFNSLIEKITSLQEIIDRKGVLQKVIKDELNEIKKTYGDDRRTDINDTRQDISNEDLIPEETRVLTISRTGYAKTQPLEEYREQRRGGQGKAAASVKEEDVIQNLYVLSSHAQMLCFTTKGKVYWLKVYEVPVASRTSKGRPLVNMLNLDDDEKVSDILPVDEFSEDRYVFMATRKGTTKKTQLSFFAKKYKSGIKAINLDSDDELIGSAITNGDDEILLASSAGKLIRFSEKKVRPMGRTARGVRGMRIKKDQQIISLMVANNEKEILCVSENGFGKKTSVDDFPTHNRGGQGVISIKTSERNGLMVASTLVDNNDGIMLISDKGTMIRTSAEQIPTISRNTQGVKIITPKEGEKILECVRIDPEEEEE

SEQ ID NO: 184434 - protein, 448 aa, Unknown
  Bacterial polypetide isolated from the Sargasso Sea
KRVQELSFLNAGVNILVEDKKTGKSKKFSNSGGLSSYVKFLKGRKQNISEIFHCEGEQDGLSVEIALQWNDAYSENVLCYTNNIPQKDGGTHLSGFRSSLTRVMKTFIRKEELNKKSPIELLGEDVREGLTAIVSVKIPDPKFSSQTKEKLVSSEVEGVVSNVFNKNFNEYLLENPKEAMSILTKISEAALAREAARKAREMTRRKGVLEVAGLPGKLADCQEKDPALSEIYIVEGDSAGGSAKQGRNRQNQAILPLKGKILNVEKARLDKVLSSQEIGTLVTALGCGIGTDEFDIDKLRYHRIIIMTDADVDGSHIRTLLLTFFFRQMFEILNRGHVYIALPPLYKVSKGKTVKYAASEKEKDIALKELSKTGSRGIEIQRYKGLGEMNPDQLWTTTMDPQNRRMMRVRIDDANEANNSFEVLMGDQVEPRREFIDENALSVANLDI

SEQ ID NO: 184435 - protein, 398 aa, Unknown
  Bacterial polypetide isolated from the Sargasso Sea
MKFVEFLDSKRESLKNKNDKFLFKKPIYMEGLKSNIEVQCSLKWNSGYSEDVLPFTNNIYQKDGGTHLLGFRSALTRVVNKYANDQNLLKKNKVSLSGDDIKEGLTCVLSIKVPDPKFSSQTKDKLVSSEVRNIVENFINEKLSIWFDQNPSVAKIILSKIIQAAVARDVARKARESVRRKGALELTGLPGKLADCQNSKQDGTELFIVEGDSAGGSAKQGRNREFQAVLPLRGKILNTFTEENGKNGRSIDYKTKSLSKMMSSNEIVTLINALGLDPKSEEIDIKDLRYGKIIIMTDADVDGSHIRALLLTFFNNKPFNKLIENGNVYLAQPPLFKITKGSKSIYIKDEPDLEKYINHNSKDLKKLNKKSKEYQNILSEEKSKLSIQRFKGLGEMNP

SEQ ID NO: 184436 - protein, 403 aa, Unknown
  Bacterial polypetide isolated from the Sargasso Sea
MGEIAAKEIIPINIEEELKESYLNYAMHVIVGRALPDARDGLKPVHRRILYAMHDQNMDWNKPPKKSMRIVGEVTGKYHPHGDAAAYETIVRMAQWWSLRYTLVDPQGNFGSMDGDPPAAARYTEARMSKIAHELLSDLDKETVPFVENYDGQETMPDVLPTRIPNLLVNGSSGIAVGMATNMAPHNLNESISACLAFIENPDISTEELIKHIPGPDFPTGGIINGRSGILSAYETGKGKVKIRAKVDIVGEDEGKTQIIVTEIPYMVNKAKLVENIAILMRDKKIEGIREIRDESDKDNPVRIVMDLTSGSIADVVLNNLYKQTQMQSVFGINNVALVGTEPKLLSLKEILEIFFNFRKEVVSKRTIFELNKAKDRGHILEGLTVALSNIDQMIELIKKSKD

SEQ ID NO: 184437 - protein, 621 aa, Unknown
  Bacterial polypetide isolated from the Sargasso Sea
MEEKNMDDEYSAESIQVLEGLEAVRKRPGMYLGDPHDGSALHHCIWEVVDNSVDEHLAGHTDSIEITLNRDNSLSVRDFGRGIPVGIHEEFGISAAEVIMTKLHAGGKFDNSSYKVSGGLHGVGVSAVNAVSEWMEMTIHRDGIVYFQRYEAGVPVEPLKEIGQCEDTGTLISFKPDLSIFTDIVEFDFEEVDTRVGETAFLNAGLRIAIVDLRGSEPHSSEHLYKGGLSEYVSQLNERREVLHEEVIKIRGEKEIEKGDVEVELALQWSDAFSESIRCYTNIIRNKDGGTHMSGLRTALTSSVNLYAKKKKLLKGDALSGDDVREGLAAVVSVKHPDPSFSSQTKDKLVSSEVTGIVQTIVYDKLGEFFEENPSVAKQIVEKALLASKAREAARKARDLTRRKGVLEGGGLPGKLADCQSRDPSECEVYLVEGDSAGGSAKTGRDRRIQAILPLRGKILNVERQKHNAAKVFQNQEIQTIIRALGAGVGNNEEEEGAFDTTKLRYSKIIIMCDADIDGAHIRTLMLTFLWRFMRPAIEEGHVFIAQPPLYQLTKGRVSRYVFSDEERDSVTLELQGGNPDAKIGIQRYKGLGEMNPEQLWETTMNPMTRTMLKVTVRDAE

SEQ ID NO: 184438 - protein, 549 aa, Unknown
  Bacterial polypetide isolated from the Sargasso Sea
LINGSEGIAVGMATKIPPHNLTEIINGLVSLIDNSEISTEELMESIKGPDFPTAGLILGVDGLRAAYETGRGKIKMRARAHIESAKNGKDSVVITELPYQCNKASLVEKIADLVRDKKIVGITDLRDESDKDGIRVVVETKRDAVPEVILNQLYQYTQLQDTFGIILLALVGGVPKIMPLKEVLSHFVDFRHEVVVKRTEFELRQAEARAHILEGLKIALDNIDAVIELIKASKNPDAAKEGLMNSFNLSEKQAQAILEMRLQRLTGLEVEKVLEEYKDLIKLISNLKSILENKNQRMEIIKTELLDIRENYGDERRTEIIPVVSDFSMEDMIAEEEVVLTITHQGYIKRTALNTYRTQRRGGRGVQGAGSKEEDFVEHLFIANTHNYMLFFTDRGKCFWLKVYDIPQGGRATRGRAIVNLIGCDPSERVEAFVSVSDFKDDEFIVMATKKGIVKKTVLSAYGKPRKGGIYAIEIREDDQLIEARITNGEHDILLGTREGKSIRFSETNVRASGRKTMGVRGIRLSSADDYVVGMLVVKREGTILVATE

SEQ ID NO: 184439 - protein, 367 aa, Unknown
  Bacterial polypetide isolated from the Sargasso Sea
MSNEGKKYSAESIKVLEGLEAVRKRPAMYIGDVGKRGLHHLIYEVVDNSIDEALAGYCTKITVFFNKDGSITVEDNGRGIPVGMHKEEKKPAVEVVMTVLHAGGKFDKDTYKVSGGLHGVGVSVVNALSEWLWVEVKRDGKKYKQDYKIGVTQNKLKEIGKTKKSGTKVCFMPDGGVFNTTRFEYDIIAERLRELAYLNKGLEINLRDQREEEGQEDSFKFKGGLSDFVKYLDENNNPLHNKVITVTKEDGEIPVDVALRYGNTYNDNILTFVNNINTIEGGTHLSGFRSALTRAMNNHASKNNLIKTKKTEKLSLTGEDFREGLTAIISVKVPEPQFEGQTKTKLGNGEVKGLVDKVVYEGILDFL

SEQ ID NO: 184440 - protein, 120 aa, Unknown
  Bacterial polypetide isolated from the Sargasso Sea
MAKKENKKKASKKTKEENDYGAESIKVLKGLEAVRKRPGMYIGDTDDGTGLHHMVYEVVDNSVDEALAGHCKMISVILNADESVTVKDDGRGIPTEIHKEEGISAAEVIMTQLHAGGKFD

SEQ ID NO: 184441 - protein, 155 aa, Unknown
  Bacterial polypetide isolated from the Sargasso Sea
MNKKNNNTYQADSIKVLKGLEAVRKRPGMYIGDTDDGTGLHHMVYEVVDNSIDEALAGHCKKIEVSINSDGSITVQDDGRGIPVDFHKEEKKSAAEVIMTQLHAGGKFDHDSYKVSGGLHGVGVSVVNALSQKLELQVERDGKKYFVEFVNGETK

SEQ ID NO: 184442 - protein, 492 aa, Unknown
  Bacterial polypetide isolated from the Sargasso Sea
MRELAFLNKGIKIKINDLTQKKIKSYEFKFEGGINEFVEFLDEKREKLKNKNDKDLFRKPIYIEGIKSDIDVQCSLKWNAGYNEDVYPYTNNIYQKDGGTHLLGFRSALTRVVNKYASEQNLLKKSKVLLSGDDVKEGLTCVLSVKIPDPKFSSQTKDKLVSSEVRNIVEGIVNEKLSIWFDQNPSVSKIILTKIIQAAVARDVAKRARENVRRKGALELTGLPGKLADCQNSKQEGTELFIVEGDSAGGSAKQGRNREYQAVLPLRGKILNTFTEINGSKKNGNQSDLRTKSLSKMISSNEIVTLINALGLDPKTEEIDLEDLRYGKIIIMTDADVDGSHIRALLLTFFNNIPFNKLIQKGHVYLAQPPLFKINKGSKGVYIKDEKDLENYIIKNSKNLKNIKRGSKDFEKVIQQEKSSLNIQRFKGLGEMNPEELWNTTLNPETRNLLQVQYSKNLQKDQNLIQTLMGNDVASRKDFIVDNAINVVNLDI

SEQ ID NO: 184443 - protein, 190 aa, Unknown
  Bacterial polypetide isolated from the Sargasso Sea
MSSSYLSYAMSVIVSRALPDVRDGLKPVHRRILFAMHKGGYDWSKQFRKSARIVGDVIGKYHPHGDQSVYDALVRMVQDFSMSLPLVEGQGNFGSIDGDPAAAMRYTETRLSKVSQFLIDDIDKNTVEFKSNYDETEKEPSVLPAQFPNLLVNGAGGIAVGMATSIPPHNLGEIIDGTLALIKNKEIKIK

SEQ ID NO: 184444 - protein, 495 aa, Unknown
  Bacterial polypetide isolated from the Sargasso Sea
MSQNEIEHDEYGAESIKVLKGLDAVRKRPGMYIGDTDDGSGLHHMVYEVVDNAIDEALAGHCDHVIVNLNSDGSVTVIDNGRGIPVEMHQEEGISAAEVIMTQLHAGGKFDNNSYKVSGGLHGVGVSVVNALSEWLELKIYRDDNEHFIRFENGNSVNPIRLKGPSNGKKGTELTFKPSSETFTNTNFIFNTLEHRLRELAFLNSGVQIILCDKRESIEKKSEFNFEGGLKEFVNWMNKSRNPIHNIISGKSDKEEVGVEVVLQWTDSYHESTQCFTNNIPQRDGGTHLAGFRAALTRVINSYAQSSGIAKKEKVQLSGEDSREGLTAILSVKVPDPKFSSQTKDKLVSSEVRPIVESAVSEALSQWLEENPAEAKKVIMKAFEAASAREAARKARELTRRKGALDIASLPGKLADCQEKDPSQSELFLVEGNSAGGSAKQGRNRKFQAILPLRGKILNVERARLDKMLSSAEIGTLITAIGAGVGNNTELEDSV

SEQ ID NO: 184445 - protein, 330 aa, Unknown
  Bacterial polypetide isolated from the Sargasso Sea
MGIRNTKIITLDDLMESMDGILSIFIADPEFQGQTKEKLSSKNATTLTSKIIEDNFDYWLSENQTDAEKLISFLINTANTRINSKHEKDLSRKSALRKLRLPGKLADCLEDKAAGTELFIVEGDSAGGSAKQARDKKYQAVLPLRGKILNIASSSAQKYFQNQQLKDLVQALGCGTSQSYDDGNLRYDKIIIMTDADVDGAHIASLLITFFYIEMPELINNGHLYVAVPPLYKLSANNKIFYAIDDDDRERIIKEHYKKSEKIDISRFKGLGEMLPNQLRETTMNKSTRKLLKITMNSYSPDQYAKTIDELMGNKPDARFKFIQENASFN

SEQ ID NO: 184446 - protein, 235 aa, Unknown
  Bacterial polypetide isolated from the Sargasso Sea
MTKNSNYQADAIKVLKGLEAVRKRPGMYIGDTDDGTGLHHMVYEVVDNSIDEALAGYCKNINLDINSDGSITVNDDGRGIPVDIHKGEKKSAAEVIMTQLHAGGKFDHDSYKVSGGLHGVGVSVVNALSEKLELTVERDGKKYFIEFKNGDSKKPLKEIGKSKKSGTQIKFLPSKNIFSSTKFSFNTIQKRMRELAFLNKGIKISINDFSLKKVKNVEFKFDGGILEFVEFLEKR

SEQ ID NO: 184447 - protein, 639 aa, Unknown
  Bacterial polypetide isolated from the Sargasso Sea
MSGDTYDSGSIKVLKGLEAVKKRPGMYIGDTDDGTGLHHMVFEVLDNSIDEGMAGFCKQIDVVIGKDGSVSVSDDGRGIPVDMHEEGVSAAEVIMTTLHSGGKFDENSYKVSGGLHGVGVSVVNALSSKLVLEIERDGAKYKQEYSDGEPKTKLEKVGKSEKSGTKVTFTPSKKIFTQTKFDVEVLKKRIRELSFLNKGIAIHVLDEASGSKLEFKSDGGLLEFVKHLTGKKEVIGTPFYAQANMKGIGVEIAAQWTGTYRENVQCFTNNIPQVDGGTHLAGFRGGLTRAIKNFIKKEDLMRKKEVEITGEDVREGMIAVISLKMPDPKFSSQTKDKLVSSEARPAVETLINDYFMDFLLANKPQAKEILGKVLEAAYAREAARKAKEMTRRKGLLDIGGLPGKLADCQEKDPALSELFLVEGDSAGGSAKQGRDRSFQAILPLKGKIINVQKARLDKVLSSNEIGTLITALGTGIGIDEFSLEKLRYHRIIIMTDADVDGSHIRTLLLTFFYNQMFDLLEKGHIYLALPPLYKIKKGGKTHYAKDEEEKDAILKELRKEATEGSRPPEIQRYKGLGEMNPEQLWETTFDPKHRRLVQITLDEARELVDDIFETLMGDQVQPRREFIDDNALRAENIDF

SEQ ID NO: 184448 - protein, 440 aa, Unknown
  Bacterial polypetide isolated from the Sargasso Sea
MANKNTYQADSIKVLKGLEAVRKRPGMYIGDTDDGTGLHHMVYEVVDNSIDEALAGYCKNINVKINFDGTITVSDDGRGVPVDIHKGEKKSAAEVIMTQLHAGGKFDHDSYKVSGGLHGVGVSVVNALSEKLQLEINRDEKKYFVEFQNGEAKAPLKVIGKSKQTGTQITFLPSKEIFSSTKFSANILIKRMRELAFLNKGIKIIFTDASQKKEKTYEFKFDGGVLEFVNFLDEKREKLQNKNGNDLFKKPIYIEGKKNNIELECSLKWNAGYGEDILPYTNNIYQKDGGTHLLGFRSALTRVINKYANENNLLKKNKLAISGDDIKEGLTCVLSTKIPDPKFSSQTKDKLVSSEIRMIVETVINEKLSIWFDQNPSIAKIILAKVIQAAVARDVARKARENVRRKGALELSGLPGKLADCQIGKQEGTELFIVEGDSAG

SEQ ID NO: 184449 - protein, 545 aa, Unknown
  Bacterial polypetide isolated from the Sargasso Sea
FVKYLDRSKTSLIPEPIFITGEKDEIGIEVAMWWNDSYHENVLPFTNNIPQRDGGAHIAGFRGALTRTINSYAQESGIAKKEKVNFTGDDAREGLTCVLSVKVPDPKFSSQTKDKLVSSEVRPAVESLMNEKLGEWFEENPNEAKLIVGKIIEAALAREAARKARELTRRKAALDVNYLAGKLKDCAEKDPSKTEVFLVEGDSAGGSAQTGRDRRTQAILPLRGKILNVERARFDRMLNSQEIGNLVMALGTGIGRDEFDISKLRYHKIVIMTDADVDGAHIRTLLLTFFYRQMPELVEGGYLYIAQPPLYKVSKGKSEVYLKDQSALDDFLVQQGIEGAVLKVGSNADIAGQDLARLVDEARQLDRVLEAFPTQYPRHILEQAAIAGAFVPGAVDKDLQGTADSIAARLNLIALEYERGWSGRITQDKGIRLARVLRGVEELRTLDGPMLRSGEARKTGTFTESLKEIYESPTTLIRKDQSQIIYGPLELLSSILKEGEKGLSLQRYKGLGEMNPDQLWETTLDPDARTLLQVKINDAAEADDC

SEQ ID NO: 184450 - protein, 211 aa, Unknown
  Bacterial polypetide isolated from the Sargasso Sea
MSSSYLSYAMSVIVSRALPDVRDGLKPVHRRILYAMYKGGFDWSKQFRKSARVVGDVIGKYHPHGDQAVYDALVRMVQDFSMSLPLIDGQGNFGSIDGDPAAAMRYTETRLSKIAEHVLEDIEKSTVNFKSNYDETEMEPEVLPSKFPNLLVNGAGGIAVGMATSIPPHNLGEVIDGTLALINNKDIKLSELMKHIPGPDFPTGGIIIGKE

SEQ ID NO: 184451 - protein, 407 aa, Unknown
  Bacterial polypetide isolated from the Sargasso Sea
MYIGDTDDGSGLHQMIYEVVDNSIDESLAGYCDKIEVILNSDGTITISDNGRGVPVDNHKEEGVPAAQLIMTELHAGGKFDQNSYKVSGGLHGVGVSVVNALSETLLLEINREDKIHKMEFAHGAVLNSLKVIGDSELINGKSYTGTKITFLPSKKIFKNIEFNFSTIEKRLRELAFLNTGVNIVLQDNRSAQKKEIIFKYEGGIIEYVNYLNKGKNCINNTPIYFLGTKNKVNVECALQWTDAYHENTLCFTNNIAQRDGGTHLAGFRGALTRCIVNYINQKIKNSTNISGDDAREGLTCVISVKLPDPKFSSQTKDKLVSSEVRPVVESVSLEKIEQWIEENPNEIKKVVEKVVEASDAREAARKARELTRRKTGLENSSLPGKLADCQEKNPESSELFIVEGDS

SEQ ID NO: 184452 - protein, 182 aa, Unknown
  Bacterial polypetide isolated from the Sargasso Sea
MAKKSDKAKYDSSNIQVLKGLEAVKKRPGMYIGDTDDGSGLHHMVFEVLDNCIDESMAGHCSEINVVINKDQSVTIEDNGRGIPVDVHKKEGVSAAQLILTTLHSGGKFDDNSYKVSGGLHGVGVSVVNALSKKLMLEVHRDGGKFFQEYVEGKPKAKLKKIKSSSKTGTKITFYPSKEIFA

SEQ ID NO: 184453 - protein, 835 aa, Unknown
  Bacterial polypetide isolated from the Sargasso Sea
MPAKKKAAKPSTKKTQKKAPKKLASSSTKTQKKKKSESSYDSSSITVLKGLEAVKKRPGMYIGDTDDGTGLHHMVYEVVDNSIDEALAGHCDEITVKILSDDSVTVIDNGRGIPTDKHEEGVSAAEVIMTKLHAGGKFDDNSYKVSGGLHGVGVSVVNALSEELKLTIHRGGKIHEQTYSNGTPTSKLKIVGKTDSTGTEVMFVPSETTFSNILFDYDTLEARLRELSFLNSGLKINLIDERTSKKKEFLHKGGLAEFVEFLNKKRTTVNSIFHFVKEAKDGITIEVSLQWNDGYQENIQCYTNNIKQRDGGTHLVGFRTALTRTLNNYMDREGMNNKEKVSTSGDDAREGLVAIVSVKVPDPKFSSQTKDKLVSSEVRPVVEQEVYKALSEFLLENPTEAKLIATKIIEAARAREAARKARELTRRKGAFEGGGLPGKLSDCQEKDPAKSEIYLVEGESAGGSAKQGRDRHFQAILPLKGKILNVEKARLDKVLSSEEIIILITALGCGIKGEDWQEEKLRYHRIIIMTDADVDGSHIRTLLLTLFYRQMPELIEKGYIYIAQPPLYKLKKGKQETYVKDDAELRELLVAEILDDAHLVLNKKGESISGEALGKFISQHEKIQLLVNGLTHSYPIDLLESIKHVEILSGLEKEKEIKKWCKSIENYLNKNAEQGSEWSVVAKANEDGSVIEPNVSLIKHGTSSNWILNKSFFRSKAYKDIAAHGADMVELFNKDSYFEINSKKIPVENFANALEEILTISERSFTKSRYKGLGEMNADQLWDTTMNPDMRILGQVSIEDAQAADDLFHALMGDEVEPRRDFIDENAKLVVNLDV

SEQ ID NO: 184454 - protein, 660 aa, Unknown
  Bacterial polypetide isolated from the Sargasso Sea
MSTKKPSAAYSEASIKVLKGLEPVKQRPGMYTRTENPLHIIQEVIDNASDEALGGYGKQITVTLHADQSVSVEDDGRGIPFGMHPEEGVPVVEIVFTRLHAGGKFDKAAGGAYTFSGGLHGVGVSVTNALATRLDVTVWRDGKIAELGFAEGDVVKPLTTQGAGRGEKKSGTRVQVWPNPKYFDSPNLPLGELQRLLRSKAVLLPGVEVVLVNEKSGERQTWKYEDGLRGYLLDEMNGSELLIPLFEGERFADSRSGDDTFAEGEGASWVVAWSEEGSLVRESYVNLIPTPAGGTHESGLRDGLYQAVKSFVELHNLQPKGVKLLAEDVFARVSFVLSAKVLDPQFQGQIKERLNSRDAVKLVSSFSRPALELWLNQHVEHGKKLAELVIKQAQARTRAGQKVEKRKSSGVAVLPGKLTDCETEDIARNELFLVEGDSAGGSAKMGRDKEYQAILPLRGKVLNTWETERDRLFANNEVHDISVAIGVDPHSPDESVDLSNLRYGKICILSDADVDGSHIQVLLLTLFFKHFPQLIERGHVCVARPPLFRVDAPARGKKAAQKLYALDEGELEAILDKLRKEGVRETQWSISRFKGLGEMSAEQLWDTTMNPDTRRLMPVKLGELDYEATVARMTMLMGKGEAAARRGWLEEKGNDVEADI

SEQ ID NO: 184455 - protein, 773 aa, Unknown
  Bacterial polypetide isolated from the Sargasso Sea
MDDNTSDLFASSDAPDAEALTLGNYAEQAYLSYAVSVVKSRALPDVCDGQKPVQRRILYAMNEMGLGPDAKPVKSARVVGDVLGKYHPHGDQSAYDALVRLAQDFSLRYPLIDGQGNFGSRDGDGAAAMRYTEARLTPIAKLLLDEIDQGTVDFMPNYDGSFEEPKTLPSRMPFVLLNGASGIAVGLATEIPSHNLREVAAAAVALIRNPKLSHAELMNLIPGPDFPGGGQIISSDTEIATAYETGRGSLKVRARWKIEDLARGQWQLVVTELPPSTSGQKVLEEIEELTNPKLKLGKKTLTPEQLNTKKAMLDLLDAVRDESGKEAAVRLVFEPKSRTIDQTEFVNTLLAYTSLESNATLNLVMIGADGRPGQKGLLTILDEWVKFRQLTMTRRCRHRLAKVDDRIHILEGRMIVFLNIDEVIRIIRESDEPKAALMSAFGLSERQAEDILEIRLRQLARLEKIKIEKELEALRDEKAKLEELLANESAMKRLMIKEIEADAKQYGDDRRTLIQQEKRATFEAKVVDEPVTVVVSQKGWVRALKGHGLDPASFSFKAGDSLYAAFQCRTPDRLIAWGSSGRVYSVDVSVLPGGRGDGVPVTSLIELESGSHLMHYFAAPADQQLLLASSNGFGFLAKVGDMVSRVKAGKAFMTIDAGAVPLAPMPVLPNATQVACLSSGGRLLVFGMDEMKTLSGGGRGVILMALDDKETLVQALAIDPAGVVLIGTGRGGKAMDETLSYAGLAPHVGKRARKGRAPETKLKVVSELRPLLG

SEQ ID NO: 184456 - protein, 374 aa, Unknown
  Bacterial polypetide isolated from the Sargasso Sea
HGDSAIYQSMVRMAQDFSMRLELIDGQGNFGSLDGDPPAAMRYTEARLAKVAEKIVTDLDKQTISFQPNYDDSTNEPSVLPAQFPNLLVNGASGIAVGMATNIAPHNLGEVVDATLHLIEEPKTELDDLLKLIKGPDFPTGGQIIGKKGIFDTYKNGKGGVVLRSKTSIEKFKKDREAIVINEIPYQVNKSKLIEKIAETVKNNIIEGISDLRDESDRNGVRVVVELKKDVDANIILNQLYKHTLLQTTFNSNMLALNKGKPEQMNLKDMLSAFIDFREEVITKRTIFDLNKARDKAHIFIGLVVANAHIDEIINLIKASTDSKEAREKLINKKWKLSEKNLNFIRLVDDENTQVEKNIFQFTEAQAKAILELR

SEQ ID NO: 184457 - protein, 708 aa, Unknown
  Bacterial polypetide isolated from the Sargasso Sea
VIMTVLHAGGKFDDDSYKVSGGLHGVGVSVVNALSQTLSLRIHKNGNIYEQDYAHGTPKKPLKKGAKTERTGTTISFQPSKKTFSNTSFSYETLSKRLREMSFLNPGLTINLNDERTNKADSYCYEGGLKDFVRHLNKPQKPTHQSIAYINKKSKKDGDIEVEVAIQWNESYRENTFCFANTIRQRDGGTHLAGFRGALTRTINTYIDKEIPKNDTSVTGDDCREGMTAIISVKHPDPKFSSQTKDKLVSSEVKGVVESAVNKHLKEFLEENPVEAKIIVGKILDAARAREAARKAREMTRKKGALDIAGLPGKLADCQEKDPSLSELFIVEGDSAGGSAKQGRDRKTQAILPLKGKILNVEKAQRAKMYSSVEIGTLITALGCGIHDEFDMDNLRYHKIIIMTDADVDGSHIRTLLLTFFYRELQDLISGGYLYIAQPPLYKLKKGKKEEYVLTDDELNSLILSNAVKGTEVRAKNKKKGIEGDGLLNTILDYSNSLSVIEKIEKQAGTIAAKAISLHKPITKTEANNKKKLETWIKGLSRTASKIAKEKGYKASVSIDYDDDGIGYIITEEEIGGVTHHGKIANSFLRSNDYKIFGRVQKAQKLFSGAVVIDNGSEITEYVNIEDCLNQIVNNSKRGLNVQRYKGLGEMNPDQLWETTLDPTTRSLLQVKADDDAGLTFETLMGDEVPPRREFIEENALNAGNVDI

SEQ ID NO: 184458 - protein, 506 aa, Unknown
  Bacterial polypetide isolated from the Sargasso Sea
MFNLFGEDIREGFTCVLSVKVADPKFSSQTKDKLVSSEVRPVVESLINDLLSNWFEEHPNEAKIIVGKVVEAASAREAARKARDLTRRKGALDISSLPGKLADCQEKDPEKCEIFIVEGESAGGSAKQGRDRSTQAILPLKGKIINCEKARLSKVLSSNEIATLITALGGGIGNSSNESDQDDESFKTDKLRYKKVIIMTDADVDGAHIKTLLLTFFYRQMRPLITDGCLYIAQPPLYKAKKGNSETYLKDDDDLENYLIDSGINDSSFILNTGEVIASNDLIDLVTKSRNFKKLINSLPKKYNQGFVEAVSVSSAFKQPIEISDKVLAEISNRLTKKYSDIDADWKASYDDENGLMVSREVRGVSENMSIGRGLFDSADSRRLEKISNDIKQFFPFVDKESSNIFERDGRSYIINGPIDLIESIFIEGRKGLQIQRYKGLGEMNAEQLWDTTLDPESRRLLRVKIDSGVDNSGIFADLMGDEVIKRREFIQDSIESGDLVANLDI

SEQ ID NO: 184459 - protein, 189 aa, Unknown
  Bacterial polypetide isolated from the Sargasso Sea
MPKTKKSTNTKKYDSSNIKVLKGLDAVRKRPGMYIGDTDDGTGLHHMVYEVVDNSVDEALAGYCSEISVIIHQDDSITVKDNGRGVPVDKHKEENKSAAEVIMTVLHAGGKFDDDSYKVSGGLHGVGVSVVNALSQTLSLRIHKNGNIYEQDYAHGVPKKPLKKGAKTERTGTTISFQPSKKTFQTPHS

SEQ ID NO: 184460 - protein, 341 aa, Unknown
  Bacterial polypetide isolated from the Sargasso Sea
MAEREKLIPINIEEAMKSAYIDYSMSVIVSRALPDVRDGLKPVHRRVLFGMSELGLRSNSKYKKSAFIVGEVLGKYHPHGDSSVYDTMVRMAQEWSLRYMLVDGQGNFGSIDGDSPAAMRYTEARLKKISEDMVQDLDKDTVDFQLNYDDSLKEPTVLPTKIPNLLVNGASGIAVGMATNMPPHNLSEVIDGTIAYIDNNNIEISKLINHIKAPDFPTGGIIYGYDGVKQAFETGRGRVVMRGKAIFEEVNGRECIIVTEIPYLVNKSDMIQKTAQLINDKKIDGISNIRDESDRKGMRIVYVLKKDAIPNIVLNKLFKHTSLQSSFSVNNIALVNGRPKL

SEQ ID NO: 184461 - protein, 445 aa, Unknown
  Bacterial polypetide isolated from the Sargasso Sea
MTDKISQINLEDEMKKSYLDYAMSVIIGRALPDVRDGLKPVHRRVLYAMKVLGNDHTKPYKKSARIVGDVIGKYHPHGDSAVYETIVRMAQDFSLRYTLVDGQGNFGSIDGDRAAAMRYTEVRMEKITQELLADIDKDTVDFIPNYDESEEEPAVLPTRLPNLLINGSAGIAVGMATNIPPHNLKEIIDGCLFILDNDQASIDDLIKLIPAPDFPTAATIHGIDGIKQAYETGRGRVHVRAKTSIEENGDRESIIISELPYQVNKARLIEKIAELVRDKKIEGISEIRDESDKDGLRVVIDLKRGTVSDVLLNNLYKQTLLESTFSINMVALSNGQPKLMNLKGMLDAFLSHRRDVVTKRTIYELNRSINRAHILEGQTIALTNIDEMIAIIKKSKTPAEAQKALISKLWKVGKVKDMLKKAGNVSTIPKHLLNIENFGIEKSKY

SEQ ID NO: 184462 - protein, 163 aa, Unknown
  Bacterial polypetide isolated from the Sargasso Sea
MSEAKSPSSSKIQAAYGAEQIQVLEGLEPVRKRPGMYIGSTGPRGLHHLVYEVVDNSVDEALAGHCNTIDVCLKADGSCSVADNGRGIPTDVHPRTGKSALETVLTVLHAGGKFGAGGYKVSGGLHGVGVSVVNALSEWVEVTVHRQDKVHRQRFERGAPIGS

SEQ ID NO: 184463 - protein, 769 aa, Unknown
  Bacterial polypetide isolated from the Sargasso Sea
MNLVIVESPAKAKTINKYLGDNYKVLASYGHIRDLPSKNGSVDPDQDFKMEWEIDSFSKKYLKEITDAAKDSSKIILATDPDREGEAIAWHVKEYLNEKKLLKDKEIERVVFNEITKKAVIHGIENPRQIEPLLVDAYMARRALDYLVGFNISPILWTKLPGSKSAGRVQSVALKLITEREHEIESFKPEEFWTLSVKFKDEKNQNILASISQLDNNKIEKFSFRNKDEINKAISSINQKKFSITDISSKVVNRNPSGPFTTSTLQQTASSRLGFGASRTMQIAQKLYQGVEIEGETIGLITYMRTDGTNLSKDAVVAFRDYIKKEIGNEYLPESALNYSGKKAKNAQEAHEAIRPTDVIRTPQSVKKYLSTDQNKLYDLIWSRALSSQMQSAKFDRNTITITSNNNDTVCKASGSVLKFDGFLKIYNNQGKDDDENILPSVSKGLVNIESLIDEQHFTQPPPRYSEASLVKKLEELGIGRPSTYASIISTIANRGYAEILNKRFFPTDRGKLISAFLEKLFSKYVDYNFTAGLEDQLDEITTGKESWIKVLELFWKDFNNNVAEVKEKRTREVLDLLNDSLGDLVFDKDDKGNIVRKCQLCNSGMLSLKNSFRGGAFIGCSNYPECKFTRPLSKAKAAAQAQLAEPKFIGKHENGNDIYLKNGRFGPYLQYEKIPEDIEIEKKPKKKRKTKKLKSDINELLKNVSIPKGLGLESIDLEKAKFLCSLPKSLGINPENQKEIILNTGRFGPYLKCEKKSARIENIEEIFS

SEQ ID NO: 184464 - protein, 244 aa, Unknown
  Bacterial polypetide isolated from the Sargasso Sea
MAKKNNNAKYDSSNIQVLKGLEAVKKRPGMYIGDTDDGSGLHHMVFEVLDNCIDEAMAGHCSEIFVKINKDESVTVEDNGRGIPVDVHKKEGVSAAQLILTTLHSGGKFDDNSYKVSGGLHGVGVSVVNALSKKLTLEVHRDGGEYFQEYSEGKPKAKLKKVKKSKKTGTKITFYPSNKIFTSTNFDIEKIHKRIQELSFLNAGVSITVEDKRSSKSKKFKNNGGLSSYVKYLRGRKQEVSEVF

SEQ ID NO: 184465 - protein, 122 aa, Unknown
  Bacterial polypetide isolated from the Sargasso Sea
MEKNEIPKINNNIKPISMYDEMSSSYLSYAMSVIVSRALPDIRDGLKPVHRRIIYAMHKGGFDWSKQFRKSARIVGDVIGKYHPHGDQAVYDALVRMVQEFSMSLPLVDGQGNFGSIDGDPP

SEQ ID NO: 184466 - protein, 434 aa, Unknown
  Bacterial polypetide isolated from the Sargasso Sea
MAKKAYDSKAIEVLSGLDPVKKRPGMYTDTSCPNHLIQEVLDNSVDEALSGYCKRIKVNLYKDNSIEVSDNGRGMPVDLHPEHKLTGVELIMCKLHAGAKFSGEDYGFSGGLHGVGVSVVNALSTKLNVKIKRDSKEYEINFSAGEKDNDLKSIGDVGATNSGTSIRFYPDKQYFETLEINKKSLKHLLKAKAVLCPGLQIDYFDEKKNERIKWIFDEGLSDYLDEFSGCNEKLLDETIILSKASDEQALDVAVNWTEESSNNLLKETYVNLIPTALGGSHLNGFKSGLLEAIKEFCDYRNLIPKGIKINSDDILANCIFVISSKLKNPQFAGQTKERLDSKDHMSFVSSSTKDSLSIWLNQHTEEGEKIADLAIAAAQKRIKSSTKVDRKKTFKGPALPGKLSDCNCDNIEENELFLVEGDSAGGSAKQARDR

SEQ ID NO: 184467 - protein, 506 aa, Unknown
  Bacterial polypetide isolated from the Sargasso Sea
MTKITKSKYQADSIKVLKGLEAVRKRPGMYIGDTDDGTGLHHMVYEVVDNSIDEALAGYCKNIDIYINSNGTITVKDDGRGIPVDLHKGEKKSAAEVIMTQLHSGGKFDHDSYKVSGGLHGVGVSVVNALSESLKLEICRDGKKYFIEFKNGDAKSNLKVIGNSKETGTQITFLPSNEIFSSIKFNSSIIQKRMRELAFLNKGIKISIHDLTSKKSKINIFKFEGGILEFVNFLDEKREKLNNKNGNLLFKKPILIEGKKDDVEVECALQWNAMYGEDVYPYTNNVYQKDGGTHLLGFRSALTRVVNKYASELNLLKKNKISISGDDVKEGLTSVISIKIPDPKFSSQTKDKLVSSQVRNIVETIINERLSLWFDQNPSIAKVILAKIIQAAQARDVARKARETVRRKGALELTGLPGKLADCQNSSQEGTELFIVEGDSAGGSAKQGRNREFQAVLPLRGKILNTYVDTNGSKKNGNRNEQKTKALSKMISSNEIMTLINALGLD

SEQ ID NO: 184468 - protein, 260 aa, Unknown
  Bacterial polypetide isolated from the Sargasso Sea
MIEDKNQNIIPVNIEDEMKGAYIDYSMSVIVSRALPDVRDGLKPVHRRVLYGMLNMGVNYNKSYKKSARIVGEVMGKYHPHGDSSIYDTMVRMAQSWSLRYTLVDGQGNFGSIDGDSPAAMRYTEAKLKRISDELLNDINKETVDFQPNFDDSLNEPTVLPSKIPNLLVNGSSGIAVGMATNMPPHNLSEVIDGIVHYIDNNEISIEELMKYIKAPDFPTGGIIYGYQGVKSAFETGKGRIVMRAKATIESNEKEKDQII

SEQ ID NO: 184469 - protein, 452 aa, Unknown
  Bacterial polypetide isolated from the Sargasso Sea
MTDKISQINLEDEMKKSYLDYAMSVIIGRALPDVRDGLKPVHRRVLYAMKVLGNDHTKAYKKSARIVGDVIGKYHPHGDSAVYETIVRMAQDFSLRYTLVDGQGNFGSIDGDRAAAMRYTEVRMEKITQELLADIDKDTVDFIPNYDESEEEPAVLPTRLPNLLINGSAGIAVGMATNIPPHNLKEIIDGCLFILDNEQASIDDLIKLIPAPDFPTAATIHGIDGIKQAYETGRGRVHVRAKTSIEENGDRESIVVSELPYQVNKARLIEKIAELVRDKKIEGISEIRDESDKDGLRVVIDLKRGTVSDVLLNNLYKQTLLESTFSINMVALSNGQPKLMNLKGMLDAFLSHRRDVVTKRTIYELNRSINRAHILEGQTIALTNIDEMIAIIKKSKTPAEAQKALVSKLWKVGKVKDMLKKAGNVSTIPKHLLNIENFGIEKSKYRLSSEQA

SEQ ID NO: 184470 - protein, 536 aa, Unknown
  Bacterial polypetide isolated from the Sargasso Sea
MAKNTYDSKAIEVLSGLDPVRKRPGMYTDTSCPNHLIQEVLDNSVDEAIAGHCSNIKIKLYKNGFIEVSDDGRGMPVDIHPEHKLTGVELILCKLHAGAKFSGDEYSFSGGLHGVGVSVVNALSESLKVNVKRDSKEHEMNFNDGNKKNELKVISDVGPRNTGTKIQFKPNAKYFESIDVDNKQLKHLLKAKAVLCPGLTIDFFDEKRKEKIKWFFEDGLKSYLEETSSETNLLLDVPILNSKKSEEHEVEFVINWSEKPSKNKLDETYVNLIPTSQGGSHLNGFKSGLLDSMKEFCEIRKLLPKGLKLNADDVINNAIFVISSKMKNPQFAGQTKERLDSKEHMSFVSSSTKDVLSIWFNKHTEEGEKIAELAIISAQARAKASKTVERKKTFKGPALPGKLSDCNSEDLNKTELFLVEGDSAGGSAKQARERSFQAIMPLRGKILNTWDLESDEIIKSQEIKNLSTAIGVTPGNSDISTLRYGKICILADADSDGLHIATLLCALFLRHFKPLVNDGRIYIAMPPLYRVDCGKE

SEQ ID NO: 184471 - protein, 554 aa, Unknown
  Bacterial polypetide isolated from the Sargasso Sea
IKVVLNADGTVTVKDNGRGIPVDIHKSEGVPAAQLIMTELHAGGKFDQNSYKVSGGLHGVGVSVVNALSKYLELEINRDGKVYSMLFKDGSVEKKLKIIGDSNKNENNFFTGTKITFLPSERTFKNIDFNYKIIEKRLRELAFLNTGVNIVLKDKRAVKEIIKNFKYDGGINEYVKFLNKGKNVIHNDSIFFSANKNNITLECSLQWTDSYHENTLCFTNNISQRDGGTHLAGFRGALTRSIVNYVNKNTKNSANITGDDAREGLTCVISVKLPDPKFSSQTKEKLVSSEVRPVVESVSLERLEQWMEENPNEIKKIIDKIVEASNAREAARKARELTRRKTGLENSSLPGKLADCQEKNPEFSELFIVEGDSAGGSAKQGRDRKNQAILPLRGKILNVERANPKQILTSNEIGILITAIGAGVGNPSGNEEADKNEGKFDVNKMRYHKVIIMTDADVDGSHIRTLLLTFFYRHMKPMIESGRLFIAQPPLYRSKRGNSIQYIKNEEEMEQYLINEGSKNLIFESTSSQKKVIQISNQDLIKLINISKEVLRLV

SEQ ID NO: 184472 - protein, 431 aa, Unknown
  Bacterial polypetide isolated from the Sargasso Sea
MIDAALAREAARKAREMTRRKGALDVAGLPGKLADCQEKDPAESEIYIVEGDSAGGSAKQGRNRKNQAILPLKGKILNVEKARFDKMLSSAEIGTLIKALGCGIGNEEFDPANLRYHRIIIMTDADVDGSHIRTLLLTFFFRQMRELVERGHIFIAQPPLYKIRKGKQEQYLKDDIELANFQTQVALEGASLFVNPNSPAIKEEPLEALVNQYNETYSIISRLARLYPTEILEAMIVNRQIADNVFESEEDMNSWLEDLSVCLKEVQPGVSANYTFNAHFLSERKKYVPEATLNLHGLEKSYVFNFDFFGSAEYNSISNLGKTLRGLIEKGAYVQRGERTCEVSKFSEAIEWLKKEAMRGVYLQRYKGLGEMNPGQLWETTMDPESRRMLQVTIDDAIGADQLFNTLMGDQVDPRREFIEENALSADNLDI

SEQ ID NO: 184473 - protein, 345 aa, Unknown
  Bacterial polypetide isolated from the Sargasso Sea
MGELAKEILPVNIEDELKQSYLDYAMSVIVGRALPDVRDGLKPVHRRVLYAMSELGNDWNKPYLKSARVVGDVIGKYHPHGDSAVYDTIVRMAQNFSMRYPLVDGQGNFGSIDGDNAAAMRYTEVRMAKLTHELLADLDKETVDWVPNYDGKEQIPDVLPTKIPHLLVNGSSGIAVGMATNIPPHNLTEVINGCLAVISNPDISIDELMEFIPGPDFPTAGIINGRAGIVEAYRTGRGRIYVRARCEIEDIDKVGGRQQIVISELPYQLNKARLIEKIAELVKEKNSKVLPSCATSPTRTVFAWSSSCVVAKCLRSYSTTSIPRPRCRACSASTWSVCSTVSRRF

SEQ ID NO: 184474 - protein, 557 aa, Unknown
  Bacterial polypetide isolated from the Sargasso Sea
MSDDNITENHETIAIADELKKSYLDYAMSVIVSRALPDVRDGLKPVHRRILYAMIKGGYDWSKPYKKSARIVGDVMGKYHPHGDAAIYESMVRLAQDFSMRVPLIDGQGNFGSIDGDPAAAMRYTEARLDKVSEFLLRDIDFETVDYAPNYDESQLEPQVLPAEYPNLLVNGAGGIAVGMATNIPPHNPAEVIDACISYVDNPEISIEDLMTILPGPDFPTGALIMGQAGIQSAYETGKGSIVMRSKAEIIENNNRSQIIISEIPYQVNKSQLLERVGELVREKTIEGIQDLRDESDRDGLRIVVEIKRDSDPNVILNQLFRHTRFQTAFSVNLLALNAGKPEQMGLKEVLSAFVAFREEVIYKRTRFHLNKARERAHILAGLMVALTSIDEVISLIRSSPDADTAKKSLTSKAWPVLGIEEFIKIIDDPQHIVKDGKYHLSEEQAKAILELRLQRLTGMERDKLVQETQELAVKITEYLEILSSKEVLVKLLKSELIATKEKLDGKRRTEISDHAIDADDEDLIQQEDMVVTVSHKGYIKRVPLDSYRAQRRGGKG

SEQ ID NO: 184475 - protein, 383 aa, Unknown
  Bacterial polypetide isolated from the Sargasso Sea
AMQWNDSYNENVLCYTNNIPQKDGGTHLSGFRSSLTRVLKAFIKKEELNKNVPVDLLGEDVREGLIAVISVKVPDPKFSSQTKEKLVSSEVESIVSSVLNKGLNEFLLENPKEAHAILSKVSEAALAREAARKAREMTRRKGVLELAGLPGKLADCQEKDPALSEIYLVEGDSAGGSAKQGRNRKYQAILPLKGKILNVQKARIDKVLSSAEIGTLVKAMGCGIGTEDFDIDKLRYHRIIIMTDADVDGSHIRTLLLTFFYQQYFDILEKGHVYIAMPPLYKITKGKSFVYASDEDEKDKAIKDFSKSGSKGIDVQRYKGLGEMNPDQLWETTMDPENRRMMRVDIKDAQDASDMFETLMGDDVEPRRDFIESNALSVSNLDI

SEQ ID NO: 184476 - protein, 444 aa, Unknown
  Bacterial polypetide isolated from the Sargasso Sea
NYDSESIEVLSGLDPVRKRPGMYTDTSKPNHLIQEVLDNSIDEALVGHCSKIKVTIHKDGYISVIDDGRGMPVDIHPEHKVSGVELIMCKLHAGAKFSGEDYNFSGGLHGVGVSVVNALSKKLSVEIKRDGHKFEMNFNGGEKISDLKKVGDIGARNTGTAINFLPDDQYFETTKIDKSNLKHLLKAKAVLCSGLTVEYFDEKKNEKILWNYESGLISYLSESSGDLELLLDESISCSKSGDENALDFVLNWSTKPVKNLMNESYVNLIPTAQGGSHLNGFKAGLLESVKEFCEFRNLIPKGLKITADDVVQHSTFVVSSKLTNPQFAGQTKERLDSKDHQTFVYSTTKDILSIWFNQHTEEGEKLADLAIASAQARTKETKVVDRKKSFQGPALPGKLSDCNSTDLSETELFFVEGDSAGGSAKQSRERKFQAIMPLRGKILN

SEQ ID NO: 184477 - protein, 484 aa, Unknown
  Bacterial polypetide isolated from the Sargasso Sea
FMPDGEVFNTTRFEYDIIAERLRELAYLNKGLEINLRDQREEEGQSDSFKFKGGLSDFVKYLDEQNNPLHNKVITVTKEGGEIPVDVALRYGNTYNDNILTFVNNINTIEGGTHLSGFRSALTRAMNNHASKNNLIKTKKTEKLSLTGEDFREGLTAIISVKVPEPQFEGQTKTKLGNGEVKGLVDKVVYEGILDFLEENPSIGRKVIEKALLAARSRSAARKARELIRRKSALGGSSLPGKLADCSNKDPVFCELYLVEGDSAGGSAKQGRDRKNQAILPLRGKVINSEKARVDKLLSNNEIQSIITALGTGFGGGDEETGERSAGDFNIEKIRYHKIIIMTDADVDGSHIRTLLLTFFYRKMKQLIDGGYLYLALPPLYRVHQGKKAAYAYDDNERDLLIERMKKDNKNTKIGIQRYKGLGEMNPGQLWDTTMDPEKRTLLQVTVESAEAAAVTFQNLMGSDVEARRTFIEKNAKFVANLDI

SEQ ID NO: 184478 - protein, 535 aa, Unknown
  Bacterial polypetide isolated from the Sargasso Sea
MDLGRDNILDKQLVKELEESYLNYSMSVIMSRALPDARDGLKPVHRRILFSMSEMSAMWNRPYKKSARVVGEVLGKYHPHGDSSIYDALVRMAQEFSMRHELVQGQGNFGSVDGDRAAAMRYTESRMSRIGSELLRDIEKETIPWTTNFDETLKEPAVLPAVYPNLLVNGSEGIAVGMATKIPPHNLSELVDGLVELVDNPECEAKDLIKHIKGPDFPTAGKALGIKGIQDAYETGRGKVIMQGRAHVEPSNRGRDSLIITELPYQVNKANLIEKIAELARDKKIEGIVELRDESDKDGMRVVVETKRDAVPEVVLNQLYKQTQLQDTFGIILLALVDGTPKVMSLKELLEVFISFRLDVVVKRTEFDLKKAEARAHILEGLKIALRNIDKIVETIKKSKDPITARQSLMEGFGLSEIQSQAILDMRLQRLTGLETDKIISEYKDIIQHIAELKGILESESKRVSIIKEELLEIKEKYGEERRTEIIEDFTSLSIEDMIAEEEMVLTITHNGYIKRTSLSTYRSQRRGGRGVQGA

SEQ ID NO: 184479 - protein, 169 aa, Unknown
  Bacterial polypetide isolated from the Sargasso Sea
CGFGEDEDDPNSFNPEKLRYHKIVIMTDADVDGSHIRTLLLTFFWRKMKSLVQGGYLYMAMPPLYKLKQGKKERYAYTDEERDNILRRLESENKTKIDIQRYKGLGEMNAEQLWETTMNAETRTLIQVTVDHIMEEETNVRFRELMGSEVEHRRKFITERAKFATNIDI

SEQ ID NO: 184480 - protein, 685 aa, Unknown
  Bacterial polypetide isolated from the Sargasso Sea
MTNKNTYQADSIKVLKGLEAVRKRPGMYIGDTDDGTGLHHMVYEVVDNSIDEALAGHCKNINVRINADGTVTVSDDGRGIPVDIHKSEKKSAAEVIMTQLHAGGKFDHDSYKVSGGLHGVGVSVVNALSKKLHLEINRDSKKYFIEFENGEAKAPLKAIGKSKQSGTKITFLPSTEIFSTVKFSANILIKRMRELAFLNKGIKIIFIDASLKKEKIFEFKFDGGVIEFVDFLDEKREKLQNKNGNDLFRKPIYIEGKKNNIEIECSLKWNAGYGEEIFPYTNNIYQKDGGTHLLGFRSALTRVVNKYANEHNLLKKNKLAISGDDIKEGLTCVLSTKIPDPKFSSQTKDKLVSSEVRMIVETVVNEKLSTWFDQNPTVTKIILAKIIQAAMARDVARKARENVRRKGALELSGLPGKLADCQIGKQEGTELFIVEGDSAGGSAKQGRNRSNQAVLPLRGKILNTYVEDLTVKKNGNGNGSDKRTKALSKMISSNEIVTLINALGLDPKAEEIDLKDLRYGKIIIMTDADVDGSHIRALLLTFFNNEPFNKLIENGHIYLAQPPLFKINKGTKGIYIKDEKELEDYILNNNKEIKKIKKGTKEFTKALDLEKSKMNIQRFKGLGEMNPEELWSTTLDPETRNLLQVQYSKDLKKDQSLIHTLMGNDVALRKDFIVSNAINVQNLDI

SEQ ID NO: 184481 - protein, 379 aa, Unknown
  Bacterial polypetide isolated from the Sargasso Sea
MDWSCAWVDSDFDNIQESYVNLIPTSQGGTHVNAFRNAVIDSIRNYCTEKKLITKQIKILPDDVWRHITYIVSLKMMNPQFAGQTKNKLQSNNISSELTSKIKDNFDIWLNKNPQKAEQIAKHVIANAELRLDSESHKPKLSTTKNLLLPSRLADCTLNDSRVTELFIVEGDSAGGSAKQARDKSFQAILPLRGKILNTWEINHTKILDSKEVKDISLSIGVQPGSDDLSNLRYGKICILADADSDGLHIATLLTALFLKHFKPLIKNNHIYISKPPLFRIDYKRDTHYVLDEKEKKKLFTKLKVTEDDVSVTRFKGLGEMNPSQLRETTLQINTRKLALLKLSSDTADMKLMNMLLGKKNSGERKLWLEKKGNLAQLD

SEQ ID NO: 184482 - protein, 191 aa, Unknown
  Bacterial polypetide isolated from the Sargasso Sea
MEKNEISKVNNNIKPISMYDEMSSSYLSYAMSVIVSRALPDIRDGLKPVHRRIIYAMHKGGFDWSKQFRKSARIVGDVIGKYHPHGDQAVYDALVRMVQEFSMSVPLVDGQGNFGSIDGDPPAAMRYTETKLAKVSQFLIDDIEKNTVAFKSNYDETEQEPVVLPAQYPNLLVNGAGGIAVGMATSIPPHN

SEQ ID NO: 184483 - protein, 351 aa, Unknown
  Bacterial polypetide isolated from the Sargasso Sea
MSSSYLSYAMSVIISRALPDIRDGLKPVHRRIIYAMYKGGFDWTKQFRKSARIVGDVIGKYHPHGDQAVYDALVRMVQEFSMNTPLVDGQGNFGSIDGDPPAAMRYTETRLSKIAQYLIDDIEKSTINFKSNYDETEKEPEVLPAQYPNLLVNGAGGIAVGMATSIPPHNLGEIINGTLALIEDKDIKISQLMKHIPGPDFPTGGVIIGKDIIKQGYKSGRGSFKIRGEINIEQIKGGKERLVITSIPYQVNKSTLNEKIAELVRDKKIEGIRDIRDESNREGIRVAIDLRSNVEPETIKRQLYKYTSIESSFGFNTLAIVDKKPKTCNLKDFLENFLKFREDVVIKKTKH

SEQ ID NO: 184484 - protein, 146 aa, Unknown
  Bacterial polypetide isolated from the Sargasso Sea
MSSSYLSYAMSVIVSRALPDVRDGLKPVHRRILYAMYKGGYDWSKQFRKSARIVGDVIGKYHPHGDQSVYDALVRMVQDFSMSLPLVDGQGNFGSIDGDPAAAMRYTETRLSKVSQFLIDDIEKKTIDFKSNYDETEKEPTVLPAQ

SEQ ID NO: 184485 - protein, 310 aa, Unknown
  Bacterial polypetide isolated from the Sargasso Sea
MAKTQQNSNYKADSIKVLKGLDAVRKRPGMYIGDTDDGTGLHHMVYEVVDNSIDEALAGYCKKITVEINKDGTISVSDDGRGIPVDFHKTEKKSAAEVIMTQLHAGGKFDHNSYKVSGGLHGVGVSVVNALSEKLELEIERDGKKYFVEFKNGDPKSPLKQIGKSNNTGTKITFLPSKEIFSSIKFSSTIIQKRMRELAFLNKGVNLVVLDKTLKKEKKIEFKFDGGIIEFVNFLNEKKEKLKNKNGNDLFKKPIYLDGDKNGISIECSLEWNSGYSEDMHTYTNNIYQKDGGTHLLGFRSSLTRILNKY

SEQ ID NO: 184486 - protein, 685 aa, Unknown
  Bacterial polypetide isolated from the Sargasso Sea
MSKNNTSEYKADSIKVLKGLEAVRKRPGMYIGDTDDGTGLHHMVYEVVDNSIDEALAGYCKNIVVDINSDGSITVKDDGRGIPVDIHKAEKKSAAEVIMTQLHAGGKFDHDSYKVSGGLHGVGVSVVNALSEKLNLFIERDGKKYFVEFKNGEAKTPLKVIGKSKHTGTHINFLPSKDIFTSTKFSFSIIQKRMRELAFLNKGIQISLNDLTQKKLKNINFKFDGGIIEFVEFLDEQRENLKNKNDNNLFRKPIYIEGTKNNVEVQCSLKWNAGYNEDVYPYTNNIYQKDGGTHLLGFRIALTRVINKYASEQNLLKKNKVTLSGDDVKEGLTCVLSVKIPDPKFSSQTKDKLVSSEVRNIVETIISEKLSIWFDQNPSISKIILTKIIQAAVARDVARKARENVRRKGALELTGLPGKLADCQNSKQEGTELFIVEGDSAGGSAKQGRNRENQAVLPLRGKILNTFTEMNGSKKNGNSNELRTKTLAKMISSNEIVTLINALGLDPKNEEIDLKDLRYGKIIIMTDADVDGSHIRALLLTFLNNKPFNKLIENGHVYLAQPPLYKINKGSKGIYIKDEKDLVSYIIKNSKELKKLKKGSKDFEKYIQKEKSKLNIQRFKGLGEMNPDELWNTTLNPETRNLLQVQYSKNLQKDQNLIKTLMGSDVASRKDFIVDNAINVLNLDI

SEQ ID NO: 184487 - protein, 232 aa, Unknown
  Bacterial polypetide isolated from the Sargasso Sea
MPTKKNSSASKPQKATKKPQKKAPKKTEAESYDSSSITVLKGLEAVKKRPGMYIGDTDDGTGLHHMVYEIVDNSIDEALAGYCDEITVKILSDDCVSVSDNGRGIPTDMHEEGMSAAEVIMTKLHAGGKFDDNSYKVSGGLHGVGVSVVNALSEDLKLTIHRGGKIHEQEYTDGTPKGKLKVTGTTDKTGTEVTFVPSPTTFSDIIFQYDVLETKLRELSYLNAGLKIILID

SEQ ID NO: 184488 - protein, 658 aa, Unknown
  Bacterial polypetide isolated from the Sargasso Sea
GDTDDGTGLHHMVYEVVDNSIDEALAGYCKNINVKINSDGTITVKDDGRGVPVDIHKGEKKSAAEVIMTQLHAGGKFDHDSYKVSGGLHGVGVSVVNALSEKLHLEIYRDGKKHYIEFQNGEAKSPLKIVGKAKITGTQITFLPSKEIFSSIKFSANILIRRMRELAFLNKGIKIIFTDGSQKKEKISEFKFDGGVLEFVEFLDEKRDKLQNKNGNDLFKKPIYIEGKKNNIELECSLKWNAGYSEDIFPYTNNIYQKDGGTHLLGFRSALTRVVNKYANENNLLKKNKLAISGDDIKEGLTCVLSTKIPDPKFSSQTKDKLVSSEVRMIVETLINEKLSIWFDQNPSIAKIILAKVIQAAMARDVARKARENVRRKGALELSGLPGKLADCQIGKQEGTELFIVEGDSAGGSAKQGRNRANQAVLPLRGKILNTYVEDLNVKKNANGNGNGSDQRTKALSKMISSNEIVTLINALGLDPKAQEIDLKDLRYGKIIIMTDADVDGSHIRALLLTFFNNKPFNKLIENGHVYLAQPPLFKINRGSKGIYIKDEKELENYIVNNNKELKKVKKGSKEYNKALETERSKMNIQRFKGLGEMNPEELWSTTLDPETRNLLQVQYSKDQKKDQSLIHTLMGNDVALRKDFIVSNAINVQNLDI

SEQ ID NO: 184489 - protein, 674 aa, Unknown
  Bacterial polypetide isolated from the Sargasso Sea
MDKKNFTSISLQEEMQRSYLEYAMSVIVGRALPDARDGLKPVQRRIIFAMYELGLTPDKPFRKCARVVGDVLGKYHPHGDQAVYDALVKLVQNFSTKYPTLDGHGNFGSVDNDPPAAMRYTETRLAPIAHKGFLEEIASETVNFSNNFDGSQKEPDVLPAQLPFLLLNGSSGIAVGMATNIPPHNLGEIVDGLVALVKNKDISDKKLSNIIKGPDFPTGGELIYSHAIEELYQTGKGSITIRGVVNTEEVNLGKGKHKKNAIIITELPYQINKAGWIEKLAELVNSGKIIGISDIRDESDRDGMRIVIELKKDSNSELVISNLYKKTTLQTNFGAIFLALIKGKPVQLNLKKYLNYFLEFREETIRKRTFYFLKNTLDKLEISEGLSKATKNIKKVIAIIEESENSVQARSKLVENFFLSEKQANSVLDMPLKKLTNLEKNQIDNDIKNLEEKKNYFQKLLNERELLLELLIEELLILKKKYNVIRKTKIIKNINQNQELETLNNQILEDFINKKTKLYIDNRLYLKKMILGNYKKSFEVVNKIIDNKNIQKFICNIEKNIKLIGITNTGKVFNIDWESSINKDYKLDNKILGNIHPSEIINFHSIKKEAKNYLCILNSDGRFKKVLFDEDMIKSNRSFTITKLKNNLKTIDSFISNESKDLIILTSIGRIFKF

SEQ ID NO: 184490 - protein, 596 aa, Unknown
  Bacterial polypetide isolated from the Sargasso Sea
MKTNNTYKADSIKVLKGLEAVRKRPGMYIGDTDDGTGLHHMVYEVVDNSIDEALAGYCKKIEIFLNNNGSITVIDDGRGIPVDIHKGENKSAAEVIMTQLHAGGKFDHDSYKVSGGLHGVGVSVVNALSEKLELEIYRDGKKYYVEFNNGKSKSPLKITGKSKESGTKITFVPSKEIFSSVKFSSQIIEKRMRELAFLNKGLKISVEDKTQKKEKKSEFKYDGGIVEFVEHLDKKREKLNNKNGNDLFKKPIYIQGKKEKIELECSLKWNASYSEDVLPFTNNIYQKDGGTHLLGFRSALTRVVNKYANENNLLKKNKLSISGDDIKEGLTCIISIKIPDPKFSSQTKDKLVSSEVRNIVESILSEKISIWFDQNPSIAKTVLSKIIQAALARDVARKARENVRRKGALELTGLPGKLADCQISKQEGTELFIVEGDSAGGSAKQARNRENQAVLPLRGKILNTYVEEDTKKNNSNGNNHRTKTLSKMISSNEIVTLINAMGLDPKSDNIETKDVRYGKIIIMTDADVDGSHIRALLLTFFNNVPFNKLIKEGYIYLAQPPLFKINKGTKGIYIKDEKELEKYIQKNSKILSNLKK

SEQ ID NO: 184491 - protein, 291 aa, Unknown
  Bacterial polypetide isolated from the Sargasso Sea
MTNKNTYQADSIKVLKGLEAVRKRPGMYIGDTDDGTGLHHMVYEVVDNSIDEALAGYCKNINVKINSDGTITVNDDGRGIPVDIHKGEKKSAAEVIMTQLHAGGKFDHDSYKVSGGLHGVGVSVVNALSEKLQLEIFRDGKKYYIEFVNGEATAPLKVIGKAKYTGTQITFLPSKEIFSSTKFSANILIKRMRELAFLNKGIKIIFIDASQKKEKTSEFKFDGGVLEFVDFLDEKREILQNKNGNNLFRKPIYIEGTRNNIELECSLKWNAGYTEDIYPYTNNIYQKDGGT

SEQ ID NO: 184492 - protein, 180 aa, Unknown
  Bacterial polypetide isolated from the Sargasso Sea
QGNFGNIDGDNAAAMRYTEARMTKVAERLLEGIDEETVDFRETYDGEGKEPLVLPAAFPNLLANGAHGIAVGMATSIPPHNICEICEALLHLIKHPNASFEKLLEYIPGPDFPTGGWLVENKENIIEAYKTGRGSFRIRADWEKEELKNGTYQIIIKEIPFKSKNRNLWRNLQNYLKVKN

SEQ ID NO: 184493 - protein, 278 aa, Unknown
  Bacterial polypetide isolated from the Sargasso Sea
MSKNSALNTKPSYGADSIKVLKGLDAVRKRPGMYIGDTDDGTGLHHMVFEVIDNAIDEALAGHCKNITVIMNKDNTITVEDDGRGIPVDTHKTEKISAAEVIMTQLHAGGKFDHDSYKVSGGLHGVGVSVVNALSEKLELNIYRDGKEFEVVFKNGNTTKSLRQIGKTKKRGTKINFLPSKEVFSSTKFSSSTIEKRIRELAFLNKGICVKLIDQTLKKEKEFIHKYDGGIVEFVKHINNKKPILVNKNEKEVFKKPVYVTAKKNNVLVECALEWNAG

SEQ ID NO: 184494 - protein, 247 aa, Unknown
  Bacterial polypetide isolated from the Sargasso Sea
MDLGRDNILDKQLVKELEESYLNYSMSVIMSRALPDARDGLKPVHRRILFSMSEMSAMWNRPYKKSARVVGEVLGKYHPHGDSSIYDALVRMAQEFSMRHELVQGQGNFGSVDGDRAAAMRYTESRMSRIGSELLRDIEKETIPWTTNFDETLKEPAVLPAVYPNLLVNGSEGIAVGMATKIPPHNLSELVGGLVELMDNPECETKDLMKHIKGPDFPTAGKALGIKEFKMHMKQEEERLLCREGHT

SEQ ID NO: 184495 - protein, 381 aa, Unknown
  Bacterial polypetide isolated from the Sargasso Sea
MVEGESAGGSAKQGRDRHFQAILPLKGKILNVEKARLDKVLSSEEIIILISALGCGIKGEDWQEEKLRYHRIIIMTDADVDGSHIRTLILTLFYRQMPELIEKGYIYIAQPPLYKLKKGKQETYVKDDSELRELLVAEILDDAKLVLNKKGESITGQALGKFISQHEKIQSTLRGLTHIYPVELLEGVKHTAQLKGLDDKKALKKWTSSIEEYLNEKAEQGSAWKVEAISREGSDEMEPRVSLTKHGTESEWLLNKSFFKSKAYKDISSHGADMTDMFSKEAHFEINGKQIYIDNFEHALEEVLQISERSFTKSRYKGLGEMNAEQLWDTTMNPDMRILGQVTIDDAATASSLFEALMGDEVQPRKEFIDENAKLVVNLDV

SEQ ID NO: 184496 - protein, 648 aa, Unknown
  Bacterial polypetide isolated from the Sargasso Sea
MALKKTKNQYSADSIQALEGMEHVRKRPSMYIGDVGSRGLHHLVYEVVDNSIDEAMAGHCSEISIQINKDKTISIEDNGRGIPVGIHKKEGVSALEVVMTKIGAGGKFDKDSYKVSGGLHGVGVSVVNALSEQLTANVYRDGKEYEQTYRKGKPDSKVKEVGKSDKNGTLVTFKPDKDIFKEVIDFEYEILSNRMRELSFLNKGITISITDDRVETKKGEKKSETFHSKEGLSEFIKYLDESREPIISSIIKMEGEKNNIPVEVAMIYNSSFSENLHSYVNNINTHEGGTHLSGFRRGLTHTLKKYADSSGLTDKLKFDISGDDFREGLTAVISVKVAEPQFEGQTKTKLGNREVSSAVSQAVSQMLENYLEENPDDSKIIVQKVILAAQARHAARQAREMIQRKTVMTGGGLPGKLSDCSETDPMKCEVFLVEGDSAGGTAKQGRDRVFQAILPLRGKILNVEKAQQHRVFENEEIRNIYTALGVSVGTEEDSKALNLEKLRYNKIIIMCDADVDGSHISTLILTFFFRYMRELVEQGNIYIATPPLYLVKKGNKKLYAWDDDERDKIAKDLGTGVSIQRYKGLGEMNADQLWDTTMNPETRTLRQISLNFENSQEAERWFSTLMGDDVPPRRKFIEDNAVYANIDV

SEQ ID NO: 184497 - protein, 154 aa, Unknown
  Bacterial polypetide isolated from the Sargasso Sea
MEKNEIPKINNNIKPISMYDEMSSSYLSYAMSVIVSRALPDIRDGLKPVHRRIIYAMHKGGFDWSKQFRKSARIVGDVIGKYHPHGDQAVYDALVRMVQEFSMSLPLVDGQGNFGSIDGDPPAAMRYTETKLAKVSQFLIDDIEKNTVSFKSNY

SEQ ID NO: 184498 - protein, 514 aa, Unknown
  Bacterial polypetide isolated from the Sargasso Sea
NFLPSKEIFSSTKFSFSILQKRMRELAFLNKGIKISLNDLTQKKIKSVNFKFDGGIIEFVEYLDEKREKLKNKNDNDLFKKPIYIEGIKNNIDIQCSLKWNAGYNEDVYPYTNNIYQKDGGTHILGFRTALTRVINKYASEQNLLKKNKVSLSGDDVKEGLTCVLSVKIPDPKFSSQTKDKLVSSEVRNIVETIISEKLSIWFDQNPSISKIILTKIIQAAVARDVARKARENVRRKGALELTGLPGKLADCQNSKQEGTELFIVEGDSAGGSAKQGRNRENQAVLPLRGKILNTFTEINGSKKNGNSNDLRTKTLSKMISSNEIVTLINALGLDPKNEEIDLKDLRYGKIIIMTDADVDGSHIRALLLTFFNNKPFNKLIEQGHVYLAQPPLFKINKGSKGIYIKNEKELENYIIKNSKDIKKIKKGSKDYEKFIQAEKSKLNIQRFKGLGEMNPDELWNTTLNPETRNLLQVQYSKNLQKDQNLIKTLMGSDVSSRKDFIVDNAINVLNLDI

SEQ ID NO: 184499 - protein, 487 aa, Unknown
  Bacterial polypetide isolated from the Sargasso Sea
MWWNDSYHENVLPFTNNIPQRDGGAHTAGFRGALTRTINSYAQASGIAKKEKINFTGDDAREGLTCVLSVKVPDPKFSSQTKDKLVSSEVRPAVESLMNEKLGDWFEENPNEAKLIVSKIIEAALAREAARKARELTRRKTALDVNYLAGKLKDCAEKDPSKTEVFLVEGDSAGGSAQTGRDRRTQAILPLRGKILNVERARFDRMLNSQEIGNLVMALGTGIGRDEFDINKLRYHKIVIMTDADVDGAHIRTLLLTFFYRQMPELVEGGYLYIAQPPLYKVSRGKSEVYLKDQSALDDYLVQQGIEGAVLKIGSNADIAGQDLARIVDEARQLDKVLEAFPTQYPRHILEQAAIAGAFVPGAVDKDLQGTADNIATRLNLIALEYEQGWSGRITQDQGIRLARVLRGVEELRTLDGPMLRSGEARKTGTFTESLKEVYQSPATLIRKDQSQTIYGPLELLNSILKEGEKGLTLQRYKGLGEMNPDQ

SEQ ID NO: 184500 - protein, 422 aa, Unknown
  Bacterial polypetide isolated from the Sargasso Sea
MSSSYLSYAMSVIVSRALPDIRDGLKPVHRRIIYAMHKGGFDWSKQYRKSARIVGDVIGKYHPHGDQAVYDALVRMVQDFSMSLPLIDGQGNFGSVDGDPPAAMRYTETRLAKISQNLIDDIDKDTVEFKSNYDETEKEPEVLPAQYPNLLVNGAGGIAVGMATSIPPHNLSEVINATLALIDNKDIKINELMKHIPGPDFPTGGTIIGKDIIKTGYKTGRGSFKVRGDVSIEQLKNGKERLVINSIPYQINKSVLNEKIVELIRNKKIDGISDIRDESNREGIRVAIDLKRNIEPETVKRQLYKYTSLESSFSFNTLAIVDRKPKNCNLKDFLESFLKFREDVVVKKTKFDLKKAEDRAHILIGLSVSVENIDKVIKIIRSSKNPEQAKNSLLNTSWKIKSSQKLIKLVDNKKNKNSYSLS

SEQ ID NO: 184501 - protein, 448 aa, Unknown
  Bacterial polypetide isolated from the Sargasso Sea
EENGDRESIIISELPYQVNKARLIEKIAELVRDKKLEGISEIRDESDKDGLRVAIDLKRGTVSDVLLNNLYKQTVLESTFSINMVALSNGQPQLMNLKSMLDAFLGHRRDVVTKRTIYQLNRSINRAHILEGQTIALTNIDEMIAIIKKSKTPADAQRALVSKLWKVGKVKEMIKKAGNVSTVPKHLINIETFGIEKRGYRLSSEQAKAILDLKLNRLTGLEQESIFNEYSELLEDIKRFTLILSNPDELKSVIRKELIETQETYGDERRTEIVEFYSDLTDEDLIPEEDLIVTLSKEGYAKTQPLDAYQAQNRGGTGKRAASLKDEDFVSKLFVANTHDTLLCFSSYGKVYWIKVYRLPRGGRNAKGRPIVNLLPLEKDERIQAVLPVKEFNDDQFIFMATESGSVKKTKLSAYSRPMKSGIKAIKLREGDRVVNAEITDGSKEIML

SEQ ID NO: 184502 - protein, 805 aa, Unknown
  Bacterial polypetide isolated from the Sargasso Sea
MSENSYDSSSIKVLKGLDAVRKRPGMYIGDTDDGTGLHHMVFEVVDNSIDEALAGHCTDITITIHVDGSVSVRDDGRGIPVAIHPEEGVSAAEVIMTVLHAGGKFDDNSYKVSGGLHGVGVSVVNALSKKLQLTIRREGKVHEQFYTHGVPDEPIKVIGDATKTGTEIRFWPSEETFSDVEFHFEILAKRVRELSFLNSGVGIRLVDERDNKNEFFKYEGGISAFVDYLNRNKTPVNKDVFHFMQERDDGITVEVAMQWNDGYQESIFCFTNNIPQRDGGTHLAGFRSALTRNLNNYMENEGYNKKGKTNATGDDAREGLTAVISVKVPDPKFSSQTKDKLVSSEVKAAVEQTMGEKLNDYLLENPADAKLIVGKIVDAARAREAARKAREMTRRKGALDLGGLPGKLADCQEKDPGLSEIYIVEGDSAGGSAKQGRNRKNQAILPLKGKILNVEKARFDKMLSSQEVATLITALGCGIGRDEYNPDKTRYHNIIIMTDADVDGSHIRTLLLTFFFRQMPELIERGYVYIAQPPLFKVKKGKQEQYLKDEAALTQYLTTQALDGTSIYPSQGAPGMSGEPLERLVTQYREVEAIVARLEQRYPTQITNRMLYHPMINNEMLADEGKMKEWIDAFIHELVELENSGVLYSGEPVLDPERKVYLPKITIRKHGIDTHYLFSYDFFQSTDYQRIGKLGAALEGLIEVGGYVQRGDRVKEVGSFIEALDWTIGEAKRGLYIQRYKGLGEMNPEQLWETTMDPESRRMLQVTIDDAVGADQLFTCLMGDQVEPRRDFIEANALNVANLDV

SEQ ID NO: 184503 - protein, 381 aa, Unknown
  Bacterial polypetide isolated from the Sargasso Sea
MTRKKGALDIAGLPGKLADCQEKDPSLSELFIVEGDSAGGSAKQGRDRKTQAILPLKGKILNVEKAQRAKMYSSVEIGTLITALGCGIHDEFDMDNLRYHKIIIMTDADVDGSHIRTLLLTFFYRELQDLINGGYLYIAQPPLYKLKKGKKEEYVLTDDELNNLILSNAVKGAEVRAKNKKKGIEGDGLLNTILDYSNSLSVIEKIEKQAGTIAAKAISLHKPITKTEANSKKKLEVWIKGLSRTASKIAKERGYKASVSIDYDDDGIGYINTEEEIGGVTHHGKIANSFLRSNDYKVFGRVQKAQKAFSGPVVIDNGSEITEYMNIEDCLKQIVNNSKRGLNVQRYKGLGEMNPDQLWETTLDPTTRSLLQVKAEDDAGL

SEQ ID NO: 184504 - protein, 661 aa, Unknown
  Bacterial polypetide isolated from the Sargasso Sea
MSTKKPNAAYSEASIKVLKGLEPVKQRPGMYTRTENPLHIIQEVIDNASDEALGGYGRQITVTLHADHSVSVEDDGRGIPFGIHPEEGVPVVEIVFTRLHAGGKFDKAAGGAYTFSGGLHGVGVSVTNALSTRLDVTVWRDGKVAELSFANGDVAKQLEVRPATKADKKSGTRVTAWANPKYFDSPNLPLGELQRLLRSKAVLLPGVEVTLINEKTGEQQSWKYEDGLRGYLLEGMNGSDLLIPLFEGERYVENSRASEETFAEGEGASWVVAWSEEGTLMRESYVNLIPTPAGGTHESGLRDGLYQAVKSFVELHNLQPKGVKLLAEDVFARVSFVLSAKVLDPQFQGQIKERLNSRDAVKLVSSFSRPALELWLNQHVEHGKKLADLVIKQAQARTRAGQKVEKRKSSGVAVLPGKLTDCESTEIGRNELFLVEGDSAGGSAKMGRDKEYQAILPLRGKVLNTWETERDRLFANNEVHDISVAIGVDPHSPDDKVDLSNLRYGKICILSDADVDGSHIQVLLLTLFFKHFPQLIERGHVCVARPPLFRVDAPARGKKPAQKLYALDEGELEAILDKLRKDGVRDTQWSISRFKGLGEMSAEQLWDTTMNPDTRRLTPVALGELDYDATVARMTMLMGKGEAASRRSWLEEKGNEVEADI

SEQ ID NO: 184505 - protein, 443 aa, Unknown
  Bacterial polypetide isolated from the Sargasso Sea
DDGRGIPVDLHKGEKKSAAEVIMTQLHAGGKFDHDSYKVSGGLHGVGVSVVNALSEKLSLKIFRDKKEYLVEFKDGKALSPLKAKGKTNKTGTLINFLPSKEVFSNTKFISSILQKRMRELAFLNKGLCIILVDQTVKKEKEYKNKYEGGIQEFVEFLDKNKSALVNKNDLNLFKKPIYISGSKDNIEVECSLKWNAGYSEEMLPFTNNIHQKDGGTHLLGFRSALTRVINKYSNEYNKKNKLSLTGEDIKEGLTVVLSIKMPDPKFSSQTKDKLVSSEIRLIVENIITDKISMWFDQNPSTIKNVLEKITQAAIARDVARKARDNIRRKGSFEITGLPGKLADCQISKKEGTELYIVEGDSAGGSAKQGRNREFQAVLPLRGKILNTYVNINGRNRGKTAENETKALSKMMSSSEIVTLINALGTGSKDFNLENLRYEKIVI

SEQ ID NO: 184506 - protein, 839 aa, Unknown
  Bacterial polypetide isolated from the Sargasso Sea
MSSSYLSYAMSVIISRALPDVRDGLKPVHRRIIYAMHKGGFDWSKQFRKSARIVGDVIGKYHPHGDQAVYDALVRMVQEFSMSQPLIDGQGNFGSIDGDPPAAMRYTETRLAKISQHLIDEIEKNTVEFKSNYDETEKEPTVLPAQYPNLLVNGAGGIAVGMATSIPPHNLGEVIDGTLALINNKDIKIPELMKFIPGPDFPTGGIIIGKNIIKEGYKSGRGSFKIRGDISVENLKNGRDRLVISSIPYQVNKSNLNERIAELVRDKKIEGIRDIRDESNSQGIRVAIDLRTNVEPETIKRQLFKYTTIESSFGFNTLAIVNNKPKTCNLKDFLENFLQFREDVVIKKTKFDLKKAETRAHILIGLSVSVENLDKIIKIIRSSKNPDDAKNSLLKNKWKITKSQKFLKLIENKKSTSFYSLSVEQVTAILELRLQKLTAIGISEIEDEINKLSNLILQLKKIISSKKELLKVISEDLKNIKDKFSVPRRTKIIDAVLNYDIEETIQKENVIITVTLQGYIKRGALSNVKQQKRGGKGKTGIVTREEDSVVQTLSVSTHTQVLFFSTEGLVFRLKGWKIPEGSASSRGKSLFNILPLKNHQSISSIMPYPEESENNKKLHIIFATAKGKIRKNNLDDFSSINTSGKIAMKLDNDDKIVGVKICSDDQDIILSTKLGKCIRFESKKLRVFKGRSSKGIRGINLQENDSIVSLSILDHDDTKKNGKISKTDKSVKLAKENYILSITENGFGKRTSHYEYRVTNRGGKGIIGIINSSRNGNISSSFPVNEGDDVLISTNKGRVIRTAVKEIRIAGRNTQGVRIIKLSGEEKVVSAIKIDDNLK

SEQ ID NO: 184507 - protein, 628 aa, Unknown
  Bacterial polypetide isolated from the Sargasso Sea
MTNQYTSDAIEVLNGLDPVKRRPGMYTDTTRPNHLGQEVIDNSVDEALAGHATKIEVVLHTDNSLEVTDDGRGMPVDIHPEEGIPGVELILTKLHAGGKFSNKNYQFSGGLHGVGISVVNALSRRVEVTVRRDGQVYDIAFENGFKVEELKVTGTCGRRNTGTRVHFWPEASYFDSANFSNSKLIYLLRAKAVLCPGLRIKFTNKHTNEVHEWYYESGLTDYLKAAVGDNLMLPEEPFIGSFKGQIEAADWAITWLPEGGDAINESYVNLIPTPLGGTHVNGFRQGLLESMREFCEFRNLIPRGIKLSPEDIWDRAAFILSVKMQDPQFAGQTKEKLSSRQSSAFVSGIVRDAFSLWLNSNTELAESLADMCINNAQRRLKAAKKVARKKVTSGPALPGKLTDCSGQDPMRGELFLVEGDSAGGSAKQARDREFQAIMPLRGKILNTWEVDASQVLASQEVHDISVAIGCDPDSNDISELRYGKICILADADSDGLHIATLLCALFLKHYRVLVEQGHVYIAMPPLFRIDIGKDVYYALDEAEKEGILDRITAENKKGKVQVTRFKGLGEMNPLQLRETTMDPNTRRLVQLTIDDVEETDSLMDMLLAKKRSPDRKNWLEDKGDMAVL

SEQ ID NO: 184508 - protein, 758 aa, Unknown
  Bacterial polypetide isolated from the Sargasso Sea
MSDAIKLSLDGVEQMPLRRFTEEAYLNYSMYVIMDRALPHIGDGLKPVQRRIIYAMSELGLSAQSKHKKSARTVGDVLGKYHPHGDSACYEAMVLMAQPFSYRYPLVDGQGNWGAPDDPKSFAAMRYTEARLSKFSEVLLSELGQGTVEWGANFDGTLKEPKVLPARLPHILLNGITGIAVGMATDIPPHNARELVNACVALLDDPKLELEQLMGYVPGPDYPTEAEIITPSADIAKVYETGRGSIKARAVYSVEAGEIVITALPHQASSGKILEQIAAQMQAKKLPMVADLRDESDHENPVRLVVVPRSNRVDCDQLMAHLFATTDLEKSFRVNLNVLGLDGRPRVKGLKDLLTEWLEFRVDTVRRRLEYRLDKVLARLHILEALMIAFLNIDEVIEIIRFHDEPKAELMARFNLTDRQAEAILELKLRHLAKLEEFKIKAEQNELEAEGEKLEQLLGSDRRLKTLIKKELIQDGETYGDDRRSPIVERHESRALTEQELTPSEPVTVVLSEKGWVRCAKGHDIDAESLSYKAGDQYLCSAMGRSNQAAVFIDSSGRAFATDSHSLPSARSQGEPITTRFNMAPGETMQHVILGEDEQCFLLATDAGYGFICTYNDMVSRNKAGKALLSLPTNAKSLPPRSIDRNREMSILAITNEGRMLLFSLEALPQLSKGKGNKIIGIPSERAKNREELMTHLQLVPADTPVTLWAGKRKLTLKPSDLEHYRGERGRRGAKLPRGLQRVDSVELGEGAEVLPSI

SEQ ID NO: 184509 - protein, 383 aa, Unknown
  Bacterial polypetide isolated from the Sargasso Sea
NIEDELKQSYLSYALSVIHGRALPDIRDGLKPVHRRILYAMYDLKNYYNRPYKKSARVVGDVIGKYHPHGDSAVYDAMVRMAQDFSMRYPIVEGQGNFGSIDGDPPAAMRYTEVRMAKITDQMLNDIEKETVSYSPNYDGSENIPDVLPTKIPNLLVNGSSGIAVGMATNIPPHNITEVLNGCINLINNPKVSIDELIKDISGPDFPTGGTIDGKAGIYEAYKTGRGIIHIRSNTSIEEDKSGKQSLIINEIPFMVNKARMLEKIAELVKEKKIEGITEIRDESDKDGLRVVIEVRKGDSVEVLENNLFAQTQLEQSFGINFTVLSEGQPKEVNLKEMLQAFVKHRKDIITKRTKYDLRKAKERGHVVEGLMVAIANIDEIIK

SEQ ID NO: 184510 - protein, 416 aa, Unknown
  Bacterial polypetide isolated from the Sargasso Sea
MSEDKRSNKISNDYGAEQIQVLEGLEPVRKRPGMYIGSTGPRGLHHLVYEVVDNSVDEALAGHCDHIEIVLRADGSALISDNGRGIPTDIHPRTGKSALETVLTVLHAGGKFGSGGYKVSGGLHGVGISVVNALSEWVNVTVYRDGNEFNQRFEKGISKGELETKKQTGKPSKKGTTICFKPDKTIFSGGIEFEYALLSSRLRELAYLNGGVKIVFRDERNQLSDGSFKEEIYLYQGGIKEYVEYMNAEKESIHPEIIYVDSQKENVYVEAALQWCSDVYSDNILGFANNIRTIDGGTHIEGLKTVLTRTFNNLAKKRGKRKDIEKNLAGENIREGLTVVLSVKVPDPEFEGQTKTKLGNTEVRGIVDSLIGEALTKYMEFNPGILDLILEKAIQSFNAAEAARRARELVRRKRFS

SEQ ID NO: 184511 - protein, 95 aa, Unknown
  Bacterial polypetide isolated from the Sargasso Sea
MQKNEISNNHKIKLISMYDEMSSSYLSYAMSVIVSRALPDIRDGLKPVHRRILFAMHKGGYDWAKQFRKSARIVGDVIGKYHPHGDQSVYDALVR

SEQ ID NO: 184512 - protein, 308 aa, Unknown
  Bacterial polypetide isolated from the Sargasso Sea
LSTIMHRALPDARDGLKPVHRRILFAMRGLKLDATGVFRKCAKIVGEVMGNFHPHGDKAIYDALARLAQDFNVRYPLVEGQGNFGNIDGDNPAAQRYTEARLTKVSELLMDGLSEDSVNFRDNYDGSEQEPVVLPAGFPNLLANGSTGIAVGMATNIPPHNLNELCDAFLHLIKFPNAREETLCDIIPGPDFPTGGIIVEDKSNIIENYRTGRGSFRLRAKYSVEELPRGSWQIVVTEIPFQVQKSKLIEKIADLINEKKLAILADVRDESTDEIRLIFEPRSRSIDPLILMENLFKYTDLETKFSLI

SEQ ID NO: 184513 - protein, 310 aa, Unknown
  Bacterial polypetide isolated from the Sargasso Sea
MSEEEKLIPIKIEDEMKSAYIDYSMSVIVSRALPDVRDGLKPVHRRVLFGMNEMGVRSNSSYKKSARIVGDVMGKYHPHGDSSVYDTMVRMAQEWSLRYLLVDGQGNFGSVDGDSPAAMRYTEARMKKISEELLSDIDKETVDFQLNFDDTIMEPTVLPTRVPNLLINGASGIAVGMATNMPPHNLSEVIDGTITYIENNEIDIEELIQIIKAPDFPTGGTIYGYDGVKEAFLTGKGRVVLRGKAIIENVKDRECIIVTEIPYMVNKADMIRKTAELINDGKIEGISTIRDESDRKGMRIVYVLKRDAIP

SEQ ID NO: 184514 - protein, 325 aa, Unknown
  Bacterial polypetide isolated from the Sargasso Sea
SDDIAKNLIGAISVFLPEPKFQGQTKDKLSNKSIQKVIENAIKDRFETLLSNSPQQTEALLKYVYSITEERLKKKQDKETTRKSAIRKLRLPGKLADCSQGNSEGTELFIVEGDSAGGSAKQARDRRFQAILPLRGKVLNVANSTKSKIRDNQQISDLIQALGCGSGDLYNEENLRYEKIIIMTDADVDGAHIASLLITFFHEEIPEIIDQGKLFLAVPPLYKISQGKKTSYAKDDDDRDDLIKNKFDETKKIEINRFKGLGEMMPAQLKETTMLPGNRTLLRIINPENKKNDSKTVVNNLMGNKPELRFEFIREKANLYDNIRN

SEQ ID NO: 184515 - protein, 419 aa, Unknown
  Bacterial polypetide isolated from the Sargasso Sea
MKWNAGYSEEIFPYTNNIYQKDGGTHLLGFRSALTRVVNKYANEHNLLKKNKLAISGDDIKEGLTCVLSTKIPDPKFSSQTKDKLVSSEVRMIVETVVNEKLSTWFDQNPTVTKIILAKIIQAAMARDVARKARENVRRKGALELSGLPGKLADCQIGKQEGTELFIVEGDSAGGSAKQGRNRSNQAVLPLRGKILNTYVEDLTVNKNGNGNGSDKRTKALSKMISSNEIVTLINALGLDPKVEEIDLKDLRYGKIIIMTDADVDGSHIRALLLTFFNNEPFNKLIENGHIYLAQPPLFKINKGTKGIYIKDEKELEDYILNNNKEIKKIKKGTKEFTKALDLEKSKMNIQRFKGLGEMNPEELWSTTLDPETRNLLQVQYSKDLKKDQSLIHTLMGNDVALRKDFIVSNAINVQNLDI

SEQ ID NO: 184516 - protein, 915 aa, Unknown
  Bacterial polypetide isolated from the Sargasso Sea
MSDLAREITPVNIEEELKSSYLDYAMSVIVGRALPDVRDGLKPVHRRVLYAMNELGNDWNKPYKKSARVVGDVIGKYHPHGDSAVYDTIVRMAQDFSMRYMLVDGQGNFGSVDGDSAAAMRYTEVRMARISHELLADLDKETVDWVPNYDGTEMIPAVMPTKVPNLLVNGSSGIAVGMATNIPPHNLTEIVNGCLALIENGDLTIDELMTYITGPDFPTGGIINGRSGIVQAYRTGRGSVYVRAKAEVEVDEKTSRETIIVHEIPYQVNKARLIEKIAELVKEKKIEGISALRDESDKDGMRIVIEIKRGESGEIVLNNLYKHTQMQTTFGINMVALDNNQPKVMNLKEILDAFLLHRREVVTRRTVFELRKARDRAHILEGLAVALANIDPVIELIRHSATPADAKAGLVARGWELGNVASMLEKAGDDAARPEWLEPEFGIREGHYYLTEQQAQAILDLRLHKLTGLEHEKILEEYQSLLDLIAELLFILASPVRLMEVIRDELLAVREQYGDERRTEISMSSAEINIEDLITPEDVVVTLSHQGYVKYQPLSDYEAQRRGGRGKSATRIKEEDFVERLLVANTHDTILCFSTRGKVYWLKVYQLPEASRGARGRPIINLLPLDEGERITAILPVKEYDADKYVFFATANGTVKKTSLSDFSRPLSSGIRAINLKEGDELIGVDITDGSNEIMLFSDAGKVVRFAEGSGRADADATDEVDTDDDAGNDDDGSDNGEGTESKGTFKGVRPMGRTAAGVRGIKLGAGDKVVSLIVPRGDGAILTATENGYGKRTALDEYPTKSRGTQGVISIKVDERNGKVIDAIQVEDTDQIMLITNGGTLVRTRVSEVSVIGRNTGGVRLIRTGEDETVVGLQRVAESDEDENEVLAVEGEVSEGTDTAADTGAVDAGEAGDE

SEQ ID NO: 184517 - protein, 100 aa, Unknown
  Bacterial polypetide isolated from the Sargasso Sea
MTEKNLNNYQADSIKVLKGLEAVRKRPGMYIGDTDDGTGLHHMVYEVVDNSIDEALAGHCKNIEVEINSDESITVKDDGRGIPKDLHKGEKKSAAEVIMT

SEQ ID NO: 184518 - protein, 290 aa, Unknown
  Bacterial polypetide isolated from the Sargasso Sea
QKQLEELLQNQILLWLNSNKRESLKLIEILIERALLRTDLSKIKKLDRKSIKEKNRLPGKLVDCTSNTIENTELFIVEGDSAGGSAKQARFRSTQAILPLKGKILNVYSVSLSKIADNNEIQNLVHSLGCGLGKNFQLSKLRYEKIILMTDADVDGSHIATLLITFFYKYMRKIIEEGKLYLAMPPLYKISYSQENFFAYNEKDKDKIINNNKGSPQLTRFKGLGEMPANQLKDTTMDPEKRSLIQLKLTDGIKYTKQTEKLFEALMGKKAEKRFNFIQENANFINNLDI

SEQ ID NO: 184519 - protein, 845 aa, Unknown
  Bacterial polypetide isolated from the Sargasso Sea
MNDFAKEIISVNIEDELKQSYLSYALSVIHGRALPDIRDGLKPVHRRILYAMYDLKNFYNRPYKKSARVVGDVIGKYHPHGDSAVYDAMVRMAQDFSMRYPIVEGQGNFGSIDGDPPAAMRYTEVRMSKITDQMLGDIEKETVSFSPNYDGSEDIPDVLPTKIPNLLVNGSSGIAVGMATNIPPHNLNEVLNGCINLINNPKISIDELIKDISGPDFPTGGTIDGKAGIYEAYKTGRGIIHIRSNTSIEEDKSGKQSLIINEIPFMVNKAKMLEKIAELVKEKKIEGITEIRDESDKDGLRVVIEVRKGDSVDVLENNLFAQTQLEQSFGINFTVLSEGQPKEVNLKEMLQAFVKHRKDIITKRTKYDLRKAKDRGHVVEGLMVAIANIDQIISIIKKSKDPKIAAKELCKKVWKSGPVEAILKKVGSDACKPKGLSKDLGLKGKKYKLSEDQAKAILELRLGRLTGLEQDNLSKEFSEIVEKILGLQKILDDKQTLIDLMIGELEEIKENFGDERRTLINDTRRGITNEDLIPEETRVLTVSRSGYAKTQPLDEYREQRRGGQGKAAASVKEEDLIQNLYVLSSHVQILCFTTKGKVFWLKVYEIPVASRTSKGRPLVNMLNLDDDERVSDILPVEEFSEDKFIFMATRKGITKKTSLSLFARKWKSGIKAINLDDDDRLIGTAITDGKKEILLASSAGKLIRFNESKVRPMGRTARGVKGMKLKKDQRLISLNVADPSKTILCVSENGYGKKTELEDFPTHNRGGQGVISIKTSERNGMMVAAALVEEEDGIMLISDKGTMIRTNVSQVPTLSRNTQGVKIITPKEEEKLIECVTIPQEEDQD

SEQ ID NO: 184520 - protein, 370 aa, Unknown
  Bacterial polypetide isolated from the Sargasso Sea
LGFRSSLTRIINKYASEKNLSKKNKVNIGGEDIKEGLTAILSIKMPDPKFSSQTKDKLVSSEIRNIVESIVGDKVSVWFDQNPSIVKAVLDKVLQAALARDLARKARDSVRRKGTLELSGLPGKLADCQISSMEGTELFIVEGDSAGGSAKQGRKREFQAVLPLRGKILNTYVNETKKINGNNGALETKTLSKMMSSNEIVTLINALGTGSKDFDIENLRYEKIIIMTDADVDGSHIRTLLLTFFNNRPFNQLIEKGHLYLAQPPLFKVTRGSKSTYIKNEKDLERYILKSSINNSKKLKKSEIEKFLSDEKQKLNIQRFKGLGEMNPEELWQTTLNPENRTLLKIEYSKGSKEKSKENQNIIKILMGDE

SEQ ID NO: 184521 - protein, 822 aa, Unknown
  Bacterial polypetide isolated from the Sargasso Sea
MTDQYTASSIKVLKGLEAVRKRPGMYIGDTDDGTGLHHMVYEVLDNSIDEALGGYCDSIQLIINKDGSATISDNGRGIPVDQHKTEKVPAAEVIMTQLHAGGKFDQNSYKISGGLHGVGISVVNALSEKLSLTIRRNGKIHTMEFKDGVTTKKLKEIGLMKKTERTGTTVQFWPSKKIFSNTTLILKTLENRVRQLAFLNSNVRITLSDMRTSKVEPIEFFYQGGLTAYVQFLNSRKSTLNKIIPFNGESNGIKVEGALQWNDGYNENMLCFTNNIPQGDGGTHLQGFRSALTRSLVGYSNTVAVAKKGNITISGDDAREGMTCVLSVKVPDPKFSSQTKDKLVSSEVRPVVEKIISEQLSAWLEQTPGEAKKLVSKIIEAASAREAARKARELTRRKNVLETSSLPGKLADCQEKDPSNSELFIVEGDSAGGSAKQGRDRVTQAILPLRGKILNVIKANPHKILENNEISALITAIGAGYGNPPKDKEYNPSDYFNPESMRYHKIVIMTDADVDGSHIRTLLLTFFYQFMRDIITTGRLYIAQPPLYKVKKGNAENYLLDDRELTKFLLLNNKDDLDFNIYNKKKKIQLKEEQLNELIDLASRANSAYQNLDLTYLDAKFFDQILNTGLFFHDFHPNKIEKSQFKIFLSNLNQVYKLENIKFTFQSMISNELIFLQEKEGYNKIIKVALDKLLHLREFISSDSLSLYNKIGFAKSTDTFFGISKLSSKEIFNCNGLVEFFTTLFEMSKKGQSISRYKGLGEMNPDQLWETTLDRTNRKLLQVKLEDQINAERQLIMLMGDDVTDRKNFIQDNSVKVANLDI

SEQ ID NO: 184522 - protein, 918 aa, Unknown
  Bacterial polypetide isolated from the Sargasso Sea
MTDLASSISPINIEDELKNSYLDYAMSVIVGRALPDVRDGLKPVHRRVLFAMSELKNDWNKPYKKSARVVGDVIGKYHPHGDSAVYDTIVRMAQPFSLRYTLVDGQGNFGSVDGDSAAAMRYTEIRMDKLAHQLLADLEKETVDYVPNYDGTEQIPAVLPTRVPNLLINGSSGIAVGMATNIPPHNLTEVVKGCLALIADPALSIEQLMEHIPGPDFPTAAIINGRKGIIDAYKTGRGRAVMRALAEVETEDNGRERIIVTEIPYQVNKAKLIEKIAELVKDKKIEGISGLRDESDKDGMRIVIEIKRGEVGEVVLNNLYAQTQMQCSFGINMVALTNGQPKLFNLKEMLECFILHRREVVTRRTVFELRKARERAHILEALAVALANIDPIIALIKASPTPADAKVKLVEQGWALGHVQGMLEKAGDDAARPEWLEPEFGIRDGLYYLTEQQAQAILELRLHRLTGLEHDKIIAEYEELLEFIAGLLFILRSPERLMEVIKEELEEILAEYGDARRTVINANEIDMSLEDLINEEDVVVTLSHLGYAKYQPLSDYQAQRRGGKGKAATKVKDEDFVEKLLVANTHDTILCFSDFGKMYWLKVYQLPLASRTSRGRPIVNLLPLSDGERITAILPVREYAEDKYIIMATSNGTVKKTALTAYSNPRANGIIAVNLKDGDQLIGVDITNGDDEIMLFSNEGKVVRFKEGEEVAVLDENGNPVLDEEGNPQINFKGVRPMGRGATGVRGIKLEEGQRVVSLIVPKGDGAILTVTENGYGKRTELSEYPSKSRATKGVVSIKVSERNGAVVGAVQVGGNDEIMLISDKGTLVRTPANGVSIIGRNTQGVTIIRTASDEKVVGLQRIDEIQGDEDEVELDENGLPIVPVVTEGDSVHEEPLEDELEEELDEDEELDDEQDED

SEQ ID NO: 184523 - protein, 630 aa, Unknown
  Bacterial polypetide isolated from the Sargasso Sea
MAKNTYDSKAIEVLSGLDPVRKRPGMYTDTSCPNHLIQEVLDNAVDEAIAGHCSNIKIKLHKNGVIEVSDDGRGMPVDIHPDHKLSGVELILCKLHAGAKFSGDEYSFSGGLHGVGVSVVNALSENLQVNVKRDSKEHEMHFNNGNKKSDLKVVGDVGIRNTGTKIQFKPNAKYFESIDVNNKQLKHLLKAKAVLCPGLTIDFFDEKKKEKIKWFFEDGLKSYLEEASSESNLLLDESILTAKKSKEHEVEFVINWSDKPSKNKLDETYVNLIPTAQGGSHLNGFKSGLLDSMKEFCEIRKLLPKGLKLNADDVINNAIFVISSKMQNPQFAGQTKERLDSKEHMSFVSSSTKDVLSIWFNKHTEEGEKIAELAIISAQARAKATNTVERKKTFKGPALPGKLSDCNSEDLNKTELFLVEGDSAGGSAKQARERSFQAIMPLRGKILNTWDLESDEIIKSQEIKNLATAIGVMPGNSDISSLRYGKICILADADSDGLHIATLLCALFLRHFKPLVSDGRIYIAMPPLYRVDCGKEVLYALDEKQKEQIVSEFKSKKGKPKINIQRFKGLGEMNPSQLRETVMDPETRQLVRLSISSTDNANAMMDLLLSKKNAPARKEWLEKKGSLVRI

SEQ ID NO: 184524 - protein, 563 aa, Unknown
  Bacterial polypetide isolated from the Sargasso Sea
GSIDGDPAAAMRYTESRLGKISQYLIDDIEKNTVSFKSNYDETELEPVVLPAQYPNLLVNGAGGIAVGMATSIPPHNLGEVIDGTLALIKNKDIKVNELMKHIPGPDFPTGGVIIGKDIIKQGYKIGRGSFKIRGEINVENLKNGKDRLVITSIPYQINKSNLNERIAELVREKKIEGISDIRDESNREGIRVAIDLRRNVEPETVKRQLYKYTSVESSFGFNSLAIVENKPKTCSLKDFLENFIKFREDVVIKKTKYDLKKAEDRVHILIGLSVSVENIDKVIKIIKSSKNPEEAKNSLLKIKWKINKSLKLIKLVNSKNSKTSYLLSENQVMSILELRLQKLTALGINEIEIEIKKLSELIVNYKKIINSKNELLKVISNDLKLIKEKFSEPRRTKIIDAVLNYNIEETIQKESVIITITLQGYIKRGALSNVKQQKRGGKGKTGIKTRDEDSVVQTLSVNTHTSVLFFSTEGLSYKIKAWKIPEGSPSSKGKSLFNILPLKNHQSVSSIMPFPDDNVDTKNMHIIFATSKGKIRKNNLDDFTSINASGKIAMKLDDGDKI

SEQ ID NO: 184525 - protein, 347 aa, Unknown
  Bacterial polypetide isolated from the Sargasso Sea
EKAQRAKMYSSVEIGSLITALGCGIHDEFDMENLRYHKIIIMTDADVDGSHIRTLLLTFFYRELQDLINGGYLYIAQPPLYKLKKGKKEEYVLTDDELNNLILSNAVKGTEVRAKNKKKGIEGDGLLNTILDYSNSLSVIEKIEKQAGTIAAKAISLHKPITKTEANNKKKLETWVKGLSRTASKIAKERGYKASVSIDYDDDGIGYINTEEEIGGVIHHGKIANSFLRSNDYKVFGRVQKAQKTFSGPVVIDNGTEITEYANIEDCLNQIVNASKRGLNVQRYKGLGEMNPDQLWETTLDPTTRSLLQVKADDDAGLTFETLMGDEVPPRREFIEENALNAGNVDV

SEQ ID NO: 184526 - protein, 446 aa, Unknown
  Bacterial polypetide isolated from the Sargasso Sea
VTFLGDDAREGLTCVLSVKVPDPKFSSQTKDKLVSSEVRPVIEGLVYEKLSDWFEEHPADSKLILNKIIEAAIAREAARKARELTRRKSAMDIANLPGKLADCQERDPSKTELFLVEGDSAGGSAKQGRSRYNQAVLPLRGKILNVERARDDRMLSSQEIGTLITALGTGIGRDEFDIEKLRYHKIIIMTDADVDGAHIRTLLLTFFFRKMRQLVDGGFLYIAQPPLYKVSRGKSEVYLKDEQALERYLIQMGLENATLEKQGGTVIAGSELENVLEQARKIRITLNSFPGKYTRSVLEQAAICGVFIPGAMEENPAGIAKKLAERLDSCSPEFERGWKVELTDGNDVKLHRIIRGVQEVKTLENEVFRSPEAEKLNEMLSQNIDIYNEPSKIRTKTREVFINSPTELFEAILADGEKGLTLQRYKGHGEMNPDQLWETTLDPDAR

SEQ ID NO: 184527 - protein, 124 aa, Unknown
  Bacterial polypetide isolated from the Sargasso Sea
MPKSKKNTNTKNYDSSNIKVLKGLDAVRKRPGMYIGDTDDGTGLHHMVFEVVDNSVDEALAGFCTHIEVIIHEDDSITVKDNGRGIPVDKHKTEKTSAAEVIMTVLHAGGKFDDDSYKVSGGLH

SEQ ID NO: 184528 - protein, 809 aa, Unknown
  Bacterial polypetide isolated from the Sargasso Sea
ILYAMLEGGYDWSKPYRKSARVVGDVMGNYHPHGDSAIYDSMVRMAQDFSMRVKLVDGQGNFGSVDGDPPAAMRYTESRLSKASELLLSDIDKETVSFNPNYDDTQFEPSVLPAEFPNILVNGAGGIAVGMATNIPPHNPVEVVNACKALLENEELTVDELLEIIQGPDFPTAGLIMGRTGIRDAYLSGKGSIIMRSRAEINISSKDRESIIVSEIPYQVNKAQLLEKIGELIKDKTIEGISDIRDESDRKGMRIVIEIKKDSQADIVLNQLWKHTRLQTSFPINMLALDNGQPRQMGLKDILISFINFRKEVVVKRTKFLLNKARNRAHILAGLLVALSSIDEIIQIIRSSKDPEVAKQKLCENLWPASDVEDLIKIISDPVYKVIDQKYKLSELQAKSILELRLQRLTGLEVEKIKEEIETLAEDIKEYLLILSDDLKLKNVLLSQFDLVIKKLFSERKTEISDSLIDQEDEDLIQKEDMVVTVSHRGYIKRVALSTYRAQRRGGKGRAGMKIRDEDMVTSLFVTDTHTPILFFTSSGMVYQLKCYKLPEAAPQALGKAMVNILPLSQDEKIQTVMPMPSNKDKWNDLQIIFATKNGNVRRNQLSDFINIRQNGKIAMKLHNNDELVSVLPCDKDDNIFIATRLGKAIRFDINDVRIFVGRDSSGVRGIKLKPDDFVVSMSLIPKDEEKYVLSVTENGFGKRTLIDDYRRTNRGGQGVANIECSDRNGPVVSSYIVSSLDQIMLVTNAGKLIRMKIHENENNSIRVTGRKTQGVKLFDVDEDEKVMSVALLLESDDENEEENEINKN

SEQ ID NO: 184529 - protein, 839 aa, Unknown
  Bacterial polypetide isolated from the Sargasso Sea
MSSSYLSYAMSVIVSRALPDIRDGLKPVHRRIIYAMHKGGFDWSKQFRKSARIVGDVIGKYHPHGDQAVYDALVRMVQEFSMSLPLVDGQGNFGSIDGDPPAAMRYTETKLAKVSQFLIDDIEKNTVSFKSNYDETEQEPVVLPAQYPNLLVNGAGGIAVGMATSIPPHNLGEVVDGTLALIKNKDIKINELMKHIPGPDFPTGGLIIGKDIIKQGYKTGRGSFKIRGEISVENLKNGKDRLVVSSIPYQINKSNLNERIAELVRDKKIEGISDIRDESNSEGIRVSIDLRRNVEPETVKRQLYKYTSIESSFGFNSLAIVDQKPKTCNLKDFLESFLKFREDVVIKRTKFDLKKAEERVHILLGLSVSVENIDKVIKIIRSSKNPEEAKNSLLKTTWKINQASKLIKLVDSKNYKGKYVLSKDQVISILELRLQKLTAIGINEIEIEIKKLAEEISKYKKIINSKNELLRVISNDLQTIKDKFSVPRRTKIIDAVLNYDIEETIQKESVIITITLQGYIKRGALSGVKQQKRGGKGKTGIKTREEDSVVQTLSVDTHTSLLFFSTEGLAYKVKAWKIPEGSASSKGKSLFNILPLKNHQSISSIMPFPDEDVDKKNMHIIFATSKGKIRKNNLEDFSSINASGKIAMKLDSDDKIVGVKICTDDQDIMLNTKFGKCIRFESKKLRVFKGRSSKGIRGINLSEKDTIVSLSIIDKDDIKKNKSKTKDEKSEVKAKEKFILSITENGYGKRTSHYDFRVTNRGGKGIIGIVNSPRNGNVSSSFPVFEGDQILISTNKGRVIRTAVKEIRIAGRNTQGVRIIKLTGDEKVVSSIKLDDNLV

SEQ ID NO: 184530 - protein, 539 aa, Unknown
  Bacterial polypetide isolated from the Sargasso Sea
LTRENIGIGFANTIRQKDGGTHLAGFRGALTRTINTYIDKEIAKADISVSGEDCREGMTAIISVKHPDPKFSSQTKDKLVSSEVKGVVESVVNKHLKEFLIENPNEAKIIISKIVDSAAAREAARKAREMTRRKGALDIAGLPGKLADCQEKDPALSELFIVEGDSAGGSAKQGRDRKTQAILPLKGKILNVEKAQRAKMYSSAEIGTLITALGCGIHDEFDLEKLRYHKIIIMTDADVDGSHIRTLLLTFFYRELEELIKGGYLYIAQPPLYKLKKGKKEEYVLTDEELTNLIISNAVKGMLVRPKSKKKGLEGDGLLNTVLDYAQSENIIERLSKQTGSIAALAMSLHKPITKTEANNKKKLETWIKGLSRTAAKIAKDKGYRAIVSINYDDDGIAYLNTEEEIGGVKHFGKITSAFLKSNDYKVFDRVQKSRKQFTGKVLIENGEDPREYENIDSCLSDILLSSKRGLNVQRYKGLGEMNPDQLWETTLDPNNRLLLQVKADDDAGLTFETLMGDEVPPRREFIEDNALNVANIDI

SEQ ID NO: 184531 - protein, 385 aa, Unknown
  Bacterial polypetide isolated from the Sargasso Sea
MPKNLEKTKNQSYGADSIRVLKGLDAVRKRPGMYIGDTDDGSGLHHMVFEVVDNAMDEALAGYCKNIYITINKDNTVTVEDDGRGIPVDTHKGEKKSAAEVIMTQLHAGGKFDHDSYKVSGGLHGVGVSVVNALSEKLELNIFRDKKEYSIIFKDGNAVKPLKEIGNSKKNGTRITFLPSKNIFSSIKFSSSILQKRMRELAFLNKGINVTLIDNTSAKSKEFVNKYDGGILEFVKYINQKKPILVNKNEKVVFKKPIFITAQKNDVIVDCSLEWNASYSEDVLAFTNNIHQKDGGTHLLGFRSALTRVINKYSSEKNTNKKNKITLSGDDIKEGLTAVLSIKMQDPKFSSQTKDKLVSSEIRLIVESIIADKISTWFDQNPSVA

SEQ ID NO: 184532 - protein, 842 aa, Unknown
  Bacterial polypetide isolated from the Sargasso Sea
MTDKISQINLEDEMKKSYLDYAMSVIIGRALPDVRDGLKPVHRRVLYAMKVLGNDHTKPYKKSARIVGDVIGKYHPHGDSAVYETIVRMAQDFSLRYTLVDGQGNFGSIDGDRAAAMRYTEVRMQKITQELLADIDKDTVEFIPNYDESEWEPSVMPTRLPNLLINGSAGIAVGMATNIPPHNLKEIIDGCLFILDNDEATIDDLIKLIPAPDFPTAATIHGIDGIKQAYETGRGKVYVRAKTSIEENGDRETIIISELPYQVNKARLIEKIAELVRDKKLEGISEIRDESDKDGLRVAIDLKRGTVSDVLLNNLYKQTVLESTFSINMVALSNGQPKLMNLKSMLDAFLGHRRDVVTKRTIYQLNRSINRAHILEGQTIALTNIDEMIAIIKKSKTPADAQKALVSKLWKVGKVKEMIKKAGNVSTVPKHLINIEKFGIEKGGYRLSSEQAKAILDLKLNRLTGLEQESIFNEYSELLEDIKRFTLILSNPDELKSVIRTELIETQETYADERRTEIVEFYSDLTDEDLIPEEDLIVTLSKEGYAKTQPLDTYQAQNRGGTGKRAASLKDEDFVSKLFVANTHDTLLCFSSYGKVYWIKVYRLPRGGRNAKGRPIVNLLPLEKDERIQAVLPVKEFNDDQFIFMATESGSVKKTKLSAYSRPMRSGIKAIKLREGDRVVNAEITDGSKEIMLFSNSGKSIRFKESDARPMGRVSQGVRGMRIEKDQKIISLVVIEEGNILVATENGYGKQTLKDEFSIQKRGGKGVIAIQTSKRNGNLIGANQVCTGDEVMFISTSGNLIRTRTDDISVIGRNTQGVRLIRLSEDDKLLAMEKVISEDDEE

SEQ ID NO: 184533 - protein, 376 aa, Unknown
  Bacterial polypetide isolated from the Sargasso Sea
MDFAKEILPVNIEDELKQSYLSYAMSVIHGRALPDVRDGLKPVHRRILYAMHDLKNNYNKPYKKSARVVGDVIGKYHPHGDTAAYDAIVRMAQDFSMRYTLIQGQGNFGSIDGDPPAAMRYTEVRMQKISDEILADLEKETVAFSENYDGSEQMPDVMPTKIPNLLINGSSGIAVGMATNVPPHNLTEVINGSLKLLENPKLSIDQIIDSVSGPDFPTGGTIDGKMGIYEAYKTGRGIIYVRSKSKVEESKTGKKSLVIYEIPFMVNKARTLEKIAELVKEKKIDGISEIRDESDKDGLRIVIDVKKGESVEVLENNLFAQTQLEQSFGINFTVLVDGQPRVLNLKEILQEFLKHRKDVVLKRTKFELRKAKERGH

SEQ ID NO: 184534 - protein, 368 aa, Unknown
  Bacterial polypetide isolated from the Sargasso Sea
MAKKNNKAKYDSSNIQVLKGLEAVKKRPGMYIGDTDDGSGLHHMVFEVLDNCIDEAMAGHCSEIFVKINKDESVTVEDNGRGIPVDVHKKEGVSAAQLILTTLHSGGKFDDNSYKVSGGLHGVGVSVVNALSKKLILEVHRDGGEYFQEYNEGKPKAKLKKVKKSETTGTKITFYPSNKIFTSTNFDIEKIHKRIQELSFLNAGVSITVEDKRSGKSKKFKNNGGLSSYVKYLRGRKQEVSEVFECSATENDVGVEIAMQWTDSYSENVLCYTNNIPQKDGGTHLAGFRGSLTRVLKSFIKKENAKKTPTDLLGEDVREGLMAIISVKVPDPKFSSQTKEKLVSSEVKGVVSSVFSKYFNDFLLENPK

SEQ ID NO: 184535 - protein, 128 aa, Unknown
  Bacterial polypetide isolated from the Sargasso Sea
MSKNSNYQADSIKVLKGLEAVRKRPGMYIGDTDDGTGLHHMVYEVVDNSIDEALAGYCKNINVDINSDNSITVHDDGRGIPVDTHKSEKKSAAEVIMTQLHAGGKFDHDSYKVSGGLHGVGVSVVNAL

SEQ ID NO: 184536 - protein, 401 aa, Unknown
  Bacterial polypetide isolated from the Sargasso Sea
MSSSYLSYAMSVIISRALPDIRDGLKPVHRRIIYAMHKGGFDWSKQFRKSARIVGDVIGKYHPHGDQAVYDALVRMVQDFSMSLPLIDGQGNFGSIDGDPPAAMRYTETRLAKIAQFLIDDIEKNTVAFKSNYDETEFEPEVLPAQYPNLLVNGAGGIAVGMATSIPPHNLGEVVDATLALIKNKDIKLNELIKHIPGPDFPTGGIIIGKDIIKQGYKSGRGSFKIRGDIKIEQIKSGRERLVITSIPYQVNKSVLNERIAELVREKKIEGIRDIRDESNREGIRVAIDLKSGVEPETIKRQLYKYTSVESSFGFNTLAIVDSKPKTCNLKDFLENFLSFREDVVIKKTKFDLKKAEDRVHILVGLSVSVENIDKVIKTIRQSKNPDEAKNSLLKSKWKII

SEQ ID NO: 184537 - protein, 655 aa, Unknown
  Bacterial polypetide isolated from the Sargasso Sea
MSDFAKEILPISIEDELKQSYLSYAMSVIHGRALPDVRDGLKPVHRRILFAMHDLKNYYNRPYKKSARVVGDVIGKYHPHGDSAVYDAMVRMAQDFSMRYMLVEGQGNFGSIDGDPPAAMRYTEVRMSKITDQLLADIEKDTVNFSPNYDGSEQIPDVLPTRVPTLLVNGSSGIAVGMATNIPPHNLTEVINGSLALLENPKTSIDQLTQSISGPDFPTGGIIDGKMGIYEAYNTGRGIIYVRAKTSVEEDKSGNQSLVINEIPYMVNKARMLEKIAELVKDKKIDGIREIRDESDKDGLRVVIDVKKGESVDVLENNLYAQTQLEQSFGINFTVLVNGQPKVLNLKEILQEFIKHRKDVVTKRTKFELKKAKDRGHIVEGLMVAIANIDAIITIIKKSKDPKIAAAELCKKTWKAGAIEAILKKVGKDACKPKGLPADLGLKGKNYKLSPDQAKSILELRLGRLTGLEQDNLSSEFNELIEKIQKLQEILDDKNVLQGVVRDELNEIKESFGDERKTDINDARQDISNEDLIPEETRVLTLSRSGYAKTQPLTEYREQRRGGMGKAAASVKEEDLIQNLYVLSSHSQLLCFTTLGKVYWLKVYEIPVASRTSKGRPLVNMLNLDDDETVTQILPVEGFAEDKYVFMATRNGTVK

SEQ ID NO: 184538 - protein, 246 aa, Unknown
  Bacterial polypetide isolated from the Sargasso Sea
MSKNSEEKKQYSAGNIQVLEGLEAVRKRPAMYIGDVGNKGLHHLIWEVVDNSIDEALAGHCDLITVEINEDNSITVKDNGRGIPTGMHPKEKKSALEVVMTVLHAGGKFDKDTYKVSGGLHGVGVSCVNALSESLTATVHREGKVFEQTYKRGIPVHDVKEVGKTTDRGTIVTFSPDKEIFTTYEYKYDTVASRLRELSFLNAGIKIELKDKRDLDDNNEPKSEVFYSEGGLTEFVNYLEGSREKL

SEQ ID NO: 184539 - protein, 589 aa, Unknown
  Bacterial polypetide isolated from the Sargasso Sea
GIISYVEHLNSNKKTVNNKPIFVSGKKDDTIVEISIQYNEGYSETIYSYVNNINTIEGGTHLSGFRSALTRSINKYAKDQNLLKNQNVQITGDDTREGLTAVVSIKVPEPKFEGQTKTKLGNSETAGIVESLLNDSLGDFFEKNPAQAKKIVNKSLDAAKAREAAKKARDLTRRKSALDIGSLPGKLADCQEKDPDKCELFIVEGESAGGSAKQGRDRKTQAVLPLKGKVINVQKARLDKVLSNDEIGTLITAMGLGAPKVAADQDEDIDISKLRYGKIILMTDADIDGSHIRTLLLTFYYNHYKELLRKKKLYIAQPPLFKVKRGNKETYLQDELALDNFLLENSINEILSDDTFKTMKLTRDKLLNNISHFIRYKNLVENLSRSNIDLRILEILIPILSQGHSFGDKKFISILDNDIKKKQSETSEKINYQFDSKDNASFVIQDKGRESNSLITKDIVESALFTRCLQEYSESVDGLTFPINLKTKNDDETNCLTLDDLHTILLDIGKKGFSVQRYKGLGEMNPDQLWETTLDPETRVLREVNIADIEDLDKDGKESLLFEELMGDQVEPRKRIIEENALYVTNLDI

SEQ ID NO: 184540 - protein, 253 aa, Unknown
  Bacterial polypetide isolated from the Sargasso Sea
ARKAREMTRRKGVLEIAGLPGKLADCQEKDPSLSEIYIVEGDSAGGSAKQGRNRKNQAILPLKGKIINVEKARIDKVLGSQEVGTLIKALGCGIGKEDFDIDNLRYHRIIIMTDADVDGSHIRTLLLTFFYRQMYEIVEKGHVYIALPPLYKITKGKEFIYASDEKEKDDAIKKFSKNGNRGLEVQRYKGLGEMNPEQLWTTTMDPINRRMMRVDIKDIQDANESFEVLMGDDVEPRREFIDANALSVKELDI

SEQ ID NO: 184541 - protein, 697 aa, Unknown
  Bacterial polypetide isolated from the Sargasso Sea
MNKEYSSDSIKVLKGLEAVRKRPGMYIGDTDDGSGLHQMIYEVLDNSIDEALAGFCNNIEVVLNSDGTVTISDNGRGIPVDLHKTEKIPAAQLIMTELHAGGKFDQNSYKVSGGLHGVGVSVVNALSETLILEINRDGKVYNLEFSNGTVTKKLNVIGTSQEIEKNYYTGTKITFLPTKSIFKNIDFNFKVIEKRLRELAFLNTGVSIDLIDKRQSQDIKINFKYEGGIKEYVNFINTGKNVIHNNPISFNGEKNNISIECALQWTDSYHENTICFTNNIVQRDGGTHLAGFRGALTRSIVNYINKNTKNSGSITGDDAREGLTCIISVKLPDPKFSSQTKDKLVSSEVRPVVESISLDKIEQWIEENPSQIKKVIDKIIEASNAREAARKARELTRRKTGLENTSLPGKLADCQEKNPELSELFIVEGDSAGGSAKQGRDRKNQAILPLRGKILNVERANEKQVLTSNEIGALITAIGAGVGNPTDDINQNKLEGKFDLSKMRYHKIIIMTDADVDGSHIRTLLLTFFYRHMKPIIDSGRLYIAQPPLYRIKKGNSTVYKKDENDLEEYLIEEGIKNTTFTNTINEQIAGQELKKIIYLSKKTKNLVIPLMRKIDNSRIIEHAAIVRALDKRNLENSKIGTEISKYLQQRLNLISNISEKNWKVSFLDKSLYIKRTIRGFTEKFTIDENFLVTPRS

SEQ ID NO: 184542 - protein, 394 aa, Unknown
  Bacterial polypetide isolated from the Sargasso Sea
MSEEKRSNKISNDYGADQIQVLEGLEPVRKRPGMYIGSTGPRGLHHLVYEVVDNSVDEALAGHCDHIEIVLKKDGSALISDNGRGIPTDIHPRTGKSALETVLTVLHAGGKFGSGGYKVSGGLHGVGISVVNALSEWVNVTVLRDGNEFNQRFEKGIAKGELKSQKQQNKPLKKGTTICFKPDTSIFTDGIEFDYALLSSRLRELAYLNGGVKIIFRDERQNLSDGSFKEEIYLYDGGIKEYVEYINKEKESIHSEVIYVDSQKDNVYVEAALQWCSDVYSDNILGFANNIRTIDGGTHIDGLKTVLTRTFNAIAKKRGKRKEVDKNLSGENIREGLTVVLSVKVPEPEFEGQTKTKLGNTEVRGIVDSLIGESLIKYMEFNPNIFDLILEKAI

SEQ ID NO: 184543 - protein, 382 aa, Unknown
  Bacterial polypetide isolated from the Sargasso Sea
MPAKKKAAKTKSPKTPKKEPKQSAKKASSKSVNTATKKKKEDSYDSSSITVLKGLEAVKKRPGMYIGDTDDGTGLHHMVYEVVDNSIDEALAGHCDEITVKILSDDSVVVTDNGRGIPTDKHEEGVSAAEVIMTKLHAGGKFDDNSYKVSGGLHGVGVSVVNALSEELKLTIHRGGKTHEQTYADGKPTSKLKVTGKTEKTGTEVMFVPSVTTFSNILFDYEVLEARLRELSFLNSGLKIILEDERTSKKKEFIHKGGLAEFVAFLNKKRTTVNSIFHFVQESKDGITIEVSLQWNDGYQENIQCYTNNIKQRDGGTHLVGFRTALTRTLNNYMDREGMNNKEKVSTSGDDAREGLVAIVSVKVPDPKFSSQTKDKLVSSEV

SEQ ID NO: 184544 - protein, 364 aa, Unknown
  Bacterial polypetide isolated from the Sargasso Sea
GKLKVTGKTDKTGTEVTFVPSPTTFSDIVFQYDVLETKLRELSYLNAGLKIVLIDERSSKKKEFFHKGGLAEFVTFLNTKRTTVNSVFHFVKEAAEGITIEVSLQWNDGYQENIQCYTNNIKQRDGGTHLVGFRTALTRTLNNYMEKEGMNKEKVATSGDDAREGLVAVVSVKVPDPKFSSQTKDKLVSSEVRPAVEQETYKALTEYLLENPAEAKLIATKIIEAARAREAARKARELTRRKGVFEGGGLPGKLSDCQEKDPSKSEIYLVEGESAGGSAKQGRDRHFQAILPLKGKILNVEKARLDKVLSSEEIIILISALGCGIKGEDWQEDKLRYHRIIIMTDADVDGSHIRTLLLTLFYRQ

SEQ ID NO: 184545 - protein, 655 aa, Unknown
  Bacterial polypetide isolated from the Sargasso Sea
MSAENKKQYSAESIKVLEGLEAVRKRPAMYIGDVGKRGLHHLVYEVVDNSIDEALAGYCTKVVVTFNPDGSVTVDDNGRGIPVDMHKEEKKPAVEVVMTVLHAGGKFDKGSYKVSGGLHGVGVSVVNALSEWMWVEVKRDGKIHRQDYKIGEPQNKLKTTGTAKKTGTKVCFYPDSSIFKVIDFEYDIIAERLRELAYLNSGLEIVLKDERTEEGESNSFKFKGGLSDFVKYLDEHNNPLHNKVITVKNDTGDVPVDVALRYSNSYNDNILTFVNNINTIEGGTHLSGFRSALTRAMNNHASKNNLIKAKKNEKISLTGEDFREGLTAIISVKVAEPQFEGQTKTKLGNGDIKGIVDKIVYEGILDFLEQNPSIGRRVIEKALLAARSRSAARKARELIRRKSALGGSSLPGKLADCSNRDPNFCELYLVEGDSAGGSAKQGRDRKTQAILPLRGKVINSEKARIDKLLSNNEVQSIITALGTGFGGSLDEDGERSAGDFDIEKLRYHKIIIMTDADVDGSHIRTLLLTFFYRKMKEIIDGGYLYLALPPLYRVSQGKKEYYAYDDNERDLMIERMQKENKNTKVSIQRYKGLGEMNPGQLWETTMDPETRTLMQVTVESAAEAAETFQNLMGSDVEARRTFIEKNAKFVVNLDI

SEQ ID NO: 184546 - protein, 526 aa, Unknown
  Bacterial polypetide isolated from the Sargasso Sea
MVDFNRDNTLPRDIVDEMKESYLNYSMSVIVSRALPDVRDGLKPVHRRILYGMSELGSSWNRPYKKSARIVGDVLGKYHPHGDSSVYDALVRMAQDFSMRYELVDGQGNFGSIDGDNAAAMRYTESRMTKLSSEMLKDLDKDTVDWTPNFDETLKEPAVLPSSVPTLLINGSEGIAVGMATKIPPHNLVELVNGIVALIDKEDITTDELMQHIKGPDFPTAGLILGMDGLKEAYETGRGKIKMRARAHIETSKKGKDSIVITEVAYQTNKANLVEKIADLVRDKKIEGITDLRDESDKDGIRVVIETKRDAVPEVILNQLYKHTQLQDTFGIILLALVEGVPQIMSLKTVLQHFVDFRHRVVVRRTEFELREAEARAHILEGLKIALDNIDEVISIIRGSKDPVMAKEGLMNGFNLSEIQSQAILDMRLQRLTSLEVDKVVKEYKELIKHIAHLKGILESKSQRMDIIKTELIEIRDQYGDERRTEIVPVDSDFSMEDMIAEEEVVLTITHPGIYKTHSFGIPTEH

SEQ ID NO: 184547 - protein, 471 aa, Unknown
  Bacterial polypetide isolated from the Sargasso Sea
SRAIPDLRDGLKPVHRRILYAMHETGNTHEKSYRKSARPVGDVMGKYHPHGDSAIYDALVRMAQPFSMSLPLLDGQGNFGSMDGDNPAAMRYTEVRMDKPAAFLLSDIDKDTVNFQDNYDGKDREPSVLPARFPNMLVNGAGGIAVGMATNIPPHNLGEVVDATLALIQAPDLSSEDLIQYVPGPDFPTGGMMLGRSGARKAYIEGRGSVIIRAKTKIEELRKDRYAIIIEEIPYQVNKSSMIEKIAEQVRDKKVEGISHVQDESDRNGVRVVVELKRDATAEVVLNQLYRFTPMQTSFGCNMLALNGGRPEQLTLRSFLTNFIDFREIVVARRTAFELRKARERSHILCGLAVAVTNVDEVVATIRSSSDATEAREKLMQRRWPAGSIAEYIKLIDDPTHTINKDDTYNLSETQARAILELRLQRLTQIGVKEVTEELKTLSVKIKEYLGILGSREKIMEIIRNELKEVK

SEQ ID NO: 184548 - protein, 293 aa, Unknown
  Bacterial polypetide isolated from the Sargasso Sea
VETLINDYFMDFLLANKPQAKEILGKVLEAAYAREAARKAKEMTRRKGLLDIGGLPGKLADCQEKDPALSELFLVEGDSAGGSAKQGRDRSFQAILPLKGKIINVQKARLDKVLSSNEIGTLITALGTGIGIDEFSLEKLRYHRVIIMTDADVDGSHIRTLLLTFFYNQMFDLLEKGHIYLALPPLYKIKKGGKTHYAKDEEEKDAILKELRKEATEGSRPPEIQRYKGLGEMNPEQLWETTFDPKHRRLVQITLDEARELVDDIFETLMGDQVQPRREFIDDNALRAENIDF

SEQ ID NO: 184549 - protein, 315 aa, Unknown
  Bacterial polypetide isolated from the Sargasso Sea
MTNKNTYQADSIKVLKGLEAVRKRPGMYIGDTDDGTGLHHMVYEVVDNSIDEALAGYCKNINVKINFDGTITVSDDGRGVPVDIHKGEKKSAAEVIMTQLHAGGKFDHDSYKVSGGLHGVGVSVVNALSEKLQLEINRDEKKYFVEFQNGEAKAPLKVIGKSKQTGTQITFLPSKEIFSSIKFSPNILIKRMRELAFLNKGIKIIFIDGSQKKEKTFEFKFDGGVLEFVNFLDEKREKLQNKNGNDLFKKPIYIEGKKNNIELECSLKWNAGYGEDIFPYTNNIYQKDGGTHLLGFRSALTRVINKYANEHNCKE

SEQ ID NO: 184550 - protein, 523 aa, Unknown
  Bacterial polypetide isolated from the Sargasso Sea
MENKSNYKAESIKVLKGLEAVRKRPGMYIGDTDDGTGLHHMIYEVVDNSIDEALAGYCKKIQVDVNSNGSVTVKDDGRGIPVDFHKGEKKSAAEVIMTQLHAGGKFDHDSYKVSGGLHGVGVSVVNALSEKLELTIEREGKKYFIEFLNGKANKPLKPLGKSKNTGTEITFTPSKEVFSLTKFNLNTIQKRMRELAFLNKGIKIIVNDFTQKKSKTSEFRFEGGIIEFVEYLYEKRETLKNKNGNELFKKPIFIEGKKSNTEIECSFKWNLTYSEDVYPYTNNIYQKDGGTHILGFRSALTRVINKYANEHNMLKKNRVSISGDDIKEGLTCVLSIKVPDPKFSSQTKDKLVSSEVRNIVETIINEKLSIWFDQNPSITKIVLLKIIQAAVARDVARKARESVRRKGALELTGLPGKLADCQNSKQDGTELFIVEGDSAGGSAKQGRNREYQAVLPLRGKILNTYTDNNGNKKNGNGNDLRTKALSKMISSNEIVTLINALGLDPKNEELDLKDLRYGKIIIM

SEQ ID NO: 184551 - protein, 396 aa, Unknown
  Bacterial polypetide isolated from the Sargasso Sea
FECSATENEVGVEISMQWTDSYSENVLCYTNNIPQKDGGTHLAGFRGSLTRVLKTFIKKENAKKTPTDLLGEDVREGLIAIISVKVPDPKFSSQTKEKLVSSEVESVVSAVFNKYFNEFLLENPKDAMSIISKVSEAALAREAARKAREMTRRKGVLEIAGLPGKLADCQEKDPKLSEIYIVEGDSAGGSAKQGRNRKNQAILPLKGKILNVEKARIDKVLGSQEVGTLIKALGCGIGEEDFDINNLRYHRIIIMTDADVDGSHIRTLLLTFFYRQMYEIVDKGHIYIALPPLYKITKGKEFIYASDEKQKDDAIKTLSKSGTRGLEVQRYKGLGEMNPEQLWTTTMDPDNRRMMRVDIKDVQDANDSFEILMGDDVEPRREFIDKNALTVKELDI

SEQ ID NO: 184552 - protein, 402 aa, Unknown
  Bacterial polypetide isolated from the Sargasso Sea
QYNESFIDNTLSFTNCIRTADGGTHVTGFRSALTRVINDYGKKQGFFKEDIQSLSGEDVREGLMCVVSVKVKDPQFEGQTKGRLGNPEVKGAVEQTIGKRLSEFIEDNPEDAKRIINKSMTSARAREAAKKARDLIIRKNALDGGSLPGKLADCSEKDPSRSELYIVEGDSAGGSAKQGRDRNFQAILPLRGKILNVEKARPEKMLNHEEIVALITAIGTGLGEDFNHEKLRYHRVIIMTDADVDGAHIRTLLLTFFFRNMPELIGNGNLYIAQPPLYKVSRGRTSKWIYSDGDLNKWISEKIYNNFSIIHSENKKEIKGAAIGKFISDVKSFAESKEIAKILNVEEDEFFKLASKSNDYILDTPKVSEENIQPDLFETTVSDEEVTEEVIQEVSETISVNS

SEQ ID NO: 184553 - protein, 537 aa, Unknown
  Bacterial polypetide isolated from the Sargasso Sea
MSKNSKSKLNNSYGADSIKVLKGLDAVRKRPGMYIGDTDDGSGLHHMVFEVIDNSIDEALAGYCKSIVVSINSNSTVTVEDDGRGIPVDIHKGEKMSAAEVIMTQLHAGGKFDHDSYKVSGGLHGVGVSVVNALSEKLQLNIYRDGKEFEIEFKDGNSLKPLKQVGKTKKKGTKITFLPSKEIFSSIKFSSSILEKRIRELAFLNKGISITLIDNTLKKSREYVHKYDGGITEFVKHINNKKPILVNKNEKEVFKKPVYVTSTKNNVIVECSFEWNAGYSEEVLPFTNNIPQKDGGTHLLGFRSALTRVINKYFSERNTKKNKISLSGEDIKEGLTAVLSIKMPDPKFSSQTKDKLVSSEIRNIVENIIGEKVSTWFDQNPSVAKTVLEKITQAAMARDVARKARDSVRRKGTFELSGLPGKLADCQIQKREGTELFIVEGDSAGGSAKQGRVREYQAVLPLRGKILNTYVNGKKNGEDQSTKALSKMMSSSEIVTLINALGTGSKDFNIENLRYDKIVIMTDADVDGSHIRTLLLT

SEQ ID NO: 184554 - protein, 805 aa, Unknown
  Bacterial polypetide isolated from the Sargasso Sea
MPKSKKNTNTKNYDSSNIKVLKGLDAVRKRPGMYIGDTDDGTGLHHMVFEVVDNSVDEALAGFCSHIEVIIHEDDSITVKDNGRGIPVDKHKTEKTSAAEVIMTVLHAGGKFDDDSYKVSGGLHGVGVSVVNALSETLNLRIHKNGHTYEQDYVHGVPQKPLKKGSKTDRSGTTVTFKPSAKTFTNTTYSFDILSKRLRELSFLNSGLSIKLTDTRSGKEEEFYFEGGISAFVSHLNKVQSPVHESVINFSKTIDDITVDIALQWNESYRENMYCFANTIRQKDGGTHLAGFRGALTRTINTYIDKEIAKADISVSGEDCREGMTAIISVKHPDPKFSSQTKDKLVSSEVKGVVESVVNKHLKEFLIENPNEAKIIISKIVDSAAAREAARKAREMTRRKGALDIAGLPGKLADCQEKDPALSELFIVEGDSAGGSAKQGRDRKTQAILPLKGKILNVEKAQRAKMYSSAEIGTLITALGCGIHDEFDLEKLRYHKIIIMTDADVDGSHIRTLLLTFFYRELEELIKGGYLYIAQPPLYKLKKGKKEEYVLTDDELTNLIISNAVKGMLVRPKSKKKGLEGDGLLNTVLDYAQSVNTIERLSKQTGSIAAIAMSLHKPITKTEANNKKKLETWIKGLSRTAAKIAKDKGYKASVSINYDDDGIAYLNTEEEIGGVKHFGKITSAFLKSNDYKLFDRVQKSRKQFTGKVLIENGEDPREYENIDSCLSDILLSSKRGLNVQRYKGLGEMNPDQLWETTLDPNNRLLLQVKADDDAGLTFETLMGDEVPPRREFIEDNALNAANIDI

SEQ ID NO: 184555 - protein, 375 aa, Unknown
  Bacterial polypetide isolated from the Sargasso Sea
MTKNTSKKTYQADSIKVLKGLEAVRKRPGMYIGDTDDGTGLHHMVYEVVDNSIDEALAGYCKNIQVDINSDGTVTVKDDGRGIPTDIHKGEKKSAAEVIMTQLHAGGKFDHDSYKVSGGLHGVGVSVVNALSEKLELFIERDGKKHFVEFKNGNAVKSLKVIGKSNNTGTQIKFLPSKDIFSTVKFSFNTIQKRMRELAFLNKGIKISINDLTQKKIKSTEFKFEGGIAEFVDYLDEKREKLKNRNDNELFKKPIFIQGSKNDLNMECSLKWNAGYSEDIYPYTNNIFQKDGGTHLLGFRSALTRVINKYANEQNLLKKNKLSISGDDIKEGLTCVLSIKIPDPKFSSQTKDKLVSSEVRNIIETITNEKLSVWF

SEQ ID NO: 184556 - protein, 464 aa, Unknown
  Bacterial polypetide isolated from the Sargasso Sea
GGKFDHDSYKVSGGLHGVGVSVVNALSEKLELVIERDGKKYFIEFKDGNTIKTLSVISKSKSTGTSIKFYPSKQIFSSTNFSFNVIQKRMRELAFLNKGISIMLTDFTQKKEKKLEFKYDGGILEFVEFLDEKREKLKNKNDNDLFKKPIFIEGNKNNLDIECSLKWNAGYGEDVYPYTNNIFQKDGGTHLLGFRSALTRVINKYANEQNLLKKNKVSLSGDDIKEGLTCVLSIKIPDPKFSSQTKDKLVSSEVRNVVETIISEKLSIWFDQNPSISKIILTKIIQAAVARDVARKARESVRRKGALELTGLPGKLADCQNSKQDGTELFIVEGDSAGGSAKQGRNREIQAVLPLRGKILNTYTEHNGSKKNGNSNDLRTKTLSKMISSNEILTLINALGLDPKDENIDLKDLRYGKIIIMTDADVDGSHIRALLLTFFNNKPFNKLIEEGYVYLAQPPLFKIN

SEQ ID NO: 184557 - protein, 447 aa, Unknown
  Bacterial polypetide isolated from the Sargasso Sea
VLVGGTTINFEIDKELIKDKTPNKKSFFYKKGIEDYFQLEYANNSKLFEKNFLLKSKIKDNENFETLISFNTNENSSLMSYCNTIETPDGGSHENGIRNGILKAIKLYGQKNQFSKISNINHSDIFDYSNVIISIFINDPSFEGQTKKRIIMPNLQKEIETKTQQEFLLWLNANKKNSKILLDNLIERALQRTDLSKIKELDRKSIKERNRLPGKLVDCSSKSIKDSEIFIVEGDSAGGSAKQARNREFQAILPLRGKILNVYNVGLSKIADNNEIQNLIQSLGCGIGKNFEISKLRYEKIILMTDADVDGSHIATLLITFFYKYMKSLIDENKLYLAMPPLFKIYNKNKSFYAYDEKEKDKLIEKEFKSDNYNITRFKGLGEMPADQLKETTMDQNKRNLILINSEKAKKDMKNTESLFETLMGKQAELRFKFIQNNANFIKNLDV

SEQ ID NO: 184558 - protein, 555 aa, Unknown
  Bacterial polypetide isolated from the Sargasso Sea
MADKITAVPIELAMKQSYIDYAMSVVIGRALPDIRDGLKPVHRRVLFAMNTMGNHYNKPYKKSARIVGDVIGKYHPHGDTAVYDTIVRMAQDFSMRYMLVDGQGNFGSVDGDAPAAMRYTEIRMSKISHELLSDIDKQTVNFRPNYDETEQEPEVLPTRVPNLLVNGSSGIAVGMATNIPPHNLSEVIDSIIYLINENPQATVDDLMKIVPGPDFPTAGIILNNENDENGIKSAYESGKGKVTMQARTEVEVNKKNKKEQIIVTELPYQVNKARLIEKIAELVRDKKIEGISELRDESDKEGMRIVIELKKGENLPVILNNLYTQTQMRTSFSINMVALVEGKPQPVNLKQILNSFISHRIDVVTRRTLFELNKAKEKLHILEGLTIALSNIDKVIKLIKSAENVAEAKNKLMNEKWELGFLKKINKVKSTVKNINSISSDKGQINGKYLMTSVQAQSILDMRLQKLTNLEQEKIFNEYKELINKIDELQNILDSKKLMMSLIVKELKEIKASYGDERRSVFEKFKNFSKSDLTKQEDLVVTLSHVGYVKAQPLS

SEQ ID NO: 184559 - protein, 798 aa, Unknown
  Bacterial polypetide isolated from the Sargasso Sea
MENSPEQLNGGYDESNITVLEGLEAVRLRPGMYIGGVDSAALHHLVFEIVDNSVDEALAGYCNEVRVSIGKDNSITVEDNGRGIPVGTHEDEGVSALELIMTRLHAGGKFDSSNYKVSGGLNGVGASVVNALSSRCIVEVERDGFKWQQNYQEGKPDGDLKQLNPSQNNGTRTIFWADTTIFDEIDFHFEILSQRLRELAFLNHGLKIILHDDRTDKTQEFHYEGGLATFIEHLNQNKTVLHEHPVSFQGESEGIEMEVAFQYNDTYNERIYSFVNNINTAEGGSHLTGFKGALTRTLNNYMVTNKISNDNDENLTGEDVREGMAAVISVRVIDPQFESQKKIKLTNVEVKGKVESLVNEHLNNFLEENPAVAKKIVAKSLDAQRARIAARKARELTRRKNVLEVSSLPGKLADCQESDPALSEIFLVEGDSAGGSAKQGRDRKNQAILPLKGKILNVEKARFDKMLSNDEIRTLITALGTGIGREDFDITKTRYHKIIVMTDADVDGSHILTLILTFFYRQMPEIIENGYLYIAQPPLYKIKKGREEHYLRDDKEMSETLIRMGSKKLKLNGTIRELVEDELFGTVMDIKKYRDLFDRMSSNLQLYRLIQLMVQHEVELEHAGAEHILEKLQPLVQQIPEFFIERDTETGKIKILLKDEELEFSWNQLENLRLNDYMMLLQVHRNLIQVLGDQGSWHLEEPDKDISHTCKSWYEVQEYVTNYGKNGIYLQRYKGLGEMNPDQLWETTLDPETRTLKQVTIEDLVESDGMFTVLMGDHVEPRRNFIEENALRVKNLDI

SEQ ID NO: 184560 - protein, 178 aa, Unknown
  Bacterial polypetide isolated from the Sargasso Sea
MSKNNYGADKISVLKGLEAVRKRPAMYIGDVGKRGYHHLVSEVVDNSIDEALAGFCTSIIVTIKNDGFISIEDNGRGIPVEIHKTEGKPALEVVMTVLHAGGKFDKNTYKVSGGLHGVGVSVVNALSESLVAEVHRDGFHYKQEYKIGQPTTEVEKIGKSDKTGTIVSFKPDETVFSH

SEQ ID NO: 184561 - protein, 628 aa, Unknown
  Bacterial polypetide isolated from the Sargasso Sea
MTNQYTSDAIEVLNGLDPVKRRPGMYTDTSRPNHLGQEVIDNSVDEALAGHATKIEVVLHTDNSLEVTDDGRGMPVDIHPEEGIPGVELILTKLHAGGKFSNKNYQFSGGLHGVGISVVNALSRRVEVTVRRDGQVYDMAFENGFKVEDLRVSGTCGRRNTGTRVHFWPDASYFDSANFSNSKLIYLLRAKAVLCPGLRIKFTNKHTNEVHEWYYESGLTDYLKTAVGDNIMLPEEPFIGSFKGQIEAADWAITWLPEGGESINESYVNLIPTPLGGTHVNGFRQGLLESMREFCEFRNLIPRGIKLSPEDIWDRAAFILSVKMQDPQFAGQTKEKLSSRQSSAFVSGIVRDAFSLWLNSNTELAESLAEMCINNAQKRLKAAKKVARKKVTSGPALPGKLTDCSGQDPMRGELFLVEGDSAGGSAKQARDREFQAIMPLRGKILNTWEVDASQVLASQEVHDISVAIGCDPDSNDISELRYGKICILADADSDGLHIATLLCALFLKHYRVLVEQGHVYIAMPPLFRIDIGKDVYYALDEAEKEGILDRISAENKKGKVQVTRFKGLGEMNPLQLRETTMDPNTRRLVQLTIDDAEETDSLMDMLLAKKRSPDRKNWLEDKGDMAVL

SEQ ID NO: 184562 - protein, 482 aa, Unknown
  Bacterial polypetide isolated from the Sargasso Sea
TSVCFKPDMEIFTVGISFDYATLSGRLRELAYLNGGVRIVFRDERPEAAGEDGEPHEETYFYEGGIREYVNYMNAEKDPLHPDIIYVNAEKDGVQVEAALQWCVDAYSDSILGFANNIRTVDGGTHIEGLKTVLTRTLNTFARKRGKRKDNDGNLAGENIREGLTAVLSVKVPDPEFEGQTKTKLGNTEVRGIVDTVVGEALSEYLEFNPQVIDLILEKAIQAFNAAEAARRARELVRRKSVLESSTLPGKLADCSSRDPAESEIYIVEGDSAGGSAKQGRDRRNQAILPLRGKILNIEKTDDAKIYKNTEIQALITALGLGIKGEEFDVSNLRYHRIVIMTDADVDGAHIRTLILTFFYRYQRELVEGGFIYIACPPLYKVERGKNHTYCYNEQDLKTTLDGFGEKANYTIQRFKGLGEMMPQQLWETTMDPSTRTMKRVEIEDAAEADRIFTILMGDKVAPRREFIETHSAELNLADLDI

SEQ ID NO: 184563 - protein, 336 aa, Unknown
  Bacterial polypetide isolated from the Sargasso Sea
KLVSSEIRHIVENIINDKISIWSDQNPSTIRNVLEKITQAAVARDVARKARDNIRRKGSFEITGLPGKLADCQISKKEGTELYIVEGDSAGGSAKQGRNREFQAVLPLRGKILNTYVGTNGKNRGNSNEQETKALSKMMSSSEIVTLINALGTGSKDFNLDNLRYEKIVIMTDADVDGSHIRTLLLTFFNNYPFNQLIENGNLYLAQPPLFKITKNNKSYYMKDEKDLEKFIIKNLNNKEKKGKLSSKELSKIMDQEKQKLSIQRFKGLGEMNPEELWQTTLNPDNRNLLKVQYSNGTKEKSKEDQKIISILMGDEVAPRREFITSNALDVANLDI

SEQ ID NO: 184564 - protein, 403 aa, Unknown
  Bacterial polypetide isolated from the Sargasso Sea
MPKTKKSTNKKKYDSSNIKVLKGLDAVRKRPGMYIGDTDDGTGLHHMVYEVVDNSVDEALAGHCSEISVIIHQDDSITVKDNGRGVPVDKHKEENKSAAEVIMTVLHAGGKFDDDSYKVSGGLHGVGVSVVNALSQTLSLRIHKNGNIYEQDYAHGVPKKALKKGAKTERTGTTISFQPSKKTFSNTSFSYETLSKRLREMSFLNPGLTINLNDERTNKTDSYCYEGGLKDFVRHLNKPQKPTHQSIAYINKKSKKDGDIEVEVAIQWNESYRENTFCFANTIRQKDGGTHLAGFRGALTRTINTYIDKEIPKNDTSVTGDDCREGMTAIISVKHPDPKFSSQTKDKLVSSEVKGVVESAVNKHLKEFLEENPIEAKIIVGKILDAARAREAARKARERLEKK

SEQ ID NO: 184565 - protein, 685 aa, Unknown
  Bacterial polypetide isolated from the Sargasso Sea
MTKNNTNTYQADSIKVLKGLEAVRKRPGMYIGDTDDGTGLHHMVYEVVDNSIDEALAGHCKKIEVSINSDGSITVEDDGRGIPVDFHKEEKKSAAEVIMTQLHAGGKFDHDSYKVSGGLHGVGVSVVNALSQKLELYVERDGKKYFVEFINGETKIPLKVTGKSKNTGTKINFLPSKDIFSSTKFSFSIIQKRMRELAFLNKGIKIILNDLTQKKIKTQEFKFEGGIIEFVEFLDEKREKLKNKNDNDLFRKPIYIEGIKSNINVQCSLKWNAGYNEDVFPYTNNIYQKDGGTHLLGFRSALTRVVNKYASEQNLLKKSKVLLSGDDIKEGLTCVLSVKIPDPKFSSQTKDKLVSSEVRNIVEGIVNEKLSIWFDQNPSISKIILTKIIQAAVARDVAKRARENVRRKGALELTGLPGKLADCQNSKQEGTELFIVEGDSAGGSAKQGRNREYQAVLPLRGKILNTYTEINGSKKNGNQNDLRTKSLSKMISSNEIVTLINALGLDPKTEEIDLQDLRYGKIIIMTDADVDGSHIRALLLTFFNNVPFNKLIEKGHVYLAQPPLFKINKGSKGIYIKDEKDLENYIIKNSKDIKKVKKNSKEFDKIIQLEKSKLNIQRFKGLGEMNPEELWNTTLNPETRNLLQVQYSKNLQKDQNLIQTLMGNDVASRKDFIVDNAINVVNLDI

SEQ ID NO: 184566 - protein, 299 aa, Unknown
  Bacterial polypetide isolated from the Sargasso Sea
MSDILDSDNSGLSEDNDRIIQTDLRNEMSRSYLEYAMSVIVGRALPDARDGLKPVHRRILYAMYELGLTSGRPYRKCARVVGEVLGKYHPHGDTAVYDALVRMAQDFSMRMPLIDGHGNFGSVDNDPPAAMRYTESRLQSLTDESLLEDIESETVDFADNFDGSQQEPTVLPARIPQLLLNGSSGIAVGMATNIPPHNLGELINGLKSIIKNPSIEDSELFEIIKGPDFPTGGQILGRDGIRETFKTGRGSITMRGVANIEQIKSIGRAEKDAVIISELPFSTNKAALIERIADLVNEK

SEQ ID NO: 184567 - protein, 255 aa, Unknown
  Bacterial polypetide isolated from the Sargasso Sea
MSDFAKEIISVNIEDELKQSYLSYALSVIHGRALPDIRDGLKPVHRRILFAMYDLKNFYNRPYKKSARVVGDVIGKYHPHGDSAVYDAMVRMAQDFSMRYPIVEGQGNFGSIDGDPPAAMRYTEVRMSKITDQMLGDIEKETVSFSPNYDGSEDIPDVLPTKIPNLLVNGSSGIAVGMATNIPPHNLKEVLNGCINLIKNPKISIDDLIKDISGPDFPTGGTIDGKAGIYEAYKTGRGIIHTRSNTSVEEDKSGK

SEQ ID NO: 184568 - protein, 806 aa, Unknown
  Bacterial polypetide isolated from the Sargasso Sea
MPKQNNYDSSNIKVLKGLEAVQKRPGMYIGDTDDGSGLHQMVYEVMDNSIDEALAGHCSNITVTVHEDNAVTVVDNGRGIPVDEHPTEKKSAAEVIMTVLHAGGKFDDNSYKVSGGLHGVGVSVVNALSETLELTIYKNGKEYYQEYKDSKPLSKIKELGNTQLSGTKITFRPSKKYFSLTNFNSDVLKKRFKELAFLNSGIEIKFIDENKSISQTFRYEGGIIEYVKELTKKKTPIQEKIINISSSKKNISVELALMWSNNYQEEVLCFTNNIPQKDGGTHLSGFKTSLTRTLNSIILKNNPKDKIDITGEDTREGITAIISVKMPDPKFSSQTKDKLVSSEVKGIVETLVSSKLKEYLDENPKDLKSITAKIYQAAKAREEARKAKELIRRKDPLSIGNLPGKLADCQEKDPTKCELFIVEGDSAGGSAKQARDRKTQAILPLKGKILNTERAQDHKVLSSSEISTLITALGCGVGDDCSLDENSKSIKNLRYGKIVIMTDADVDGAHIRTLLLTFFHTKLRLLVDNGNVYIAQPPLYKIKKGKTQKYFLDDKELNDFIYQDISNTFSVSYGKTKLERESVKQLLLSYSKLLSIVESFSANRDPDFILNLAFTDKLSSESFKNKKLLTKWLSDYEMLLNSTTPINVSYSFSLQESDKSGEYSFRITKTLNGVLSNLPSIDKRFFSSDAYLEISALKLNDYHDNVFSYAKNDSDQSNSDLAISQLYEALVTSSRNSISIQRYKGLGEMNPSQLEETTMNVKSRSLLKVLPLDEGNTIVSDLMGDDVEPRRQLIKSEGRSVKYLDV

SEQ ID NO: 184569 - protein, 601 aa, Unknown
  Bacterial polypetide isolated from the Sargasso Sea
IVGDVMGKYHPHGDSSVYDTMVRMAQEWSLRYNLVDGQGNFGSVDGDSPAAMRYTEARMQKISEELLSDIDKETVDFQLNFDDTIMEPTVLPTRVPALIVNGASGIAVGMATNMPPHNLSEVIDGIMQYIDNNDITIDELIKYVKAPDFPTGGTIYGYDGVKEAFHTGKGRVVMRGKAIIENVNDRECIIVSEIPYQVNKADMIKKTADLVNDGKIEGISTIRDESDRKGMRIVYVLKRDAIPNIVLNKLYKYTPLQSSFSVNNVALVNGRPELLNLKDLIHHFVEHRHDVVVKRTNFELKKAEQRAHILEGLIIASDNIDDVIDLIKKSSNADEARQKLEKKYKLSETQAKAIIEMRLRQLTGLEQNKLREEYDDLQKTIKGYKDLLDSKTKRMNLIKEELADIKEKYGDERRSEIEYAGGDFRVEDIIPNEKVVITISHAGYIKRTPLTEYKTQNRGGVGQKASKTRDEDFLEDLFVGTNHQYMLFFTQKGKCFWMRVFEIPEGSKNSKGRAIQNLINIEQDDRVKAFICTQDLKDEEYVNNHYVIMATKMGQVKKTSLEQYSRPRSNGINAITVKDGDELLEAKLTNGNSQIMLAVKS

SEQ ID NO: 184570 - protein, 474 aa, Unknown
  Bacterial polypetide isolated from the Sargasso Sea
MIENEMKASYLDYAMSVIVSRAIPDLRDGLKPVHRRILYAMNETGNTHDKPYRKSARPVGDVMGKYHPHGDSAIYDSLVRMAQDFSMSLPLLDGQGNFGSMDGDSAAAMRYTEVRMQKAATALLADIDRDTVDFQDNYDGKDKEPTVLPSRFPNMLVNGAGGIAVGMATNIPPHNLGEVIDGTISLINNPETTIDELVELIPGPDFPTGGLILGKSGSRKAYTEGRGSVIIRSKTKIEEIRKDRWAIVVNQIPYQVNKANMIEKIAELARDKRIEGIAHVQDESDRLGIRVVIELKRDATPEVVLNQLYKYTPLQTSFGCNMLALNSGKPEQLNLKEFLNYFVLFREEVVARRTKFDLIKARDRSHVLCGLAVAVSNVDEIVNTIKTSSDPLEAKEKLTSRSWPAQGIEEYLNLIDDPRHTLNKTDGTYNLSQSQAKAILELRLQRLTALGVKEVTGELSELATKIKEYLAILS

SEQ ID NO: 184571 - protein, 418 aa, Unknown
  Bacterial polypetide isolated from the Sargasso Sea
MINTPSYGADSIKVLKGLDAVRKRPGMYIGDTDDGSGLHHMVFEVIDNSIDEALAGHCNNINITINSNNTVTVEDDGRGIPVDMHKGEKMSAAEVIMTQLHAGGKFDHDSYKVSGGLHGVGVSVVNALSEELKLNIFREGNEYEIKFENGNTIKPLKKIGKTKKSGTKITFLPSKKIFSSIKFSTTILEKRIRELAFLNKGIAVKLVDNTSKKPKEFLHKYDGGILEFVKHINNKKPILVNKNEKEVFKKPVYVTATKNNVVVECSFEWNAGYSEEVLPFTNNIPQKDGGTHLLGFRSALTRVINKYTADKNNKKNKINLSGEDIKEGLTAVLSIKMPDPKFSSQTKDKLVSSEIRNIVEHIISEKVSTWFDQNPSIAKTVLEKITQAAMARDVARKARDKVRRKGTFELSGLPGKLA

SEQ ID NO: 184572 - protein, 175 aa, Unknown
  Bacterial polypetide isolated from the Sargasso Sea
MSSSYLSYAMSVIVSRALPDIRDGLKPVHRRIIYAMHKGGFDWSKQYRKSARIVGDVIGKYHPHGDQAVYDALVRMVQDFSMSLPLIDGQGNFGSVDGDPPAAMRYTETRLAKISQNLIEDIDKDTVEFKSNYDETEREPEVLPAQYPNLLVNGAGGIAVGMATSIPPHNLSEVI

SEQ ID NO: 184573 - protein, 232 aa, Unknown
  Bacterial polypetide isolated from the Sargasso Sea
KLADCQEKDPSLSEIYIVEGDSAGGSAKQGRNRKNQAILPLKGKIINVEKARIDKVLGSAEVGTLIKALGCGIGEEDFDINNLRYHRIIIMTDADVDGSHIRTLLLTFFYRQMYEIVDNGHIYIALPPLYKITKGKEFIYASDEKEKDAAIKSLSKNGTRGLEVQRYKGLGEMNPEQLWTTTMDPTNRRMMRVDIKDVQDANESFEVLMGDDVEPRREFIDANALSVKELDI

SEQ ID NO: 184574 - protein, 326 aa, Unknown
  Bacterial polypetide isolated from the Sargasso Sea
MPKKQNKKESYDSSNIQVLKGLEAVKKRPGMYIGDTDDGSGLHHMVFEVVDNCIDEAMAGHCSEIVVSINKNGSITVKDNGRGIPVDTHKKEKVPAAELIMTTLHSGGKFDDNSYKVSGGLHGVGVSVVNALSEELTLKICRDGGQYEQKYANGKAQTKLKKVKTSKETGTEITFKPSKEIFSFVNFDIDKINKRVQELSFLNAGVNILVEDKKTGKSKKFSNSGGLSSYVKFLKGRKQNISEIFHCEGEQDGLSVEIALQWNDAYSENVLCYTNNIPQKDGGTHLSGFRSSLTRVMKTFIRKEELNKKSPVELLGEDVREGVNSK

SEQ ID NO: 184575 - protein, 482 aa, Unknown
  Bacterial polypetide isolated from the Sargasso Sea
KGKVSKKTGTKINFLPDPKIFDETQLFEYNIVSERLRQTAFLNKGLKINLTDNRVKPATKENFHYKGGLVDFVDYLNEGFEVLHEKTISFSDQSKDSEIEVAMQWKTEDDINIKSFANNIHTLEGGTHEEGLRTAVTKAINDFAKSRNLHSDISLTGDDIREGITGVVSVRVKEPQFEGQTKTKLGNTEMKSRVQVLVNQEFPKWLSKNTKEGRAIVERCALAAKARMSAKKARELTKRKSILETSGLPGKLADCSSTDPSESELFIVEGDSAAGPAKQARDSKTQAILPIRGKIINVQKVTENRALQNEEISSLIKAIGTGINTEYKGEESRYDKIILLTDADVDGAHIRTLLLTFFFKFMPGLIKEGKVWISEPPLYRAKSSGSINYLKDDEDLEAFKKENKNRKFDISRFKGLGEMNAGELWDTAMNPESRTLIKVSIADGKAAEAKAANMFEVLMGNDVTKRKTFIEENAKYVRFLDV

SEQ ID NO: 184576 - protein, 458 aa, Unknown
  Bacterial polypetide isolated from the Sargasso Sea
VDFTPNFDDSLEEPSVLPTQIPNLLMNGSEGIAVGMATKIPPHNINELISGLVALLQNPNITIEELIENHIKGPDFPTAGFIMGSDGINSAYQTGRGRIVMRGKAQIEENDKGKQRIIITELPYQVNKANLVEKIADLVREKKLDGISDLRDESDKDGNRIVIECKRDAIAEIILNNLYKFTQLQDTFGVIMLALVNGVPKIMNIKQVLGHFLDFRREVIIKRTTFELLEAEQRAHILEGLKKALEDIDNIIQIIRGSSNPEAAKESLISSYEFSDKQAKAILDMRLQKLTSLEIDKIVQEYNDLQVLIKELNHILESHEKQSEIIESELAEVLNKHGDERRTEIIPFSGELSLEDMIADEEMIVTITHNGYIKRLPADTWKTQRRGGKGMKGAKTKDDDFVEHLFTASTHNTMLFFTDQGKCHWLKVHQIPQASRTSQGRAIVNLIGCETGEKVSAF

SEQ ID NO: 184577 - protein, 265 aa, Unknown
  Bacterial polypetide isolated from the Sargasso Sea
MDKKNFTSISLQEEMQRSYLEYAMSVIVGRALPDARDGLKPVQRRIIFAMYELGLTPDKPFRKCARVVGDVLGKYHPHGDQAVYDALVKLVQNFSTKYPTLDGHGNFGSVDNDPPAAMRYTETRLAPIAHKGFLEEIGSETVNFSNNFDGSQKEPDVLPAQLPFLLLNGSSGIAVGMATNIPPHNLGEIVDGLVALVKNKDISDKKLSNIIQGPDFPTGGELIYSRAVEELYQTGKGSITIRGVVNTEEVNLGKGKHKKNAIIIT

SEQ ID NO: 184578 - protein, 416 aa, Unknown
  Bacterial polypetide isolated from the Sargasso Sea
MTKEKFTSISLQEEMQRSYLEYAMSVIIGRALPDARDGLKPVQRRILFAMHELGLTPDRPFRKCARVVGDVLGKYHPHGDQAVYEALVRLVQDFSTKYPTLDGHGNFGSVDNDPPAAMRYTETRLAPIAHECFLQEIGSETVSYSNNFDGSQQEPDILPAQLPFLLLNGSSGIAVGMATNIPPHNLGEIVDGLIALINDKEISDLRLSKIILGPDFPTGGELICNSAMNEVYLRGKGSVTVRGVIKNEEINLGKGRHKKNALIISELPYQISKAGWIEKLAELVNLGKIDGISDIRDESDRDGMRIVIELKKDSNSKIVVSNLFKKTALQSNFGAIFLALVNGKPVQLTLRKYLNYFLGFREETIRKRTKYFLRIASEKFAILEGFSIATKNIKDIIEVIQSSENATEAKSILIVK

SEQ ID NO: 184579 - protein, 359 aa, Unknown
  Bacterial polypetide isolated from the Sargasso Sea
VFEVVDNSVDEALAGFCTHIEVIIHEDDSITVKDNGRGIPVDKHKTEKTSAAEVIMTVLHAGGKFDDDSYKVSGGLHGVGVSVVNALSETLNLRIHKNGNTYEQDYVHGVPQKPLKKGSKTNRSGTTVTFKPSAKTFTNTTYSFDILSKRLRELSFLNSGLSIKLTDTRSGKEEEFYFEGGISAFVSHLNKVQSPVHESVINFSKTIDDITVDIALQWNESYRENMYCFANTIRQKDGGTHLAGFRGALTRTINTYIDKEIAKADISVSGEDCREGMTAIISVKHPDPKFSSQTKDKLVSSEVKGVVESVVNKHLKEFLIENPNEAKIIISKIVESAAAREAARKAREMTRRKGALDIA

SEQ ID NO: 184580 - protein, 554 aa, Unknown
  Bacterial polypetide isolated from the Sargasso Sea
MSKNNYGADKISVLKGLEAVRKRPAMYIGDVGKRGYHHLVSEVVDNSIDEALAGFCTSIIVTIKNDGFISIEDNGRGIPVEIHKTEGKPALEVVMTVLHAGGKFDKNTYKVSGGLHGVGVSVVNALSETLIAEVHRDGFYYKQEYKIGEPTTEVEKIGKSDKTGTIISFKPDQSVFSHKGFEEEIIKGRLKELAYLNKNLSIKLINEPEETETEYCFPGGLSDFVKYLDGNEDLIHDEVISVTKEDIEVPVDLALRYSTNYNSNIFSFVNNINTIEGGTHLSGFRSALTRALNSYANKNDLIKTKKNEKFSLSGDDFREGLTVVISVKVQEPQFEGQTKTKLGNGEVKGMVDNVVYDGIQAFLEQNPKVGKRIIEKAAEAARARIAAKKARELVRKKSGLGSTTLPGKLADCSNKDPLQCELFLVEGDSAGGTAKQGRDRRTQAILPLRGKVINSEKAREDKLLANNEIQSIITALGCGFGEDEDDPNSFNPEKLRYHKIVIMTDADVDGSHIRTLLLTFFWRKMKSLVQGGFLYMAMPPLYKRSRVKKKDMHI

SEQ ID NO: 184581 - protein, 325 aa, Unknown
  Bacterial polypetide isolated from the Sargasso Sea
MAKKSQEAKYDSSNIQVLKGLEAVKKRPGMYIGDTDDGSGLHHMVFEVLDNCIDEAMAGYCSDIKVIINKNGSVTIEDNGRGIPVDVHKKEGVSAAQLIMTTLHSGGKFDDNSYKVSGGLHGVGVSVVNALSKKLTLEVHRDGGEYFQEYSDGKPKAKLKKVKKSDKTGTKITFFPSEKIFTSIDFEVDRIYKRIQELSFLNAGVSINVEDKKSGKSKKFKNNGGLSSYVTHLRGRKQTVSDIFECSATDNDVGVEIAMQWTDSYTENVLCYTNNIPQKDGGTHLAGFRGSLTRVLKSFIKKENAKKTPTDLLGEDVREGLIAII

SEQ ID NO: 184582 - protein, 324 aa, Unknown
  Bacterial polypetide isolated from the Sargasso Sea
MSDFAKEIISVNIEDELKQSYLSYALSVIHGRALPDIRDGLKPVHRRILYAMYDLKNYYNRPYKKSARVVGDVIGKYHPHGDSAVYDAMVRMAQDFSMRYPIVEGQGNFGSIDGDPPAAMRYTEVRMAKITDQMLKDIEKETVSYSPNYDGSEDIPDVLPTKIPNLLVNGSSGIAVGMATNIPPHNITEVLNGCINLINNPKVSIDELIKDISGPDFPTGGTIDGKAGIYEAYKTGRGIIHIRSNTSIEEDKSGKQSLIINEIPFMVNKARMLEKIAELVKEKKIEGITEIRDESDKDGLRVVIEVRKGDSVEVLEIICLRKHN

SEQ ID NO: 184583 - protein, 639 aa, Unknown
  Bacterial polypetide isolated from the Sargasso Sea
MAKKSKEAKYDSSNIQVLKGLEAVKKRPGMYIGDTDDGSGLHHMVFEVLDNCIDEAMAGYCSDINVIINKNGSVTIEDNGRGIPVDVHKKEGVSAAQLIMTTLHSGGKFDDNSYKVSGGLHGVGVSVVNALSKKLTLEVHRDGGEYFQEYADGKPKAKLKKVKTSKKTGTKITFFPSEKIFASVDFEVERIYKRIQELSFLNAGVGINVEDKKTGKFKKFKNTGGLSSYVTHLKGRKQIVSEIFECSATENDVGVEIAMQWTDSYSENVLCYTNNIPQKDGGTHLAGFRGSLTRVLKAFIKKENAKKTPTDLLGEDVREGLIAIISVKVPDPKFSSQTKEKLVSSEVESVVSTIFSKYFNEFLLENPKDAMCIVGKVSEAALAREAARKAREMTRRKGVLEIAGLPGKLADCQEKDPTLSEIYIVEGDSAGGSAKQGRNRKNQAILPLKGKIINVEKARIDKVLGSAEVGTLIKALGCGIGKEDFDIDNLRYHRIIIMTDADVDGSHIRTLLLTFFYRQMYEIVEKGHVYIALPPLYKITKGKEFVYASDESAKDDAIKKLSKNGNRGLEVQRYKGLGEMNPEQLWTTTMDPINRRMMRVDIKDVQDANESFEMLMGDDVEPRREFIDANALSVKELDI

SEQ ID NO: 184584 - protein, 546 aa, Unknown
  Bacterial polypetide isolated from the Sargasso Sea
MAKKTKKKKTVKKKSLKTKPIKKTNSTYTAKDIEVLEGLEPVRKRPGMYIGGTDIIAMHHLVSEVLDNSMDEVVAGHADKVDVKLIDNLTIEISDNGRGIPVDKHPKFKLPAAEVIMTTLHSGGKFSNSNYKTSGGLHGVGVSVVNALSKKLSLEIARDKKVYTQNYSQGFSKNNLKTIKKGSIKKGTKIIFSPDPEIFGDDINFDSSIIYNMAKAKAYLIPDVVINWTCPKSLTKKNVPTSDKLHYSDGIKDYLETLSQPHEPIFDEAFYFKSDLDKDESSIEGIINWYDAIEPIAESYCNTIKTHQGGTHENGFKSAVFKAFKEFSKLKYERKSSQINQEDLFGSSGSILSIFIENPEFQGQTKEKLSSVEAGRKIESKIKQLFEQWLNTKTKSAENLFLYAFNRSQIRLQNKSDQIIDRNIKRKKITLPGKLADCSIDGNKGTEIFLVEGDSAGGSAKQARDRQNQAILPLRGKILNVISAARDKVNANQEIIDLVQALGCKRGEKYSPKDIRYEKVIIMTDADVDGAHIATLLMAFFYSEFP

SEQ ID NO: 184585 - protein, 269 aa, Unknown
  Bacterial polypetide isolated from the Sargasso Sea
MSIISKVSEAALAREAARKAREMTRRKGVLEIAGLPGKLADCQEKDPKLSEIYIVEGDSAGGSAKQGRNRKNQAILPLKGKILNVEKARIDKVLGSQEVGTLIKALGCGIGEEDFDINNLRYHRIIIMTDADVDGSHIRTLLLTFFYRQMYEIVDKGHIYIALPPLYKITKGKEYIYASDEKQKDEAIKLLSKSGSRGLEVQRYKGLGEMNPEQLWTTTMDPENRRMMRVDIKDVQDANESFEILMGDDVEPRREFIDKNALTIKELDI

SEQ ID NO: 184586 - protein, 149 aa, Unknown
  Bacterial polypetide isolated from the Sargasso Sea
MKRIIKNDINEILKSRYLSYAVSTIISRSLPDLRDGLKPVHRRIIYSMYLLKLFNNSPFKKSARIVGDVMGKFHPHGDQAIYQSLVRMAQDFSSRLTLIEGQGNFGNIDGDNAAAMRYTEARLEEITELFFDGIEEDSITFVENYDSQN

SEQ ID NO: 184587 - protein, 236 aa, Unknown
  Bacterial polypetide isolated from the Sargasso Sea
MSSSYLSYAMSVIVSRALPDVRDGLKPVHRRILYAMYKGGYDWSKQFRKSARIVGDVIGKYHPHGDQSVYDALVRMVQDFSMSLPLVQGQGNFGSIDGDPAAAMRYTETRLSKVSQFLIDDIEKNTISFKSNYDETEKEPSVLPAQFPNLLVNGAGGIAVGMATSIPPHNLGEIIDGTLALIDNKDIKIKELMKHIPGPDFPTGGVIIGKDIIKQGYNNGRGSFKIRGEVSVESLK

SEQ ID NO: 184588 - protein, 339 aa, Unknown
  Bacterial polypetide isolated from the Sargasso Sea
DARDGLKPVHRRILYAMHEDGYDHNKQYRKSARVVGSVIGKYHPHGDQSIYDALVRMAQPFSLHLPLVDGQGNFGSVDGDPPAAMRYTEVRMEKIAHHLLNDIDQDTVDFQENYDNSESEPIVLPAEFPNLLVNGAGGIAVGMATNIPPHNLSEVTDACILLIDKPETDINELCEIIPGPDFPTGGLILGKRGAKSAYTTGKGSVVIRAKVEVEEIRKDREALIVTEIPYQLNKVLLIEKIAELVRNKSIEGISDLRDESDRHGMRIVIELKRDSVADVILNQLYKFTQLQSSFGANLVALDRGSPKVMNLKEMLTCFIDFREEVVTRRLKFKLNKARD

SEQ ID NO: 184589 - protein, 162 aa, Unknown
  Bacterial polypetide isolated from the Sargasso Sea
MDKNQITEKNIKPIVMYDEISSSYLSYAMSVIISRALPDVRDGLKPVHRRILYAMHKGGYDWNKHFRKSSRIVGDVMGKYHPHGDQAIYDALVRMVQDFSMSLPLIDGQGNFGSIDGDKAAAMRYTETKLSKVTQFLIDDIEKNTVNFKSNYDETEKEPEVL

SEQ ID NO: 184590 - protein, 808 aa, Unknown
  Bacterial polypetide isolated from the Sargasso Sea
MTETNNSQPDNSYGASSIQILEGLEAVRKRPGMYIGDTSDGTGLHHLVFEVLDNSIDEALAGHCNDIQVIIHADNSISITDNGRGVPTGLKMDDKHDPKRSAAEIVMTELHAGGKFDQNSYKVSGGLHGVGVSCVNALSAWLRLTIRRDGKKHFMEFHRGVPQNRVIEEIDGVAVSPIQLIGETENRGTEVHFLADETIFGNVEYHYDILAKRIRELSFLNNGVRIKLTDQRTGKEEDFAFVGGVKGFVEYINKNKAVLHPNIFHVSGEKDGVGVEVAMQWNDSYNENVLCFTNNIPQRDGGTHLTGLRAAMTRVLNKYINDHEVAKKAKVETSGDDMREGLSCVLSVKVPEPKFSAQTKDKLVSSEVRAPVEDVVAKALEEFLLETPNDAKIICSKIVDAARARDAARKAREMTRRKGVLDGVGLPGKLADCQEKDPAKSEIYIVEGDSAGGSAKQGRDRKFQAILPLRGKVLNVEKARYDKLLSSEQIVTLITALGCGIGKEDYNLDKLRYHRIIIMTDADVDGAHIRTLLLTFFYRQMPDMIERGYIYIAQPPLFKIKAGKDERYLKDEAEVNAHILKLALQGSELLASEGATPITGDALGELARAYLLAQAVVNRLSRLYDAGALEAVMDGVVIDLSSEEAAEASAAALEAKLRDDALKPEVTVTTMYDPVRELRSLKIARTHHGNQKISVLDQDFQLTADYQQLVNTANTFKGLIGPGAVIKRGERSMAVTDFKSAMKWLLADAERNISKQRYKGLGEMNPGQLWETTMDPTVRRLLRVQIEDAIAADGIFTTLMGDDGSRGG

SEQ ID NO: 184591 - protein, 100 aa, Unknown
  Bacterial polypetide isolated from the Sargasso Sea
MDQFAKETLPISLEEEMRRSYLDYAMSVIVGRALPDVRDGLKPVHRRVLYAMHELNNDWNRAYKKSARIVGDVIGKYHPHGDTAVYDTIVRMAQDFSLRY

SEQ ID NO: 184592 - protein, 644 aa, Unknown
  Bacterial polypetide isolated from the Sargasso Sea
MTTDKNQNYSADSIQALEGMEHVRKRPSMYIGDVGVRGLHHLVYEVVDNSIDEAMAGHCNKIGVIINEDNSISVEDDGRGIPVGIHQKEGVSALEVVMTKIGAGGKFDKDSYKVSGGLHGVGVSVVNALSDHLTAVVYRDGKIWQQEYERGKTLYPVKETGKTDKTGTLVTFKPDLSIFKDVEKYNYETLANRMRELSYLNKGINISLTDKRKKVDGEFITESFHSEHGLKEFITFLDENREPLIPEVISIEGEKNNVPVEIAMVYNSSFNENIHSYVNNINTHEGGTHLSGFRRGLTSTLKKYADSSGLLDKIKFEISGDDFREGLTAIISVKVAEPQFEGQTKTKLGNKEVSSAVSQAVSEMLQNYLEEHPNEAKIIVDKVVLAAQARHAARKAREMVQRKTVMGGGGLPGKLSDCSEQDPSLCEIFLVEGDSAGGTAKQGRDRNFQAILPLRGKILNVEKAMQHKVFENQEIINIYTALGVTVGTEEDSKALNLEKLRYHKIVIMCDADVDGSHISTLILTFFFRYMKELIENGHVYIATPPLYLVKKASKKEYAWSDEARDKLIEEFGTGSSVQRYKGLGEMNAIQLWETTMNPDSRTFRKVTIDTPVEADRVFTMLMGDEVPPRRDFIERNATYANIDA

SEQ ID NO: 184593 - protein, 345 aa, Unknown
  Bacterial polypetide isolated from the Sargasso Sea
TAATIHGIDGIKQAYETGRGRVHVRAKTSIEENGDRESIVVSELPYQVNKARLIEKIAELVRDKKIEGISEIRDESDKDGLRVVIDLKRGTVSDVLLNNLYKQTLLESTFSINMVALSNGQPKLMNLKGMLDAFLSHRRDVVTKRTIYELNRSINRAHILEGQTIALTNIDEMIAIIKKSKTPAEAQKALVSKLWKVGKVKDMLKKAGNVSTIPKHLLNIENFGIEKSKYRLSSEQAKAILDLKLNRLTGLEQESIFNEYSDLLEDIKRFTMILSNPDELTSVIREELIETQETYGDERRTEIVEFYSDLTDEDLIPEEDLIVTLSKAGYAKTQPLDTYQAQNRG

SEQ ID NO: 184594 - protein, 797 aa, Unknown
  Bacterial polypetide isolated from the Sargasso Sea
MAKKSVNNNHKGSEDYSAEDITVMEGLEAVRKRPGMYIGTTGLEGVQHLIHEIVDNGVDEAMAGFASKITVILNKDKSVTVVDDGRGIPVDIHKKTGISAVETVMTTLHAGGKFGGKGYQVSGGLHGVGASVVNALSSWLKVEVRRDKKVWNQSYIKGKPEGPLESRPQTEEDLKGTGTSVTWLPDQEIFPDIDYSYEAITTRFREMAYLNQGLNIQFISDYHESLWPHNQVAFKFEGGVQSFVRNLNKKRSSIHENIMYANEVIEDIVVETAIQYNESFIDNTLSFANCIRTADGGTHVTGFRSALTRVINDYGKKQGFFKEEIQSLSGEDVREGLMCVVSVKVKDPQFEGQTKGRLGNPEVKGAVEQIIGRRLSEFIEDNPEDAKKILNKSLTSARAREAAKKARDLIIRKNALDGGSLPGKLADCSEKDPSKSELYIVEGDSAGGSAKQGRDRNFQAILPLRGKILNVEKARPEKMLLHEEIVALITAIGTGLGEDFNHEKLRYHRIIIMTDADVDGAHIRTLLLTFFYRNMPELIGAGNLYIAQPPLYKVSRGRSGKWIYSDNDLNKWISEKIYNNFSISHTEGKKDIKGASIGNFISNIKSFSESNDIARILNLSDEEFLSLASKNIDSFENKEIEQEDENIQPDLFDSGLIENEEEIKKINESMTINNHPSIIKAQKIYPEIKEFLKGTFSIKKNDEIIEENLNWNEVISALENNADKSGFNIQRYKGLGEMNPEQLWDTTMDPENRVMLRVSADDAISADDIFRTLMGDDVEPRRDFIKTNALEVKNLDI

SEQ ID NO: 184595 - protein, 388 aa, Unknown
  Bacterial polypetide isolated from the Sargasso Sea
GYRKSARPVGDVMGKFHPHGDSAIYDALVRMAQPFSMSLPLLDGQGNFGSMDGDNPAAMRYTEVRMDKPASFLLADIEKDTVDFQDNYDGKDREPTVLPARYPNMLVNGAGGIAVGMATNIPPHNLGEVINATLALIENPDLTSENLVEFVPAPDFPTGGIILGRTGARKAYTEGRGSVLIRAKTKIEEIKKDRYAIIVDEIPYQVNKASMIEKIAEQVREKKIEGVSHVQDESDRNGVRVVIELKRDATPDVVLNQLFRFTPLQTSFGCNMLALNGGRPEQLTLRTFLTNFIAFREEVVARRTAFELRKARERSHILCGLAVTVSNVDEIVATIRASSDASEAREKLMQRSWPANEIREYIALIDDPTHKINDDGTYNLSEAQVRAI

SEQ ID NO: 184596 - protein, 652 aa, Unknown
  Bacterial polypetide isolated from the Sargasso Sea
PPHNLSEIIDGLIALIDDESIETENLMNHIKGPDFPTAGLILGMDGLKEAYSTGRGKIKMRARAHIETNKKGRNSIVVTEVPYQTNKASLVEKIADLVRDKKVVGISDLRDESDKDGIRVVIETKRDAVPEVILNQLYKHTQLQDTFGIILLALVDGIPKIMPLKTVLNHFIEFRHEVVVKRTEFELKEAEARAHILEGLKIALDNIDDVIKIIRGSKDPAQAKEGLMNGFNLSELQSQAILDMRLQKLTGLEVDKVVAEYKELIQIISNLKSILENKSKRMEIIKTELLEIKDLYGDERRTEIVPVDTDFSMEDMIAEEEVVLTITHQGYIKRTALNTYRSQRRGGRGVQGAMSKDEDFVEHLFIANTHNYMLFFTDTGKCYWLKVYDIPQAGRASRGRAIVNLIGCNPEEKVEAFVSVKDFDDDHYIVMATQNGIIKKTVLSAYGKPRKGGIYAIEIRDGDKLIQARVSNGENDILLGTHEGKSIRFSEGDVRASGRKTMGVKGISLSSDIDYVVGMLLVKREGTILVATEKGYGKRTEVLQYRTQTRAGKGVLTMRCTDKTGKMVNIMEVVDSDDLIVITDSGVLMRQPVKAIRAIGRVTQGVRLVKLDDGTNISSITRVISEDTATQKEEDKQISIDTPESETPPTQD

SEQ ID NO: 184597 - protein, 845 aa, Unknown
  Bacterial polypetide isolated from the Sargasso Sea
MSDFAKEILPVNIEDELKQSYLSYAMSVIHGRALPDVRDGLKPVHRRILYAMHDLKNNYNKPYKKSARVVGDVIGKYHPHGDSAAYDAIVRMAQDFSMRYTLIEGQGNFGSIDGDPPAAMRYTEVRMQKISDEILADLEKETVSFSENYDGSEQMPDVMPTKIPNLLINGSSGIAVGMATNVPPHNLTEVINGSLKLLENPKLSIDQIIDSISGPDFPTGGTIDGKMGIYEAYKTGRGIIYVRSKSKVEESKTGKKSLVIYEIPYMVNKARTLEKIAELVKEKKLDGISEIRDESDKDGLRIVIDVKKGESVEVLENNLFAQTQLEQSFGINFTVLVDGQPKVLNLKEILQEFLKHRKDVVLKRTKFELRKAKERGHIVEGLMVAIANIDEIIKIIKKSKDPKIAAQELIKKKWKAGPVEAILKKVGKDACKPKGVAKGVGLTGKSYKLSNDQAKAILELRLGRLTGLEQDNLSSEFNSLIEKITSLQEIIDDKGVLQKVIEDELKEIKETYGDDRRTDINDTRQDISNEDLIPEEIRVLTISRTGYAKTQPLEEYREQRRGGQGKAAASVKEEDVIQNLYVLSSHSQMLCFTTKGKVYWLKVYEVPVASRTSKGRPLVNMLNLDDDEKVSDILPVDEFSEDRYVFMATKKGTTKKTQLSFFAKKYKSGIKAINLDTDDELIGSAITNGDDEILLASSAGKLIRFSEKKVRPMGRTARGVRGMRIKKDQKIISLMVADNEKEILCVSENGFGKKTPVDDFPTHNRGGQGVISIKTSERNGLMVASTLVDNNDGIMLISDKGTMIRTSAEQIPTISRNTQGVKIITPKEGEKILECVRIDPEDEEE

SEQ ID NO: 184598 - protein, 404 aa, Unknown
  Bacterial polypetide isolated from the Sargasso Sea
PIISSIIKMEGEKNGIPVEVAMVYNSSFSENLHSYVNNIDTHEGGTHLTGFRRGLTNTLKKYADSSGLTDKLKFDISSDDFREGLTAVISVKVAEPQFEGQTKTKLGNREVSSAVSQSVSQMLEDYLEENPDDSKIIVQKIILAAQARTAASKAREMIQRKTVMSGGGLPGKLSDCSETDPSKCEVFLVEGDSAGGTAKQGRDRVFQAILPLRGKILNVEKAQQHRVFENEEIRNIYTALGVSVGTEEDSKALNLEKLRYHKIIVMCDADVDGSHISTLILTFFFNYMRELVERGNIYIATPPLYLVKKGSKKVYAWNDEERDNIAKDLGSGVSIQRYKGLGEMNADQLWDTTMNPESRTLRQITLNNDNAKEAQEWFATLMGDEVPPRRKFIEDNAIYAKIDV

SEQ ID NO: 184599 - protein, 848 aa, Unknown
  Bacterial polypetide isolated from the Sargasso Sea
MGEITAKEIVPIDIEKELKQSYLDYAMSVIVGRALPDARDGLKPVHRRALYAMHVLNNDYGRPHKKSARIVGDIIGKYHPHGDSAAYETIVRMAQWWSLRYPLVDGQGNFGSMDGDGPAAQRYTEVRMAKISQELLADLDKETVNFVENYDGTETMPEVLPTKVPNMLVNGSAGIAVGMATNMAPHNLNETLLACLAFIDNPDISTAELMEFLPGPDFPTGGIINGKAGIVSAYESGKGRVKIRAKTHFEDEEKDKAKIVITEMPYQVNKSKLIEKIAELSRDKKLEGIRDIRDESDKDGVRVVIDLKSGHIPDVLLNNLFAQTQMQTVFGINNVALVEGEPKLLNLKAMLSVFFNHRKEVVSRRTFFDLRKAKERGHVLEGLTIALANIDAMIDLIKKSKEGSEAKQKLLSKKWKPGKVISMLKKAGPDACKLEGSDDTLGLSGKSYQLSEVQAQAILDMRLQRLTGLEQDRLIGEYEEIIERISYLLGILNDSKKLIEVVTDELKEIQENYKDERRTEIQDSSADLSAEDLITPEDRVVTISHEGYAKTQPLEEYRAQRRGGTGKTAASVKDEDFVEQLLVANTHTTLLCFSNLGQVYWLKVYEIPSAGRAAKGRPLVNLIQLSEGERITSMVPVEEYDDNHYVLMATKTGTVKKTVLTEFSNQRKGGKRAITLQDGDELVGTTVTDGSKFVMLVSNAGKAAHFSETEVRSMGRTAKGVRGIKLDKDQYVISLIIPEEDASIFTVSENGYGKRSKSIDFRKTRRGAKGVIAMQVSERNGQLIGAAQVTDDDEVMLISNKGMLVRTKVSEVNVIGRNTQGVTVIRLKDLEKLISIAPISEEFIGDDE

SEQ ID NO: 184600 - protein, 837 aa, Unknown
  Bacterial polypetide isolated from the Sargasso Sea
MSSSYLSYAMSVIISRALPDIRDGLKPVHRRILYAMHKGGFDWTKQFRKSARIVGDVIGKYHPHGDQAVYDALVRMVQDFSMSVPLIDGQGNFGSIDGDPPAAMRYTETKLAKISQFLIDDIEKNTVSFKSNYDETEQEPTVLPAQYPNLLVNGAGGIAVGMATSIPPHNLGEIIDGTLALIKNKDIKVKELMKHIPGPDFPTGGVIIGKDIIREGYKTGRGSFKIRGEINVENLKNGKDRLVITSIPYQVNKSNLNEKIAELVRDKKIEGISDIRDESNREGIRVAIDLRRSVEPETIKRQLYKYTSIETSFGFNSLAIVDNKPKTCSLKDFLENFLKFREDVVIKKTKYDLKKAEDRVHVLLGLSVSVENIDKVIKIIRSSKNPEEAKNTLIKTKWKITKSAKLIKLVDSKNYKGSYNLSETQVTSILELRLQKLTALGINEIEEEIKKLSELIMKYKKIINSKSELLKVISNELSQIKEKFSSPRRTQIIDAVLNYNIEETIQKESVIITITLQGYIKRGALSNVKQQKRGGKGKTGIKTRDEDSVVQTLSVNTHTSVLFFSTEGLAYKVKAWKIPEGSAASKGKSLFNILPLKNHQSISSIMPFPDSDVDTKDMHIIFATSEGKIRKNNLEDFTSINASGKIAMKLDGNDKIIGVKICRDDQDIILSTKLGKCIRFESKKLRVFKGRSSKGIRGINLAENDTIVSLSIIDHDSNKKAKTKDQKSEIKAKEKFILSITENGYGKRTSHYDYRVTNRGGKGIIGIVNSQRNGNVSSSFPVFQGDQILISTNKGRVIRTAVKEIRIAGRNTQGVRIIKLTGDEKVVSAIKLDDNLI

SEQ ID NO: 184601 - protein, 665 aa, Unknown
  Bacterial polypetide isolated from the Sargasso Sea
MRKKSKKNKSIKKKSSSKKTVKNSNSSYTAKDIEVLEGLEPVRKRPGMYIGGTDIMAMHHLVSEVLDNSMDEVVAGFANKVEIKLVSQDTIEISDNGRGIPVDKHPKFKIPAVEVIMTTLHSGGKFSKNNYKTSGGLHGVGISVVNALSKKLTLEIARDKKYFVQTYSQGSPKNKLKASAKGPLKKGTKIVFSPDPEIFGKEIEFDASIIYNMAKAKAYLIPDVEIHWSCSKATAKKNIPLSDKLHYSDGIKDYLNNLCTPNDPIFEDPFYFNTEIDVDSGKIEGIINWFDVMEPINESYCNTIKTPLGGTHESGFKSGIYKAFKDFSKIKYEKKSSQINQEDLFGSSGSILSAFIENPEFQGQTKEKLSSIEPGRKIEMKARQLFEQWLTKKTRSAEELFQYAFNRSQLRLQSKSNLIIEKNIKRKKTTLPGKLADCSIDGNKGTEIFLVEGDSAGGSAKQARDRQTQAILPLRGKILNVISAGRDKINANQEITDLMQAIGCKRGDKFNSKDIRYEKIIIMTDADVDGAHISTLLMAFFYKEFPKLIDEGHLYLSVPPLYKISKGAKTYYAVNDKHKDEIIKKEFKNSDVTINRFKGLGEMMPAQLKETTMSQENRTLLKVQIASKDKKKTHKSVDSLMGKKPELRFKFIVENSKKIAAESIL

SEQ ID NO: 184602 - protein, 480 aa, Unknown
  Bacterial polypetide isolated from the Sargasso Sea
FKGKAKTKVKIEKCNKNLRGTEIKFIPDKEIFESILFSPKKLYSFIKMKAVLVKDTKINFNINKELIKDKTPDKEEFLYVKGIADFMQSNFKQRKKITNKDFYVSMTFNTNEKCEIYISFNALEQSSLMSFCNTIETPDGGSHEHALKNSFMKAIKIFSIKNQLTKYQNININDIFDYTDTLISIFINSPSFEGQTKKRITMPKLQKQLEELLQNQILLWLNSNKRESLKIIEILIERALLRTDLSKIKKLDRKSIKEKNRLPGKLVDCTSNTIQNTELFIVEGDSAGGSAKQARFRSTQAILPLKGKILNVYSVSLSKIADNNEIQNLVHSLGCGLGKNFQLSKLRYEKIILMTDADVDGSHIATLLITFFYKYMRKIIEEGKLYLAMPPLYKISYNQENFFAYNEKDKDKILNDNKGSPQLTRFKGLGEMPANQLKDTTMDPEKRSLIQLKLTDGIKYTKKTEKLFEALMGKKAEKRL

SEQ ID NO: 184603 - protein, 856 aa, Unknown
  Bacterial polypetide isolated from the Sargasso Sea
NSNTKNDPYSLGSIKIQEEMRNSYLDYAMSVIVSRAIPDLRDGLKPVHRRILYAMHETGNTPDKPYRKSARPVGDVMGKYHPHGDSAIYDALVRMAQSFSMGEVLIDGQGNFGSIDGDSAAAMRYTEVKLSNITENILSDIDKDTVVFQDNYDGKDLEPSVLPAQFPNLFLNGAGGIAVGMATNIPPHNLKELIEATKKIIFDPKCTLEDLIEIVPGPDFPTGGIILGFGGARKAYAEGKGSVLIRAKTSIETIRQDRSAIVVSEIPYQVNKSNLIEKIADLAKNKKIEGISHIQDESDRFGIRIVIELKRDATADVVLNQLYRFTPLQTSFGCNLLALNKGKPEQLNLKMYLEEFIEFRVEIVTKRTEFDLKKNRDRSHLLCGLAVAVTNIDKVVSLIRNSRDGSEAKNKLMETRWPSKQITAYLELIDDPSHKINDDGTYNLTENQARAILDLRLQRLTALGIKEITEELIQLSENIKLYLEILSSRKKILGIVTEELSLISEKYGRERRSEIIEFEGDTEDEDLIEKDDMVVSVTAGGYIKRTSLSEYRAQNRGGKGLQGMNPKDEDVVTNLFVANTHTPLLFFSTDGIVYKIKTWRLPIGGRNARGKAIINILPINSGKSVAAIMPVDAPEETWDDLQIFFATSTGSVRRNALSDFTKVQSNGKIAMKLPENTNLIGVRICSDNDDVLLNSSKGKAIRFAVSDVRVFKGRDSTGVRGIKLAKNDFVVSMAVIRHVNVSSEERYAYFKMRRAITGEESLEETDFDNNEEMISISKDRYAELSAAEEWILTLTSSGYGKRSSALEFRVSGRGGQGITAANLLRREDTIVAAFPVDDDDQIMLMTSTGKAIRCPV

SEQ ID NO: 184604 - protein, 244 aa, Unknown
  Bacterial polypetide isolated from the Sargasso Sea
RVERKKTFKGPALPGKLSDCNSEDLNKTELFLVEGDSAGGSAKQARERSFQAIMPLRGKILNTWELESEEIIKSQEIKNLSTAIGVLPGNNDLSGLRYGKICILADADSDGLHIATLLCALFLRHYKSLVKDGRIFIAMPPLYRIDCGKAVLYALDEKQKDDVVKEFRSKKGKPKINIQRFKGLGEMNPSQLRETVMDPNTRQLVRLSVSATDNANAMMDLLLSKKNAPARKEWLEKKGSLVRI

SEQ ID NO: 184605 - protein, 905 aa, Unknown
  Bacterial polypetide isolated from the Sargasso Sea
MSDTTDEDPIDSKDISNTNLDQEMRQSYLDYAMSVIVSRALPDARDGLKPVHRRILYAMHEDGYDYNKQYRKSARVVGSVIGKYHPHGDQSIYDALVRMAQPFSLHLPLVDGQGNFGSVDGDPPAAMRYTEVRMEKIAHHLLNDINLDTVDFQENYDNSESEPIVLPAEFPNLLVNGAGGIAVGMATNIPPHNLNEITEACMFIIDNPKTDDQEMDQRLCEIVPGPDFPTGGIILGKSGARSAYTTGRGSVVIRAKVEIEEIRKDREALIVTEIPYQLNKVLLIQKIADLVRNKTIEGISDLRDESDRHGMRIVIELKRDSVAEVILNQLYKFTQLQTSFGANMVALDKGTPKPMKLREMLTCFIDFREEVVTRRLKFKLNKARDRAHLLVGLAIAVSNIDEIIKLIRSSKSPAEAREDLMDREWPAKDVKSLIKLIDDPRHGITAKGNCSFTEEQARAILELRLQRLTAMGIDEIKSELDDLKGTIEDLLSTLGDKGKIYDIIKDELTYVKDNFAVERRTEILGELDDVEDEDLIKKEDMAVTVTRSGYIKRVPLSTYRAQNRGGKGRAGMQTKDDDFVRHIFISNTHQPILFFSSKGMVYRLKTWKLPLSSPQAKGKAMVNLLPLDEDERITTVMSLPENQDEWENLYVIFATSSGGIRRNSLADFWRINKNGKIAMKLDSKERIISVQTCTEDNDILLASKKGQSIRFNVDKVRVFASRSSTGVRGIRLSKNDSVVGMAVLNRVKASNDELRAYLKMSSMMRKATTDDSNDDDDLDFEGNDIELSTERYSELAASEEIILTVASNGQGKRSSAYEYRTTNRGGKGVIGIKMTKSHGDLVASFVVDENDQIMLIDNSGKLIRCPITDIRIMGRTTQGVKIFNIDKNAHVVSVERIFESEGEEE

SEQ ID NO: 184606 - protein, 741 aa, Unknown
  Bacterial polypetide isolated from the Sargasso Sea
NEDASVTVKDDGRGIPVDIHKAENKSAAEVIMTTLHAGGKFDDDSYKVSGGLHGVGVSVVNALSEKLSLTIHKDGFKYQQDYKDSSPIKPLKKCGTSNETGSVIQFLPSKKYFRDLNYKEETIKRRLKELAFLNSGISVHFSNDITGKKIKYFYEGGLKEYINEILQNKKDIHNDLIYLPPTTKGGNSIEISMKWTTSYSEQIMCYTNNIFQKDGGTHLSGFRSALTRTINNYSLKNNGKQKYEISGDDCREGLVAIISIKMSDPKFSSQTKDKLVSSEIKSLTETTLASKLSEFLEESPKDAKLIIGKIQQAAMAREEARKAKDLIRRKDPLGIANLPGKLADCQEKDREKCELFIVEGDSAGGSAKQARDRKTQAILPLKGKILNTEKSQDYKLLSSSEVGSLISALGCGFNHESEGDFDINNLRYGKIIIMTDADVDGAHIRTLLLTLLARKMKPLFDQGRIYIAQPPLYKIKKGKTEKYIANDFDLNRFLTASFFDSNNLFSDNKPVPITDSQSILLNYSMIDNILKKVSKSKDKYILKSMAFINPINADDTYQNGNLDAISEYIKSLCKLVNIISPINFSYDLALNELDDNSYEIIISKKVNGVPDTSVSPINKKFFSSKTYHSLIKLNLYQFSNKPILLKSDNSKASFDYLHQLCDHVFTSARKAISLQRYKGLGEMNPSQLAETTMNPETRSLLQVLQIDDDDYVIFETLMGDDVEKRRDFIVSSANAVENVDV

SEQ ID NO: 184607 - protein, 435 aa, Unknown
  Bacterial polypetide isolated from the Sargasso Sea
MANSKYTAESIEVLSGLEPVRKRPGMYTNTTSPNHLVMEVVDNSVDEAIAGHAKEISVCLNKDNSVTVEDDGRGMPVDMHPEEKVPGVELIFSRLHAGAKFSNKEYTFSGGLHGVGVSVVNALSTHLKAEIKRDGSKFAIEFADSLKKKDLKKIDAVGQRNTGTKIFFKPDPVFFDTEKISSKQLSNALRAKAVLCSGLTIKYKDEISKTKEEWCYVDGLGDYLINELGDGLFVPEKPIIGEHQDEESGLSWALMWERGDKEKISESYVNLIPTSQGGTHVSGMKSGMTEALKEFCDYRKLIPRGVKITSDDVWKNCNFVLSAKLKDPQFSGQTKEKLSSKEFQNIASSISKDSLAIWLNQHTEAAEEIAFISIENAQARVKASQKVERKKITKGITLPGKLSDCVSGEISETELFLVEGESAGGSAKQARNRQF

SEQ ID NO: 184608 - protein, 254 aa, Unknown
  Bacterial polypetide isolated from the Sargasso Sea
MQKTEVKNNSNYKPIFVHQEMSSSYLSYAMSVIVSRALPDVRDGLKPVHRRIIYAMYKGGYDWGKPFRKSARIVGDVIGKYHPHGDQAVYDALVRLVQDFSMSLPLIDGQGNFGSIDGDPPAAMRYTETKLSKVSQFLTEGLEKNTVDFRNNYDETEREPTVLPSQYPNLLVNGAGGIAVGMATSIPPHNLGEIIDGTISYIKNNDITIGQLMKHIPGPDFPTGGLIIGRDIIKQGYNKGRGSFKIRGEIGEES

SEQ ID NO: 184609 - protein, 695 aa, Unknown
  Bacterial polypetide isolated from the Sargasso Sea
SQLLMHYSEKLDLSIKRDGKEHAMSFQNGETVKTLKAIKDCKDETGTEITFYPSKSVFTMTEFSRRTLEARLREMAFLNSGISIHLEDKRKDEPWAKTMSYEGGLEEFVKHIDQTRKSLMDLPISFSGKKDEIEVDVSMWWNDSYYETVNCFTNNIPQKDGGTHLAGLRSALTRVVNSYAQDTGLTKKENVQLVGEDIREGFTCVLSVKVADPKFSSQTKDKLVSSEVRPVVESLINDLLSNWFEEHPAEAKIIVGKVVEAAAAREAARKARDLTRRKGALDVSSLPGKLADCQEKDPEKCEIFIVEGESAGGSAKQGRDRSTQAILPLKGKIINCEKARLSKVLSSNEIATLITALGGGIGNSSNENDEDDESFKTDKLRYKKVIIMTDADVDGAHIKTLLLTFFYRQMRPLITDGCLYIAQPPLYKAKKGNSETYLKDDDDLENYLIDSGINDSSFILNNGEVLASNDLIELVNKSRNFKKLINSLPKKYNQGFVETVSISGAFKQPIKISDKSLLEISNRLTKKYSDIDADWNASYDAENGLMVSREVRGVSESMTIGQGLFNSSDSRRLEKISDEIKQFFPYMNEEASNIFERDGRSYIVNGPIDLIESIFIEGRKGLQIQRYKGLGEMNAEQLWDTTLDPDSRRLLRVKIDSGVDNSGIFADLMGDEVIKRREFIQDSIESGDLVANLDI

SEQ ID NO: 184610 - protein, 537 aa, Unknown
  Bacterial polypetide isolated from the Sargasso Sea
MVTDNLGEIRKVNIQDEMKSSYLDYAMSVIVSRALPDVRDGLKPVQRRVLYAMHDQGMRPNSSYKKSARLVGEVLGKYHPHGDSSVYAAQVRMAQPFSMRYTLVDGQGNYGSVDGDPAAAMRYTECKLSPITESLLGDIEKETIDWVDNFDQSLKEPSVLPAILPNLLVNGASGIAVGMATNIPPHNLSEICDGIALVIDNPQSNVDDLMKVVKGPDFPTGAEIWGLSGIREAFATGRGRVVVQAKHMIEDVKKQDRQRVVFTEIPYQVNKASLIMKIAEMIKTKKLEGVSEVRDESDRKGMRIVLELRRGTSPSLILNNLYKQTQLRSSFSVNMIALVDGTPQILNLKQTINHYISFREEVIRRRAEYDLRRAKARLHVLEGLRIAIQNLDRVIELIRASEDVEAARNSLMQEFNLTEIQSQAILDMQLRRLAALEIEKIENEYKELTELVADLEDLLSNQSRILSVIKTETLQLKRKYGEDRRTIINETDLKEWKREDMEPHQEVVITLSKGGYVKRILSSTYRAQHRGGKGVKG

SEQ ID NO: 184611 - protein, 506 aa, Unknown
  Bacterial polypetide isolated from the Sargasso Sea
MDFAKEILPVNIEDELKQSYLSYAMSVIHGRALPDVRDGLKPVHRRILYAMHDLKNNYNKPYKKSARVVGDVIGKYHPHGDTAAYDAIVRMAQDFSMRYTLIQGQGNFGSIDGDPPAAMRYTEVRMQKISDEILADLEKETVSFSENYDGSEQMPDVMPTKIPNLLINGSSGIAVGMATNVPPHNLTEVINGSLKLLENPKLSIDQIIDSISGPDFPTGGTIDGKMGIYEAYKTGRGIIYVRSKSKVEESKTGKKSLVIYEIPFMVNKARTLEKIAELVKEKKIDGISEIRDESDKDGLRIVIDVKKGESVEVLENNLFAQTQLEQSFGINFTVLVDGQPRVLNLKEILQEFLKHRKDVVLKRTKFELRKAKERGHIVEGLMVAIANIDEIIKIIKKSKDPKIAAQELVKKKWKAGPVEAILKKVGKDACKPKGVAKGVGLTGKSYKLSNDQAKAILELRLGRLTGLEQDNLSSEFNSFIEKITSLQEIIDDKGVLQKVNRDELNE

SEQ ID NO: 184612 - protein, 824 aa, Unknown
  Bacterial polypetide isolated from the Sargasso Sea
MSEQHNSQPDNSSYGASSIQILEGLEAVRKRPGMYIGDTSDGTGLHHLVFEVLDNSIDEALAGYCNDIHVTIHADNSISVTDNGRGIPTDVKMNDKHEPKRSAAEIVMTELHAGGKFDQNSYKVSGGLHGVGVSCVNALSSWLRLTVRRDGKKRFMEFHRGVAQDRVLEVVDGVEVSPMLVTGDTENRGTEVHFMADPTIFGTVEYHYDILAKRMRELSFLNNGVRIRLTDLRSGKEDDFAFAGGVKGFVEYINKTKTNLHPTVFFANGEKDGVGVEVAMQWNDSYNENVLCFTNNIPQRDGGTHLTGLRAAMTRVINKYITDNEIAKKAKVETTGDDMREGLSCVLSVKVPEPKFSSQTKDKLVSSEVRAPVEEVVAKALEEFLLETPIDAKIICGKIVEAARARDAARKAREMTRRKGVLDGVGLPGKLADCQEKDPAKCEIYIVEGDSAGGSAKQGRDRKFQAILPLRGKVLNVEKARYDKLLSSEQIVTLVTALGCGIGKEDYNLDKLRYHRIIIMTDADVDGAHIRTLLLTFLYRQMPDMIERGYVYIAQPPLYKIKAGKDERYLKDDVELNAHMLRLALQGSELVPGENAAAISGDALGELARSYLLSQSVIERLSRLYDPAALEAVMDGVVIDLSNEESTEASAKALHAALHDEALKNEVRVVPSYDPVREQRALHVERTHHGNVRVSVIDQEFQHTADYQQLVTTANTFKGLIGEGAVIKRGERSMAVADFKSAMKWLLADAERNVSKQRYKGLGEMNPEQLWETTMDPAVRRLLRVQIEDAIAADGIFTTLMGDDVEPRRAFIESNALRAGNIDV

SEQ ID NO: 184613 - protein, 418 aa, Unknown
  Bacterial polypetide isolated from the Sargasso Sea
GTDKSAMHHLVLEILDNSMDEVISSFANKIEVNLLNKNTIKIADNGRGIPIDKHPKFPSKSALEIIMTTLHAGGKFSEKNYQTSGGLHGVGASVVNALSEKLIVEVIRDKKLFKQEFERGIPTTNLEFITDTHRVNGTSITFSPDQQIFGEMCYFSPDYLYNMIKNKAYLSPKVKILWKCDKILLEKFSTIPSEKTLYFEKGIKQLLIDKIENKDLLIGEIFHENISLDGEKIECAITWFDENETYFLNSFCNTILTSHGGTHVQGFKNAIIKAIRNYAEISGFKKYNEILIDDILKSIGSIISVFIKNPQFQGQTKEKLVNIEVTKLIENSLKDRFESWLANNPTLSSTIIEKIIENLDERKIKKLEKETSKKKTSKKNRLPGKLADCSSKKVESNELFIVEGDSAGGSAKQARNRI

SEQ ID NO: 184614 - protein, 170 aa, Unknown
  Bacterial polypetide isolated from the Sargasso Sea
MGEIAAKEIVPVDIGKELKQSYLDYAMSVIVGRALPDARDGLKPVHRRVLYAMHVLNNDFGRPHKKSARIVGDVIGKYHPHGDSAAYETIVRMAQWWSLRYPLVDGQGNFGSMDGDGPAAQRYTEVRMARISQELLADLEKETVNYVENYDGTEMMPEVLPTKIPNMLVN

SEQ ID NO: 184615 - protein, 440 aa, Unknown
  Bacterial polypetide isolated from the Sargasso Sea
KTEAESYDSSSITVLKGLEAVKKRPGMYIGDTDDGTGLHHMVYEIVDNSIDEALAGHCDEITVKILSDDCVSVSDNGRGIPTDMHEEGMSAAEVIMTKLHAGGKFDDNSYKVSGGLHGVGVSVVNALSEDLKLTIYRGGKIHEQEYKDGAPKGKLKVTGKTDKTGTEVTFVPSPTTFSDIIFQYDVLETKLRELSYLNAGLKIILVDERNSKKKEFFHKGGLAEFVSFLNTKRTTVNSVFHFVKEASDGITIEVSLQWNDGYQENIQCYTNNIKQRDGGTHLVGFRTALTRTLNNYMEKEGMNKEKVSTSGDDAREGLVAVVSVKVPDPKFSSQTKDKLVSSEVRPVVEQETYKALTEYLLENPGEAKLIATKIIEAARAREAARKARELTRRKGVFEGGGLPGKLSDCQEKDPAKSEIYLVEGESAGGSAKQGRDRHFQ

SEQ ID NO: 184616 - protein, 661 aa, Unknown
  Bacterial polypetide isolated from the Sargasso Sea
MNDLFDKTKKKQKKSEYSAKDIEVLEGLEPVRRRPGMYIGGSDEAAMQHLVAELLDNAMDEAVAGEANRIEIHLEASDTISISDNGRGIPVGPHPKYKTKSALEVIMTSLHSGGKFGGQAYKISGGLHGVGLSVVNALSQSLKIEVIRDGKLWSQNYTKGKPTTKLKECGPKHKRKGTSITFTPDFDIFPKDARFRPQQLYKMARSKAYLFKGIEVRWTCNPTLLKKRDTTPEKDKLHFPGGLLDYLANKMEAFAPLNVTPFYGQAPINGSDGNMEWAVSWSSDSEGFIESFCNTVPTPLGGTHEVGLRNALTKGLRGYGALVNNKQAAKISSEDVVGSASIVLSVFVEDPQFQGQTKEKLTSPEVAKQIETTISDYFDHWLSGDPNTAKILLEEVLDRCLNRIQKRSEKNLKRQSNTRKLRLPGKLSDCSQRKQEGTEIFIVEGDSAGGSAKQARDRLTQAVLPLRGKILNVASSTKDKMYANQEIKDLIEALGCYDGNTFNQDNLRYEKVIIMTDADVDGAHIASLILTFFLKIIPELIEQGNLYLAQPPLYRISKGKNTYYAMDEKDKDKILKKHFKDDTGLEISRFKGLGEMPPSQLKETAMNKTTRQLLRVILPKGRGNHNEASKLVDNLMGKKPEFRLAFIQEKAGNLEQNMIDL

SEQ ID NO: 184617 - protein, 594 aa, Unknown
  Bacterial polypetide isolated from the Sargasso Sea
MNKILNENIDKILGQKYLSYAISTIVSRSLPDVRDGLKPVHRRIIYSMYQLKLFNNSTYKKSARIVGDVMGKFHPHGDQAIYDSLVRMAQDFSTRITLVDGQGNFGNIDGDNPAAMRYTEARLQDYTNYFFDGIEENSVDFKDNYDGQNLEPVVLPSQLPNILINGAMGIAVGMATNIPPHNIVELIDAIKLIIKKDKAFLTEILKIINGPDLPTGGEIILDSNEKKQIYKNGKGSFNINAKYQIEELKNGLYQIIITEIPYQVNKVKIIEQLANNINNKKLPLDDVVDESDENIRIVLKPKTRNIDAEKLISLCFKLTDLSTKYSCNFNVLIDGIEPKQIGIIEILSNFLEHRKITIKRKSKFNIEKIKKRLEILKGYQIVFKNLNSIIKIIRTKDNPKKELIKKYKLSDLQCESILSMRLGSLRKIDEKNIKDEIQKLNEELKYLNKLIKDKKTLDKFILSELDLIKSDLNTDIKERKSLISSEQNNDIDISIDEFKEVEKFTVIINKDFQLKRIKEITDEKEIEKIKKENLFSVNLNSNQKILLFVSSGKVYTIDPNILPGGNSNPKSFIYFVESMPKDKIAGNFHLPMKS

SEQ ID NO: 184618 - protein, 232 aa, Unknown
  Bacterial polypetide isolated from the Sargasso Sea
TDDGSGLHHMVYEVVDNGIDEALAKHADYVHVKIHADSSVSVRDNGRGIPVDIHEEEGVSAAEVIMTQLHAGGKFDSNSYKVSGGLHGVGVSVVNALSVWLELRIWRDGSEYFAKFANGETTEHLKKIKDVAEERGTEVRFLASTETFSNLDYSFEVLEKRLRELAFLNSGVKIILEDERPTEVLRSELVYEGGVKEFVKYLDRSKTSLIPEPIFITGEKDEIRYRSSNVVE

SEQ ID NO: 184619 - protein, 803 aa, Unknown
  Bacterial polypetide isolated from the Sargasso Sea
MSENTYDSSNIKVLKGLDAVRKRPGMYIGDTDDGSGLHHMVFEVVDNSIDEALAGYCSDIQVKIHSDGSVSVRDNGRGIPVDIHPEEGRSAAEVIMTVLHAGGKFDDNSYKVSGGLHGVGVSVVNALSDKLLLTIRRNGHVYEQTYHLGEPQAPLKQIGDSTGTGTEVRFWPSPTIFSDTLFHYEILAKRLRELSFLNSGVSIRLLDERDGREAHFCYEGGIKAFVEYLNQNKTPIHPKVFHFTTEQDGIGVEVAMQWNDAYQEGVYCFTNNIPQRDGGTHLVGFRTALTRTLNSYMDKEDYSKKAKSAASGDDVREGLIAVISVKVPDPKFSSQTKDKLVSSEVKTAVEQAMGEKLADFLLENPGDAKIVVNKIIDAARAREAARKARELTRRKGALDIAGLPGKLADCQEKDPALSELYIVEGDSAGGSAKQGRNRKNQAILPLKGKILNVEKARFDKMISSQEVGTLITALGCGIGRDEYNPDKLRYHNIIIMTDADVDGAHIRTLLLTFFYRQMPEIIERGYVYIAQPPLYKVKKGKQEQYLKDEDALLQYQTAMALDGATLHVNESAPAIGGEALERLVNQHRSVTHLITRMSRRAPEAVLTQLIYQPELNEALLSSESDLLAWCQSMEAVLNESNHGIQYQMQVRHDEERRLFVPHAVVRQHGVDREYPLSYDFLQSSEYRQLVSLGKEIANLIEEGGYIKRGEKVKPVASFVEAVEWLMGEGKRGIYIQRYKGLGEMNPDQLWETTMDPEARRMLRVTIDDAVGADQLFSTLMGDAVEPRRDFIETNALRVANLDV

SEQ ID NO: 184620 - protein, 408 aa, Unknown
  Bacterial polypetide isolated from the Sargasso Sea
MTKNNSNNYQADSIKVLKGLEAVRKRPGMYIGDTDDGTGLHHMVYEVVDNSIDEALAGFCKKIEISINDDNSVTVIDDGRGIPVDIHKGEKKSAAEVIMTQLHAGGKFDHNSYKVSGGLHGVGVSVVNALSERLKLTINRDNKKYYIEFKDGDAKTSLKQVGKSKTSGTEINFVPSKDIFSSIKFSFSILEKRMRELAFLNKGIKIVLSDLRQKKPKTLEFKFEGGISEFVQFIDEKKESLKNKNENDLFKKPIYIEGLKNNIDVQCSLKWNAGYSEDVLPYTNNIYQKDGGTHLLGFRSALTRVVNKYANEQNLLKKNKVSLSGDDVKEGLTSVLSIKIPDPKFSSQTKDKLVSSEVRNIVETIINEKLSIWFDQNPSISKIILTKIIQAAVARDVARKARENVKKK

SEQ ID NO: 184621 - protein, 447 aa, Unknown
  Bacterial polypetide isolated from the Sargasso Sea
LAGFRGALTRSIVNYINKSNKTSANITGDDAREGLTCIISVKLPDPKFSSQTKDKLVSSEVRPVVESVSLDKLEQWIEENPSEIKKVVDKIVEASNAREAARKARELTRRKTGLENSALPGKLADCQEKNPEFSELFIVEGDSAGGSAKQGRDRKNQAILPLRGKILNVERANQKQILTSNEIGVLITAIGAGVGNPTGNENTDKIEGKFDLNKMRYHKIIIMTDADVDGSHIRTLLLTFFYRHMRPIIESGRLYIAQPPLFRSKKGNSIQYIKDENEMEKHLIEEGVKKLIYEIPKNKNEINQISGQQLIKLLNLCKTIQKLVDRLTRRIESKLVIEQAAVIAALKKDSYNQNELVKEIAKYLELRLNTIDSDQWKVKFSNFALNIIHIHRGVEKKYIINSDFLNSPETKSLNEFRKPLMENFGLLKNGSAGILKNGDLEFKINDQ

SEQ ID NO: 184622 - protein, 571 aa, Unknown
  Bacterial polypetide isolated from the Sargasso Sea
MSSSYLSYAMSVIVSRALPDVRDGLKPVHRRIIYAMYKGGYDWGKPFRKSARIVGDVIGKYHPHGDQAVYDALVRLVQDFSMSLPLIDGQGNFGSIDGDPPAAMRYTETKLSKVSQFLTEGLEKNTVDFRNNYDETEREPTVLPSQYPNLLVNGAGGIAVGMATSIPPHNLGEIIDGTIGYIKNNDITIGQLMKHIPGPDFPTGGLIIGRDIIKQGYNKGRGSFKIRGEIEEESLKNGKTRLVIKSIPYQINKSVLNERIADLSRQKKIEGVSDIRDESNRDGIRVVIDLRRGVEAETIRRQLYKLTSVESSFGFNTLAIVDGKPKILNLKEFISQFVSFREKTVLRSIKFDLKKTEDRAHILIGIATAVESIDAIIKIIKNSKDTETAKKNLLNKKWPIKKSSKLVSMIEKKQNLSKYQLSETQVNSILELRLQKLTAFGINEIETEIKKLSELIIYYNKIIKSKKELLNLIIKELEEIKNKFSIKRRTKIIDTVLNYNIEETIQKEAVVINITNQGYIKRGSLSSVKTQKRGGKGKTGITTREEDFVVRILTGNSHSQVLFFSSQGLAY

SEQ ID NO: 184623 - protein, 376 aa, Unknown
  Bacterial polypetide isolated from the Sargasso Sea
MISMHDEMSSSYLSYAMSVIVSRALPDVRDGLKPVHRRILYAMYKGGYDWSKQFRKSARIVGDVIGKYHPHGDQSVYDALVRMVQDFSMSLPLVDGQGNFGSIDGDPAAAMRYTETRLSKVSQFLIDDIEKNTIDFKSNYDETEKEPSVLPAQFPNLLVNGAGGIAVGMATSIPPHNLGEIIDGTLALIDNNDLKIKDLMKHIPGPDFPTGGIIIGKDIIKQGYNKGRGSFKIRGEISNETLKNGRDRLVINSIPYQVNKSVLNERIAQLVREKKIEGIRDIRDESNREGIRVSIDLRTGVEPETVKRQLYKNTQIESSFGFNTLAIVDGKPKTCNLKEFLENFLEFREDVVLKKTKFDLNKAEDRAHILIGLSVS

SEQ ID NO: 184624 - protein, 754 aa, Unknown
  Bacterial polypetide isolated from the Sargasso Sea
LPLIDGQGNFGSIDGDPPAAMRYTETKLAKISQFLIDDIDKNTVSFKSNYDETEQEPTVLPAQYPNLLVNGAGGIAVGMATSIPPHNLGEIIDGTLALIKNKDIKIKELMKHIPGPDFPTGGVIIGKDIIREGYKTGRGSFKIRGEINVENLKNGKDRLVITSIPYQVNKSNLNEKIAELVRDKKIEGISDIRDESNREGIRVAIDLRRSVEPETIKRQLYKYTSIETSFGFNSLAIVDNKPKTCSLKDFLDNFLKFREDVVIKKTKYDLKKAEDRVHVLLGLSVSVENIDKVIKIIRSSKNPEEAKNTLIKTKWKITKSAKLIKLVDSKNYKGSYNLSETQVTSILELRLQKLTALGINEIEEEIKKLSELITRYKKIINSKSELLKVISNELSQIKEKFSSPRRTQIIDAVLNYNIEETIQKESVIITITLQGYIKRGALSNVKQQKRGGKGKTGIKTRDEDSVVQTLSVNTHTSVLFFSTEGLAYKVKAWKIPEGSAASKGKSLFNILPLKNHQSISSIMPFPDSDVDTKDMHIIFATSNGKIRKNNLEDFTSINTSGKIAMKLDGNDKIIGVKICRDDQDIILSTKLGKCIRFESKKLRVFKGRSSKGIRGINLAENDTIVSLSIIDHDSNKKAKNKDQKSEIKAKEKFILSITENGYGKRTSHYDYRVTNRGGKGIIGIVNSQRNGNVSSSFPVFEGDQILISTNKGRVIRTAVKEIRIAGRNTQGVRIIKLTGDEKVVSAIKLDDNLI

SEQ ID NO: 184625 - protein, 391 aa, Unknown
  Bacterial polypetide isolated from the Sargasso Sea
VLIFEVIINKDGSVTVADNGRGIPVDVHKKEGVSAAQLIMTTLHSGGKFDDNSYKVSGGLHGVGVSVVNALSKKLTLEVHRDGGEYYQEYNEGKPKAKLKKIKKSSKTGTIITFFPSKEIFTSTKFEIEKIYKRIQELSFLNAGVSINVEDKKTGKSKKFKNNGGLSSYVTHLKGRKQALSDIFECSATENEVGVEISMQWTDSYSENVLCYTNNIPQKDGGTHLAGFRGSLTRVLKTFIKKENAKKTPTDLLGEDVREGLIAIISVKVPDPKFSSQTKEKLVSSEVEGVVSTVFNKYFNEFLLENPKDAMSIISKVSEAALAREAARKAREMTRRKGVLEIAGLPGKLADCQEKDPKLSEIYIVEGDSAGGSAKQGRNRKNQAILPLKGK

SEQ ID NO: 184626 - protein, 150 aa, Unknown
  Bacterial polypetide isolated from the Sargasso Sea
MDTKIYPNIDITDELEKSYLDYAMSVIVSRALPDVRDGLKPVHRRILYSMYESSYHHNKPYKKSARIVGDVMGKYHPHGDSAIYESMVRMAQDFTMRLPLIDGQGNYGSMDGDPAAAMRYTEARLDKISSFMLEELEYETVPLRANYDET

SEQ ID NO: 184627 - protein, 224 aa, Unknown
  Bacterial polypetide isolated from the Sargasso Sea
MAEGEKIIKINIEEEMKSAYIDYSMSVIVSRALPDVRDGLKPVHRRILFGMQELGVLSSRPYKKSARIVGEVLGKYHPHGDTAVYDTMVRMAQPWSLRYMLVDGQGNFGSVDGDSPAAMRYTEARLRKISEEMLADIDKETVDFRLNFDDSLQEPTVLPTRIPQLLVNGTSGIAVGMATNMAPHNLSEVIDGTIAYIDNRSIEIPELMKYIKAPDFPTGGIIYG

SEQ ID NO: 184628 - protein, 111 aa, Unknown
  Bacterial polypetide isolated from the Sargasso Sea
MEKNTLENNKSFKPIFVQDEMSSSYLSYAMSVIVSRALPDVRDGLKPVHRRIIYAMYKGGYDWSKPFRKSARIVGDVIGKYHPHGDQSVYDALVRLVQDFSMSVPLISGPR

SEQ ID NO: 184629 - protein, 274 aa, Unknown
  Bacterial polypetide isolated from the Sargasso Sea
MTKNKTNNYQADSIKVLKGLEAVRKRPGMYIGDTDDGTGLHHMVYEVVDNSIDEALAGHCKKIEVSINSDGSVTVEDDGRGIPVDIHKEEKKSAAEVIMTQLHAGGKFDHDSYKVSGGLHGVGVSVVNALSEKLHLYIERDGKKHFIEFINGEAKSPLKIIGKSKNTGTKINFLPSKDVFSSTKFSLAIIQKRMRELAFLNKGIKIILNDLTQKKIKSLEFKFEGGINEFVEYLDEKREKLKNKNENDLFRRPIYISASVFGRSASASGRRGST

SEQ ID NO: 184630 - protein, 335 aa, Unknown
  Bacterial polypetide isolated from the Sargasso Sea
MRQSYLDYAMSVIVSRALPDARDGLKPVHRRILYAMHEDGYDHNKQYRKSARVVGSVIGKYHPHGDQSIYDALVRMAQPFSLHLPLVDGQGNFGSVDGDPPAAMRYTEVRMEKIAHHLLNDIDQDTVDFQENYDNSESEPIVLPAEFPNLLVNGAGGIAVGMATNIPPHNLSEVTDACILLIDKPETDINELCEIIPGPDFPTGGLILGKSGAKSAYTTGKGSVVIRAKVEVEEIRKDREALIVTEIPYQLNKVLLIEKIAELVRNKSIEGISDLRDESDRHGMRIVIELKRDSVADVILNQLYKFTPLSSSFGANLVALDRGSPKVMNLKEMLT

SEQ ID NO: 184631 - protein, 375 aa, Unknown
  Bacterial polypetide isolated from the Sargasso Sea
MAKKSNKAKYDSSNIQVLKGLEAVKKRPGMYIGDTDDGSGLHHMVFEVLDNCIDEAMAGHCSDIKVIINKDGSVTVTDNGRGIPVDVHKKEGVSAAQLIMTTLHSGGKFDDNSYKVSGGLHGVGVSVVNALSKKLTLEVHRDGGEYFQEYSEGKPKAKLKKIKKSDKTGTIITFHPSNKIFTSTEFDIEKIYKRIQELSFLNAGVSINVEDKRTGKSRKFKNNGGLSSYVTHLRGRKQIVSDIFECSAEENEVGVEIAMQWTDSYSENVLCYTNNIPQKDGGTHLAGFRGSLTRVLKSFIKKENAKKTPTDLLGEDVREGLIAIISVKVPDPKFSSQTKEKLVSSEVEGVVSTIFNKYFNEFLLENPKRRNEHHF

SEQ ID NO: 184632 - protein, 648 aa, Unknown
  Bacterial polypetide isolated from the Sargasso Sea
MSKNTSKNQYSADSIQALEGMEHVRKRPSMYIGDVGSRGLHHLVYEVVDNSIDEAMAGYCSSIKIEINKDTSLTVEDDGRGIPVGMHKKEGVSALEVVMTKIGAGGKFDKDSYKVSGGLHGVGVSCVNALSESLTARVFRDGKEYEQTYSKGKPNSSVKEVGKSDKRGTLVTFTPDKEIFKEVTDFDYDILSNRMRELSFLNKGLTISITDNRKKGKDGKPLSETFHSKEGLSEFIKYLDESREPIINDIIKMEGEKNSIPVEVAMIYNSSFSENLHSYVNNINTHEGGTHLSGFRRGLTNTLKKYADSSGLTDKLKFDISGDDFREGLTAVISVKVAEPQFEGQTKTKLGNREVSAAVSQAVSEMLENYLEENPNDSKIIVQKVILAAQARHAARQAREMIQRKTVMTGGGLPGKLSDCSETDPLKCEVFLVEGDSAGGTAKQGRDRVFQAILPLRGKILNVEKAQQHRVFENEEIRNIYTALGVSIGTEEDSKALNLEKLRYNKIIIMCDADVDGSHISTLILTFFFRYMRELVEGGNVYIATPPLYLVKKGNKKTYAWNDKERDNLAKEFGSGVSIQRYKGLGEMNADQLWDTTMNPETRTLRQISLNFDNSQEAERWFSTLMGDDVPPRRKFIEENAVYAKIDA

SEQ ID NO: 184633 - protein, 468 aa, Unknown
  Bacterial polypetide isolated from the Sargasso Sea
MTKKNSNTYQADSIKVLKGLEAVRKRPGMYIGDTEDGTGLHHMVYEVVDNSIDEALAGYCKNIEVSINEDGTVTVKDDGRGIPVDIHKGENKSAAEVIMTQLHAGGKFDHDSYKVSGGLHGVGVSVVNALSEKLELNIERDGKKYFLEFNNGKAKFSLKNIGKSKNSGTQIKFLPSKEIFSSIKFSFSVLQKKMRELAFLNKGIKILLNDFTNKKGKTLEFKYDGGITEFVEFLDENREKLKNKNDNDLFRKPIFLEGKKSDINIECALKWNATYAEDVFPYTNNIYQKDGGTHLLGFRSALTRVINKYATEQNLLKKNKVNLSGDDVKEGLTCVLSIKVPDPKFSSQTKDKLVSSEVRNIVENIVNEKLSIWFDQNPSVSKVILTKIIQAAVARDVARKARENVRRKGALELTGLPGKLADCQNSKQDGTELFIVEGDSAGGSAKQGRNREYQAVLPLRGKILNTFT

SEQ ID NO: 184634 - protein, 305 aa, Unknown
  Bacterial polypetide isolated from the Sargasso Sea
MQENQNVEITDYDESNITVLQGLEAVRLRPGMYIGGVDNTALHHLVFEVVDNSVDEALAGFCNEIHVVINSDGSISVEDNGRGIPVGIHEEEGIPAVELILTRLHAGGKFDNSNYKVSGGLNGVGASVVNALSNKMIAEIHREGFLWKQEYRKGNTASQLQQIEDSRKTGTNITFWPDDTIFDQVEFNYEILAHRLRELAFLNRGITISIRDNRNERFQEFKYDGGISSFIRHINENKNVLHEEPVYFSGKSEDVEIEVAFQYNDSYTERIYSFVNTINTIDGGTHLTGFKGALTRTLNNYMTSN

SEQ ID NO: 184635 - protein, 691 aa, Unknown
  Bacterial polypetide isolated from the Sargasso Sea
FAMYQLRLNNNSGLKKSARIVGDVIGKYHPHGDQSVYEALVRLAQEFSTRYPLVDGQGNFGNIDGDNAAAMRYTEARLTSLAEIMLKDISEDTIDLIKTYDGVEQEPIVLPAAFPNLLANGSTGIAVGMATNIPPHNIGELFAALLKFLKKPNLSNNDLIKIIPGPDFPTGGNIIDSKASLKEAYSKGKGTIRLRANWKEESLGRGQYQIVVNEIPYQVNKSKIIEKISEMIDNKKINYLETIQDESTEDIRIVLIPKNRTFKPNVVMEDLFKNTDLEIRYSINLNAISSKLEPKIFSLKDSLLSFLNHRYDVLKRRSKFRLLKAKNRIEILKGFLIVFAYLNQVIKIIRTEDNPEKKLMQKFKINQRQAEAILAMRLRQLKKLEEKQIKDEHKELLATKKELELILRSKTKQTSLLETEFRENLKIFESIKGCVDRRTIINNDFKVVEYQVEQFETKEPVSVILSKNGWIKSIKGHQDNYDNIKYKEGDNKKFVILCKNNDRLLLFSSLGKFYTINCSKINTGRGFGDPISLMIDKNDNEEIIFVKTYETDKEYLITSSSGKGFFVNTNDLMASTKSGKKVMNLKDNDRAVSCYEKKGDLIGVFSGEKKSIKLLIIDNLDIPHMQKGRGVILQKFKNGKTLFSICLDSNEDILDKNNKVLLSTKEMKKWLGKRAQAGKIEPKNLHLKILD

SEQ ID NO: 184636 - protein, 336 aa, Unknown
  Bacterial polypetide isolated from the Sargasso Sea
MERYLAKYDSSSIKVLEGLEAVRKRPGMYIGDTDDGTGLHHMVFEVVDNSIDEALAGHCDVISVTVNNDNSVTVSDNGRGIPVDIHKKTKKSAAEVVMTVLHAGGKFDDNSYKVSGGLHGVGVSVVNALSEALKLTIYRDGNEHSQSYSMGVPEAPLKKGEKTKKTGTQVTFLPSKKIFSKTEFSFAILSKRLRELAFLNSGIKINLESEIEGKKETFFYEGGIQAFVQKLNEKKEIINKNIVYSKGGKNNIEVEVAIQWNSSYNENVYPYTNNIPQGDGGTHMSGFRTGLTRALNSYIEQENLSKKHKVTFSGEDAREGLTAIISIKMHDPKISS

SEQ ID NO: 184637 - protein, 417 aa, Unknown
  Bacterial polypetide isolated from the Sargasso Sea
DESLAGFCNNISVLLNSDGTITVEDNGRGIPVDIHKSEGVPAAQLIMTELHAGGKFDQNSYKVSGGLHGVGVSVVNALSEKLELEINRDGKIFFMDFVNGVVNSSIKEIGKSKTNQDNKFITGTKITFLPSSKIFSNINFNFNTIENRLRELAFLNTGVKINLIDNRSAKEKIIEFKYDGGINEYVKYLNKSKTPIHGEPIYFTSEKNNIAVECSLQWTDSYHENTLCFTNNITQRDGGTHLAGFRGALTRSIVSYINSKHKSNSNVSGDDAREGLTCVISVKLPDPKFSSQTKDKLVSSEVRAVVESIALSKLEQWMEENPNEIKKIIDKVIEASNAREAARKARELTRRKTGLESSSLPGKLADCQERNAEFAEIFIVEGDSAGGSAKQGRDRKNQAILPLRGKILNVERANAKQ

SEQ ID NO: 184638 - protein, 397 aa, Unknown
  Bacterial polypetide isolated from the Sargasso Sea
MTNKNTYQADSIKVLKGLEAVRKRPGMYIGDTDDGTGLHHMVYEVVDNSIDEALAGFCKNINVKLNSDGTVTVNDDGRGIPTDIHKGEKKSAAEVIMTQLHAGGKFDHDSYKVSGGLHGVGVSVVNALSEKLLLEINRDGKKYSIEFHNGEAKAPLKISGKSKQTGTQITFLPSKEVFSSIKFSANILIKRMRELAFLNKGIKITFIDNSQKKEKILEFKYDGGLIEFVDYLDEKREKLLNKNGNDLFRKPIYIEGKKNNVELECSLKWNAGYSEDIFPYTNNIYQKDGGTHLLGFRSALTRIINKYANENNLLKKNKLTISGDDIKEGLTCVLSTKIPDPKFSSQTKDKLVSSEVRMIVETLINEKLSIWFDQNPSVAKIVLVKVIQAAMARDVAR

SEQ ID NO: 184639 - protein, 166 aa, Unknown
  Bacterial polypetide isolated from the Sargasso Sea
MSDFAKEIISVNIEDELKQSYLSYALSVIHGRALPDIRDGLKPVHRRILYAMYDLKNFYNRPYKKSARVVGDVIGKYHPHGDSAVYDAMVRMAQDFSMRYPIVEGQGNFGSIDGDPPAAMRYTEVRMAKIADQMLGDIEKDTVSYSPNYDGSENIPDVLPTKIPNL

SEQ ID NO: 184640 - protein, 305 aa, Unknown
  Bacterial polypetide isolated from the Sargasso Sea
MPKKQNKKGSYNSSNIQVLKGLEAVKKRPGMYIGDTDDGSGLHHMVFEVVDNCIDEAMAGHCSEIVVSINKNGSITIKDNGRGIPVDTHKKEKVPAAELIMTTLHSGGKFDDNSYKVSGGLHGVGVSVVNALSEELTLKICRDGGQYEQKYANGKAQTKLKKIKTSKETGTEITFKPSKEIFSFVNFDIDKINKRVQELSFLNAGVNILVEDKKTGKSKKFSNSGGLSSYVKFLKGRKQNISEIFHCEGEQDGLSVEIALQWNDAYSENVLCYTNNIPQKDGGTHLSGFRSSLTRVMKTFIRKEE

SEQ ID NO: 184641 - protein, 400 aa, Unknown
  Bacterial polypetide isolated from the Sargasso Sea
MSDFAKEIISVNIEDELKQSYLSYALSVIHGRALPDIRDGLKPVHRRILYAMYDLKNFYNRPYKKSARVVGDVIGKYHPHGDSAVYDAMVRMAQDFSMRYPIVEGQGNFGSIDGDPPAAMRYTEVRMAKIADQMLGDIEKDTVSYSPNYDGSENIPDVLPTKIPNLLINGSSGIAVGMATNIPPHNLTEVLNGCVNLINNPKISIDELIKDISGPDFPTGGTIDGKAGIYEAYKTGRGIIHIRSNTSIEEDKSGKQSLIINEIPFMVNKAKMLEKIAELVKEKKIDGITEIRDESDKDGLRVVIEVRKGDSVDVLENNLFAQTQLEQSFGINFTVLADGQPKEVNLKEMLQAFVKHRKDVIIKRTKYDLNKAKDRGHVVEGLMVAIANIDEIISIIKKSK

SEQ ID NO: 184642 - protein, 154 aa, Unknown
  Bacterial polypetide isolated from the Sargasso Sea
DIDNLRYHRIIIMTDADVDGSHIRTLLLTFFYRQMYEIVEKGHVYIALPPLYKITKGKEFVYASDESEKDDAIKKLSKNGTRGLEVQRYKGLGEMNPEQLWTTTMDPINRRMMRVDIKDVQDANESFEILMGDDVEPRREFIDANALSVKELDI

SEQ ID NO: 184643 - protein, 295 aa, Unknown
  Bacterial polypetide isolated from the Sargasso Sea
MSNNYGADKISVLKGLEAVRKRPAMYIGDVGKRGFHHLVSEVVDNSIDEALAGFCSFIIVTIKNDGFISIEDNGRGIPVEIHKTEGKPALEVVMTVLHAGGKFDKNTYKVSGGLHGVGVSVVNALSESLIAEVHRDGFYYKQEYKIGQPTTEVEKIGKSNKTGTIISFKPDESVFSHKGFEEEVIKGRLKELAYLNKNLSIKLINEPKETETEYCFPGGLSDFVKYLDGNEDLIHDEVIVVSKDDIEVPVDLALRYSTNYNSNIFSFVNNINTIEGGTHLSGFRSALTRALNSYA

SEQ ID NO: 184644 - protein, 550 aa, Unknown
  Bacterial polypetide isolated from the Sargasso Sea
MSEIAAKEIVPVDIGKELKQSYLDYAMSVIVGRALPDARDGLKPVHRRVLYAMHVLNNDFGRPHKKSARIVGDVIGKYHPHGDSAAYETIVRMAQWWSLRYPLVDGQGNFGSMDGDGPAAQRYTEVRMARISQELLADLEKETVDYVENYDGTEMMPEVLPTKIPNMLVNGSAGIAVGMATNMAPHNLNESLSACLAFIDNPEITVQELMEYIPGPDFPTGAIINGKAGIVSAYETGRGRVIIRAKTEFEDEEKDKAKIIITEMPYQVVKARLIEKIAELSRDKKLEGIRDIRDESDKDGVRVVIELKSGQIPDVVLNNLYAQTQMQTVFGINNVALIDGEPKLLNLKSILSVFFNHRKEVVSRRTFFDLRKAKERGHILEGLTIALANIDEMIELIKKSKEGSEAKKKLLSKKWKPGKIIAMLEKAGPDACKIDVTDTSVGLIGKTYQLSEQQAQAILDMRLQRLTGLEQDKLIKEYEEIIEHITYLLEILGDSDRLIEVVKDELKEVQEKYKDDRRTEIQDSAADLTEADLITPEDRVVTISHEGYAK

SEQ ID NO: 184645 - protein, 107 aa, Unknown
  Bacterial polypetide isolated from the Sargasso Sea
MQKTEVKNNSNYKPIFVHQEMSSSYLSYAMSVIVSRALPDVRDGLKPVHRRIIYAMYKGGYDWSKPFRKSARIVGDVIGKYHPHGDQAVYDALVRLVQDFFNEFAVN

SEQ ID NO: 184646 - protein, 869 aa, Unknown
  Bacterial polypetide isolated from the Sargasso Sea
YAMSVIVSRALPDVRDGLKPVQRRVLYAMHDQGMRPNSSYKKSARLVGEVLGKYHPHGDSSVYAAQVRMAQPFSMRHTLVDGQGNYGSVDGDPAAAMRYTECKLSPITESLLGDIEKETIDWVDNFDQSLQEPSVLPAILPNLLVNGASGIAVGMATNIAPHNLSEICDGITLVIENPQANVDDLMKVVKAPDFPTGAEIWGLSGVRDAFATGRGRVVVQAKHIIENVKKQDRERLVFTEIPYQVNKATLVMKIAELIKGKKLEGVSEVRDESDRKGMRIVLELRKGASSSLILNNLYKQTQLRSSFSVNMIALVDGTPQILNLKQTINHYISFREEVIRRRAEYDLKRAKARLHVLEGLRIAIKNLDKVIELIRASEDVETARNALITEFDLSEIQAQAILDMQLRRLAALEIEKIENEFKELSELVEDLEDLLSNQKRILSVIKTETLQLKRKYGEERRTKVNEMDLKEWKREDMEPSLDVVITLSKGGYVKRILETTYRAQHRGGKGKVGQKMTKDGDIVPYLQVANTHDTLLFFTDKGRVFKLRVFELPADQSRTSRGTPVSNIINLAPNEKVTAMLTVTSLLEDTYLIMITKAGKVKRMHLPLVRNINRAGLNTFKLSKDDELISVSLADENEDVTIITRDGMSIRFPSSQVRPTQRGAGGIRGIKMKTAQDVVVYSGVVNDEDSLLIIGRRGIGKISEFRNYRIQNRGGSGVLTLKVTDKTGKVAGGAVVTEEVINAAKAIKDENKGKTKGKTEEGFLFLLTDKAQIIRTNLGEIRRTGRVAQGVTIVKPNAGDAISGLFINYVQDNRKVRKTVSIEEIEKSEEMGNDDLNESISEENIEQIENDNLQDSKSEDKIEESDKES

SEQ ID NO: 184647 - protein, 521 aa, Unknown
  Bacterial polypetide isolated from the Sargasso Sea
MTNKNTYQADSIKVLKGLEAVRKRPGMYIGDTDDGTGLHHMVYEVVDNSIDEALAGYCKNINVKINSDGTITVNDDGRGIPVDIHKGEKKSAAEVIMTQLHAGGKFDHDSYKVSGGLHGVGVSVVNALSEKLQLEIFRDGKKHYIDFQNGEAKAPLKVVGKAKQTGTQITFLPSKEIFSSTKFSANILIKRMRELAFLNKGIKIIFTDASQKKEKTSEFKFDGGVLEFVDFLDEKREKLQNKNGNDLFRKPIYIEGKKNNIELECSLKWNAGYTEDIFPYTNNIYQKDGGTHLLGFRSALTRVVNKYANENNLLKKNKLVISGDDIKEGLTCVLSTKIPDPKFSSQTKDKLVSSEVRMIIETLVNEKLSIWFDQNPSIAKIILAKVIQAAMARDVARKARENVRRKGALELSGLPGKLADCQIGKQEGTELFIVEGDSAGGSAKQGRNRANQAVLPLRGKILNTYVEDFNTKKNGNGNGSDQRTKALSKMISSNEIVTLINALGLDPKAQEIDLKDLRYGK

SEQ ID NO: 184648 - protein, 428 aa, Unknown
  Bacterial polypetide isolated from the Sargasso Sea
MTNNNTNTYQADSIKVLKGLEAVRKRPGMYIGDTDDGTGLHHMVYEVVDNSIDEALAGHCKKIEVSINSDGSITVQDDGRGIPVDFHKDEKKSAAEVIMTQLHAGGKFDHDSYKVSGGLHGVGVSVVNALSQKLELYVERDGKKYFVEFLNGETKIPLKVTGKSKNTGTKINFLPSKDIFSSTKFSFSIIQKRMRELAFLNKGIKIILNDLTQKKIKTHEFKFEGGINEFVEFLDEKREKLKNKNDNDLFRKPIYIEGIKSNIDVQCSLKWNAGYNEDVYPYTNNIYQKDGGTHLLGFRSALTRVVNKYASEQNLLKKSKVLLSGDDVKEGLTCVLSVKIPDPKFSSQTKDKLVSSEVRNIVEGIVNEKLSIWFDQNPSVSKIILTKIIQAAVARDVAKRARENVRRKGALELTGLPGKLADCQNQNK

SEQ ID NO: 184649 - protein, 405 aa, Unknown
  Bacterial polypetide isolated from the Sargasso Sea
MSENQEENKDYSAGNIQVLEGLEAVRKRPAMYIGDVSSKGLHHLVYEVVDNSIDESLAGHCDTIHVSINDGESITVLDNGRGIPTAMHPKEKKSALEVVMTVLHAGGKFDKDTYKVSGGLHGVGVSCVNALSVDLKATVYREGQIWQQEYSKGKPKYDVKVVGETEQRGTEVTFQPDPEIFDELVYSYDVLAKRMRELAFLNKGITISLTDKRESAKKEDDGSFVTEVFYSEAGLTEFVQYIDSAREQLIQDVIYFEGEKNGIPVEVGMCYNTSYSENVHSYVNNINTYEGGTHLTGFRRGLTRTLKSFAEKSGLLTKLKFDINSDDFREGLTAIVSVKVAEPQFEGQTKTKLGNREVSAPVDQAVSEALSNYLEEHPSEAKTIVEKVILAAQARHAATKAREMG

SEQ ID NO: 184650 - protein, 436 aa, Unknown
  Bacterial polypetide isolated from the Sargasso Sea
IMTQLHAEGKFDHDSYKVSGGLHGVGVSVVNALSEKLKLEINRDGEKYFVEFEDGDAKAPLKKIGKSKDTGTQITFLPSKKIFSSIKFNPNILIKRMRELAFLNKGIKIIFTDLTNKKEKNNVFKFDGGVLEFVEFLDEKREKLQNKNGNELFKKPIYIEGKKENIEIECSLKWNATYSEEVLPYTNNIYQKDGGTHLLGFRSALTRVINKYANEHNLLKKNKFTISGDDIKEGLSCILSTKIPDPKFSSQTKDKLVSSEVRMIVETIINEKLSIWFDQNPSIAKIILAKVIQAALARDVARKARENVRRKGALELSGLPGKLADCQIGKQEGTELFIVEGDSAGGSAKQGRNRANQAVLPLRGKILNTYVDSLPIKKNGNGKSNGDDQRTKALSKMISSNEIVTLINALGLDPKAHEIDLKDLRYGKIIIMTDAD

SEQ ID NO: 184651 - protein, 513 aa, Unknown
  Bacterial polypetide isolated from the Sargasso Sea
MAKNTYDSKAIEVLSGLDPVRKRPGMYTDTSCPNHLIQEVLDNSVDEAISGHCSNIKIKLQKNGLIKVSDDGRGMPVDIHPEHKVSGVELILCKLHAGAKFSGEEYNFSGGLHGVGVSVVNALSESLQVNIKRDTKEYEMKFKNGDKQNELKVVGEVGARNSGTTIKFKPNSKYFESEEIKVKELKHLLKAKAVLCPGLTIHFSNERKAEKIKWYFEDGLKSYLEEASDGLDLILEESILSSKDSDSQEVEFVVNWSGRLPKNKLDETYVNLIPTSQGGSHLNGFKSGLLEALKEFCEYRSLIPKGLKLNADDVLNNAIFVVSSKLQNPQFAGQTKERLDSKDHMSFVSSSTKDILSIWLNTHTEEGEQIAELAIASAQARAKASNTVERKKTFKGPALPGKLSDCNSEDLNKTELFLVEGDSAGGSAKQARERSFQAIMPLRGKILNTWELESEEIIKSQEIKNLSTAIGVLPGNNDLSGLRYGKICILADADSDGLHIATLLCALFLRHYK

SEQ ID NO: 184652 - protein, 318 aa, Unknown
  Bacterial polypetide isolated from the Sargasso Sea
IWFDQNPSIAKIVLAKVIQAAVARDVARKARENVRRKGALELSGLPGKLADCQIGKQDGTELFIVEGDSAGGSAKQGRNRTNQAVLPLRGKILNTYVEDFKVKKNGNSNGNGSDQRTKALSKMISSNEIVTLINALGLDPKVEEIDPKDIRYGKIIIMTDADVDGSHIRALLLTFFNNKPFNKLIEDGYLYLAQPPLFKINKGSKGIYIKDEKELEDYILNNNKELKKIKKGSKEYFKSIDIEKSKMNIQRFKGLGEMNPEELWNTTLDPETRNLLKVQYSKDPKKDQGLIHKLMGNDVSLRKDYIFDNALNVQNLDI

SEQ ID NO: 184653 - protein, 388 aa, Unknown
  Bacterial polypetide isolated from the Sargasso Sea
DPGKSELFIVEGDSAGGSAKQGRDRDCQAVLPLRGKILNVERARFDRMLSSNEIGTLITALGTGIGKDEFDIEKLKYHKIIIMTDADVDGAHIRTLLLTFFYRWMRPLIDGGYLYIAQPPLYKVSKNRSERYIKVDKELEEYLLESGLDNAVYVSGTGAEHSANDLKEILKISSVLNGIIGQISSKYPKFIIEECAIAGALDHKLYDNSEYAKETASYIAKRLNSRFRIDQSANNWTGKANETNDLIFERENRGVNEIYTIDRQFMHSSDAIALNELSSKLQEIYLKPGRLKLKDSEKIVHTPTELFEMVLANGRKGASIQRYKGLGEMNPDQLWETTLDPDMRTLLQVKVKEADEASNLFTRLMGDEVEPRREFIQENALRVSNLDI

SEQ ID NO: 184654 - protein, 639 aa, Unknown
  Bacterial polypetide isolated from the Sargasso Sea
MAKKSSEAKYDSSNIQVLKGLEAVKKRPGMYIGDTDDGSGLHHMVFEVLDNCIDEAMAGHCTDINVVINKNGSVTVKDNGRGIPVDVHKKEGVSAAQLILTTLHSGGKFDDNSYKVSGGLHGVGVSVVNALSKKLILEVHRDGGEYFQEYNEGKPKAKLKKVKKSDKTGTTITFFPSEKIFTSIDFEIERIYKRIQELSFLNAGVSINVEDKKSGKSKKFKNNGGLSSYVTHLKGRKQAVSDIFECSATENEVGVEIALQWTDSYSENVLCYTNNIPQKDGGTHLAGFRGSLTRVLKSFIKKENAKKTPTDLLGEDVREGLIAIISVKVPDPKFSSQTKEKLVSSEVESVVSTLFSKYFNEFLLENPKDAMSIVSKVSEAALAREAARKAREMTRRKGVLEIAGLPGKLADCQEKDPTLSEIYIVEGDSAGGSAKQGRNRKNQAILPLKGKIINVEKARIDKVLGSAEVGTLIKALGCGIGEEDFDIDNLRYHRIIIMTDADVDGSHIRTLLLTFFYRQMYEIVDKGHIYIALPPLYKITKGKEFIYASDEDEKDAAIKSLSKSGTRGLEVQRYKGLGEMNPEQLWTTTMDPANRRMMRVDIKDVQDANESFEVLMGDDVEPRREFIDANALSVKELDI

SEQ ID NO: 184655 - protein, 288 aa, Unknown
  Bacterial polypetide isolated from the Sargasso Sea
MKEFCEIRKLLPKGLKLNADDVINNAIFVISSKMQNPQFAGQTKERLDSKEHMSFVSSSTKDVLSIWFNKHTEEGEKIAELAIISAQARAKAVNTVERKKTFKGPALPGKLSDCNSEDLNKTELFLVEGDSAGGSAKQARERSFQAIMPLRGKILNTWDLESDEIIKSQEIKNLATAIGVMPGNSDISSLRYGKICILADADSDGLHIATLLCALFLRHFKPLVNDGRIYIAMPPLYRIDCGKDVLYALDEKQKERIVIDFKSKKGKPKINIQRFKGLGEMNPSQLRE

SEQ ID NO: 184656 - protein, 387 aa, Unknown
  Bacterial polypetide isolated from the Sargasso Sea
MHEDGYDYNKQYRKSARVVGSVIGKYHPHGDQSIYDALVRMAQPFSLHLPLVDGQGNFGSVDGDPPAAMRYTEVRMEKIAHHLLNDINLDTVDFQENYDNSESEPIVLPAEFPNLLVNGAGGIAVGMATNIPPHNLNEITEACMFMIDNPETNDQEMDQRLCEIVPGPDFPTGGIILGKSGARSAYTTGRGSVVIRAKVEIEEIRKDREALIVTEIPYQLNKVLLIQKIADLVRNKTIEGISDLRDESDRHGMRIVIELKRDSVAEVILNQLYKFTQLQTSFGANMVALDKGTPKSMKLREMLACFIDFREEVVTRRLKFKLNKARDRAHLLVGLAIAVSNIDEIIKLIRSSKSPAEAREDLMDREWPAKDVKSLIKLIDDPRHGIQ

SEQ ID NO: 184657 - protein, 811 aa, Unknown
  Bacterial polypetide isolated from the Sargasso Sea
MAKKENKNKASKKTKEKDDYGAESIKVLKGLEAVRKRPGMYIGDTDDGTGLHHMVYEVVDNSVDEALAGHCKMISVILNADESVTVKDDGRGIPTEIHKEEGISAAEVIMTQLHAGGKFDQNSYKVSGGLHGVGVSVVNALSEKLDLKIKRNGKEHTMSFANGEASKALKAVKDCKDETGTEITFYPSKSVFTMTEFSRRTLETRLREMAFLNSGISIHLEDRRKDEPWLKTMSYEGGLDEYVRHIDQTRKSLMEVPISFTGKKDEIEVDVSMWWNDSYYETVNCFTNNIPQKDGGTHLAGLRSALTRVVNSYAQESGLTKKENVQLVGEDIREGFTCVLSVKVADPKFSSQTKDKLVSSEVRPVVESLINDLLSNWFEEHPNEAKIIVGKVVEAASAREAARKARDLTRRKGALDISSLPGKLADCQEKDPEKCEIFIVEGESAGGSAKQGRDRSTQAILPLKGKIINCEKARLSKVLSSNEIATLITALGGGIGNSSNESDQDDESFKTDKLRYKKVIIMTDADVDGAHIKTLLLTFFYRQMRPLITDGCLYIAQPPLYKAKKGNSETYLKDDDDLENYLIDTGIIDSSFILNTGEVIASNDLIDLVTKSRNFKKLINSLPKKYNQGFVETVSISSAFKQPIKISDKVLAEISNRLTKKYSDIDADWKASYDDNNGLMVSREVRGVSENMSIGRGLFDSADSRRLEKISNDIKQFFPFVDKESSNIFERDGRSYIINGPIDLIESIFIEGRKGLQIQRYKGLGEMNAEQLWDTTLDPESRRLLRVKIDSGVDNSGIFADLMGDEVIKRR

SEQ ID NO: 184658 - protein, 410 aa, Unknown
  Bacterial polypetide isolated from the Sargasso Sea
MSGDTYDSGSIKVLKGLEAVKKRPGMYIGDTDDGTGLHHMVFEVLDNSIDEGMAGFCKQIDVVIGKDGSVSVSDDGRGIPVDMHEEGVSAAEVIMTTLHSGGKFDENSYKVSGGLHGVGVSVVNALSSKLILEIERDGAKYKQEYSDGEPKTKLEKVGKSEKSGTKVTFTPSKKIFTQTKFDVEVLKKRIRELSFLNKGIAIHVLDEASGTKLEFKSDGGLLEFVKHLTGKKEVIGTPFYAQANMKGIGVEIAAQWTGTYRENVQCFTNNIPQVDGGTHLAGFRGGLTRAIKNFIKKEDLMRKKEVEITGEDVREGMIAVISLKMPDPKFSSQTKDKLVSSEARPAVETLINDYFMDFLLANKPQAKEILGKVLEAAYAREAARKAKEMTRREGLLDIGGLPGKLADVKK

SEQ ID NO: 184659 - protein, 230 aa, Unknown
  Bacterial polypetide isolated from the Sargasso Sea
MSSSYLSYAMSVIVSRALPDIRDGLKPVHRRILYAMYKGGYDWSKQFRKSARIVGDVIGKYHPHGDQSVYDALVRMVQDFSMSLPLVDGQGNFGSIDGDPAAAMRYTETRLSKVSQYLIDDIEKNTISFKNNYDETEKEPTVLPAQFPNLLVNGAGGIAVGMATSIPPHNLGEIINGTLALIENKDIKIKDLMKHIPGPDFPTGGVIIGKDMIKQGYNKGRGSFKIRGEI

SEQ ID NO: 184660 - protein, 375 aa, Unknown
  Bacterial polypetide isolated from the Sargasso Sea
VDINGDGSITVEDDGRGIPVDIHKGEKKSAAEVIMTQLHAGGKFDHDSYKVSGGLHGVGVSVVNALSEKLELFIERDGKKHFIEFNNGDAQNPLKVIGKAKSTGTKINFLPSKNIFSSTKFSFAILQKRMRELAFLNKGIQISLNDLTQKKAKNIIFKFDGGILEFVEYLDQNREKLKNKNDNDLFKKPIYIEGLKNNVDIQCSLKWNAGYNEDVYPYTNNIYQKDGGTHLLGFRAALTRVINKYASEQNLLKKSKVSLSGDDVKEGLTCVLSVKIPDPKFSSQTKDKLVSSEVRNIVETIVSEKLSIWFDQNPSVSKIILTKIIQAAVARDVARKARENVRRKGALELTGLPGKLADCQNSKQEGTELFIVREI

SEQ ID NO: 184661 - protein, 296 aa, Unknown
  Bacterial polypetide isolated from the Sargasso Sea
ARDVARKARENVRRKGALELSGLPGKLADCQIGKQEGTELFIVEGDSAGGSAKQGRNRANQAVLPLRGKILNTYVEDFNLKKNGNGNGNGSDQRTKALSKMISSNEIVTLINALGLDPKAQEIDLKDLRYGKIIIMTDADVDGSHIRALLLTFFNNKPFNKLIENGHVYLAQPPLFKINKGSKGIYIKDEEELEKYITTNNKEIKKFKKGSKELSKLIETEKSKMSIQRFKGLGEMNPEELWSTTLNPETRNLLQVQYSKNSKKDQELIHTLMGNDVTLRKDFIISNAINVQNLDI

SEQ ID NO: 184662 - protein, 206 aa, Unknown
  Bacterial polypetide isolated from the Sargasso Sea
MSLQNKNYQADSIKVLKGLEAVRKRPGMYIGDTDDGTGLHHMVYEVVDNSIDEALAGYCKNIKIIINANSSITVIDDGRGIPVDVHKTEKKSAAEVIMTQLHAGGKFDHDSYKVSGGLHGVGVSVVNALSEKLKLEIFRDGKKYFMEFQNGDSLAPLKKIGSSKETGTKITFFPSKEIFSSVKFIPKIIQKRMRELAFLNKGIKIT

SEQ ID NO: 184663 - protein, 405 aa, Unknown
  Bacterial polypetide isolated from the Sargasso Sea
TLIEENGDRESIIISELPYQVNKARLIEKIAELVRDKKLEGISEIRDESDKDGLRVAIDLKRGTVSDVLLNNLYKQTVLESTFSINMVALSNGQPQLMNLKSMLDAFLGHRRDVVTKRTIYQLNRSINRAHILEGQTIALTNIDEMIAIIKKSKTPADAQRALVSKVWKVGKVKEMLKKAGNVSTVPKHLINIETFGIEKRGYRLSSEQAKAILDLKLNRLTGLEQESIFNEYSELLEDIKRFTLILSNPDELKSVIRKELIETQETYGDERRTEIVEFYSDLTDEDLIPEEDLIVTLSKEGYAKTQPLDAYQAQNRGGTGKRAASLKDEDFVSKLFVANTHDTLLCFSSYGKVYWIKVYRLPRGGRNAKGRPIVNLLPLEKDERIQAVLPVKEFNDDAIYLYGD

SEQ ID NO: 184664 - protein, 584 aa, Unknown
  Bacterial polypetide isolated from the Sargasso Sea
MKNTENNKYHADSIKVLKGLEAVRKRPGMYIGDTDDGTGLHHMVYEVVDNSIDEALAGYCKNIDVDINDDGTVSVKDDGRGIPVDIHKTEKKSAAEVIMTQLHAGGKFDHDSYKVSGGLHGVGVSVVNALSEKLKLTVDRDGKKYFVEFKNGDAIKPLKIIGKSKSNGTEINFLPSKEIFSSTKFSFNILQKRLRELAFLNKGIKISIIDQSQKKIKKSEFKFEGGILEFVEYLCINKEQLKNKNDKDLFKKPIFIEGKKDKLEVECSLKWSANYSEDVYPYTNNIFQKDGGTHLLGFRSALTRVINKYANEQNLLKKNKLSISGDDIKEGLTCVLSVKIPDPKFSSQTKDKLVSSEVRNVVESIINEKLSVWFDQNPSVAKIILAKVVQAALARDVARKARENVRRKGALELTGLPGKLADCQNSKQEGTELFIVEGDSAGGSAKQGRNRENQAVLPLRGKILNTYTSNNGTKKNGNGNDIKTKTLAKLISSNEIVTLINALGLDPKQEEIELKDLRYGKIIIMTDADVDGSHIRALLLTFFNNKPFNKLIEQGHVFLAQPPLYKINKGSKGIYIKDDKELEN

SEQ ID NO: 184665 - protein, 470 aa, Unknown
  Bacterial polypetide isolated from the Sargasso Sea
MSEDKRSNIISSDYGAEQIQVLEGLEPVRKRPGMYIGSTGPRGLHHLVYEVVDNSVDEALAGHCDHIEIVLQADGSALISDNGRGIPTDIHPRTGKSALETVLTVLHAGGKFGSGGYKVSGGLHGVGISVVNALSEWVNVTVYRDGNEFNQRFEKGISKGDLQTKKQTLKPFRKGTSICFKPDKTIFSGGIEFEYTLLSSRLRELAYLNGGVKIVFRDERNQLSDGSFKEEIYLYQGGIKEYVQYMNAEKESIHPEIIYVDSQKENVYVEAAMQWCSDVYSDNILGFANNIRTIDGGTHIEGLKTVLTRTFNNLAKKRGKRKDIEKNLGGENIREGLTVVLSVKVPDPEFEGQTKTKLGNTEVRGIVDSLIGDALTKYMEFNPGILDLILEKAIQSFNAAEAARRARELVRRKSVLESSTLPGKLADCSSRDPSVSEIYIVEGDSAGGSAKQGRDRNFQAILPLRGKILN

SEQ ID NO: 184666 - protein, 185 aa, Unknown
  Bacterial polypetide isolated from the Sargasso Sea
MTNKNTYQADSIKVLKGLEAVRKRPGMYIGDTDDGTGLHHMVYEVVDNSIDEALAGHCKNINVSINSDGTVTVSDDGRGIPVDIHKTEKKSAAEVIMTQLHAGGKFDHDSYKVSGGLHGVGVSVVNALSKKLQLEINRDNKKYFIEFEDGEAKAPLKAIGKSKQSGTKITFLPYTEIFSTVKFSA

SEQ ID NO: 184667 - protein, 360 aa, Unknown
  Bacterial polypetide isolated from the Sargasso Sea
NNSITVEDDGRGIPVDMHKGEKKSAAEVIMTQLHAGGKFDQNSYKVSGGLHGVGVSVVNALSQKLDLTVYRDGKEYFLSFENGKTKNSLKFIKKTTKSGTKINFFPSKEIFSSTKFSTSILQKKMRELAFLNKGLKILLIDETGTKNKSYENKYDGGIQEFVSFIDQKKSSLINKNDKSIFKKPIYIKGEKKEVIVECSLQWNSGFSEDVLAFTNNIHQKDGGTHLLGFRSALTRIINKYASEKNLNKRNKVTIGGEDIKEGLTAVLSIKMPDPKFSSQTKDKLVSSEIRNIVETIVSEKVTTWFDQNPSVIRSILDKVLQAALARDLARKARDSVRRKGTLELSGLPGKLADCQISKME

SEQ ID NO: 184668 - protein, 117 aa, Unknown
  Bacterial polypetide isolated from the Sargasso Sea
MSSSYLSYAMSVIVSRALPDIRDGLKPVHRRILYAMYKGGYDWSKQFRKSARIVGDVIGKYHPHGDQSVYDALVRMVQDFSMSLPLVEGQGNFGSIDGDPAAAMRYTETRLSKVSQY

SEQ ID NO: 184669 - protein, 687 aa, Unknown
  Bacterial polypetide isolated from the Sargasso Sea
RAHGVGVSVVNALSEELELIISREGFSHHQTYKNGDPVSALEKGAPTEKTGTEVRFLPSTDVFKRVEYHYDILAKRLQELSFLNSGISIELVDERDGKTECFQYKGGISAFVAHLNRNTTPIHSSIIDIRYEKKGVSLELAMQWNETYQEGIYCFTNNIPQKDGGTHLSGFRAALTRSLNQYMEKQGVTSKNKINITGEDAREGLTAVLSLKVPDPKFSSQTKDKLVSSEVKPVVESSVMEKLQEFLLEKPTEAKALCGKIIEAASAREAARKARELTRRKTALDVAGLPGKLADCQEKDPAQSELFLVEGDSAGGSAKQGRDRRTQAILPLKGKILNVEKARVDKILSSAEISTLIKALGCGFGKEEFNIEKLRYHKIIIMTDADVDGAHIRTLLLTFFYRKMPDLVTQGHIYIADPPLYKVKKGKQERYLKDDASMEAYFQELALEKSELFVEEGEKPISGNKLKELIRLYVSMNHAGQRLSKRHNPFIVEAIREMPAITTEDTKEPAVIKNWFGELTGLLNSNASGIQYEFEMLPMKEDGSYGGEIKFISNGENQNEPFHPEFFSSEDYKRLSALGTELMLGETAYIQRGERKQAVTNPKSAFDWLLKEVEHGLSIQRYKGLGEMNPEQLFETTMDIENRNLSSVTIKEAKDADEMFRDLMGDDVEPRRVLIEKYAHTVENIDI

SEQ ID NO: 184670 - protein, 140 aa, Unknown
  Bacterial polypetide isolated from the Sargasso Sea
MQKDEISKNQNIKSVSMYDEMSSSYLSYAMSVIISRALPDVRDGLKPVHRRIIYAMHKGGFDWTKQFRKSARIVGDVIGKYHPHGDQAVYDALVRMVQNFSMSLPLIDGQGNFGSIDGDPPAAMRYTETKLAKVSQFLID

SEQ ID NO: 184671 - protein, 173 aa, Unknown
  Bacterial polypetide isolated from the Sargasso Sea
MPKQNNYDSSNIKVLKGLEAVQKRPGMYIGDTDDGSGLHQMVYEVMDNSIDEALAGHCSSITVTVHEDNAVTVEDNGRGIPVDEHPTEKKSAAEVIMTVLHAGGKFDDNSYKVSGGLHGVGVSVVNALSETLELTIYKNGKEYYQEYKDSKPLSKINELGNTELSGTKITFRP

SEQ ID NO: 184672 - protein, 301 aa, Unknown
  Bacterial polypetide isolated from the Sargasso Sea
MTKNNSNNYQADSIKVLKGLEAVRKRPGMYIGDTDDGTGLHHMVYEVVDNSIDEALAGFCKKIEISINDDNSVTVIDDGRGIPVDIHKGEKKSAAEVIMTQLHAGGKFDHNSYKVSGGLHGVGVSVVNALSERLKLTINRDNKKFYIEFKDGDAKTSLKQVGKSKTSGTEINFVPSKDIFSSIKFSFSILEKRMRELAFLNKGIKIVLSDLRQKKPKTLEFKFDGGITEFVQFIDEKKESLKNKNENDLFKKPIYIEGLKNNIDVQCSLKWNAGYSEDVLPYTNNIYQKDGGTHLLGFRSA

SEQ ID NO: 184673 - protein, 316 aa, Unknown
  Bacterial polypetide isolated from the Sargasso Sea
ANYDDTTQEPTVLPSQFPNLLVNGASGIAVGMATNIAPHNLGEVIDATLYLITNPQCDTKDLQKYVFGPDFPTGGQIIGKKGIIETYQTGKGSCVVRSKTSIENFKKDREAIILHEIPYQVNKSKLLERIAEIVKNGTVEGISDLRDESDRNGVRVVIELKRDVDSNIILNQLYKHTLIQTTFNSNMLALNKGKPEQMNLKEILSSFLEFREEVIIKRTLFDLNKARDKAHILVGLVVANDNIDEIIDLIKKSKDTKEARDKLIKKKWKLSKDNINFINLVEDNTYQLNKNMFNLTETQAKAILELRLQKLTALGT

SEQ ID NO: 184674 - protein, 205 aa, Unknown
  Bacterial polypetide isolated from the Sargasso Sea
MAKFRHFTDTLYHYDILAKRLRELSFLNSGVSIRLKDERDGKEDHFMYEGGIKAFVEYLNEKKTPVHQKVFHFSSEQEDGIAVEVAMQWNDSFQENVFCFTNNIPQRDGGTHLAGFRGALTRTLNNYMEKEGLNKKAKTNASGDDAREGLTAVISVKVPDPKFSSQTKDKLVSSEVRPAVESAMNEKLAEFLLENPAESKIIAGK

SEQ ID NO: 184675 - protein, 197 aa, Unknown
  Bacterial polypetide isolated from the Sargasso Sea
MSAENNYDSSSIKVLKGLDAVRKRPGMYIGDTDDGTGLHHMVFEVVDNSIDEALAGHCSEITVLIHSDGSVSVSDDGRGIPTELHPEEGVSAAEVIMTVLHAGGKFDDNSYKVSGGLHGVGVSVVNALSSRLKLRIRRGGKAHEQEYHHGVPQAPLAVTGDTDKTGTMIRFWPSSDTLQIRFTTTIFLLNVFVNYHF

SEQ ID NO: 184676 - protein, 205 aa, Unknown
  Bacterial polypetide isolated from the Sargasso Sea
MTNPQKNNSNREYKADSIKVLKGLDAVRKRPGMYIGDTDDGSGLHHMVFEVVDNSIDEAIVGYCKNITVTLHKNRSVTVEDDGRGIPTDLHKGEKKSAAEVIMTQLHAGGKFDQNSYKVSGGLHGVGVSVVNALSEKLELTIFRDEKEHFISFENGKTVNPIKFLKKTKKSGTKINFLPSEDVFSSIKFSSTILQKKMRELAFLN

SEQ ID NO: 184677 - protein, 234 aa, Unknown
  Bacterial polypetide isolated from the Sargasso Sea
MVKKNTYKAKDIEVLEGLEPVRKRPGMYIGNTNEEGLHHLVNEVLDNSIDEVVSGHATEISFIYKKDGWIIIKDNGRGIPIDFHPKFKNKRAVEIVMTTLHAGGKFNTNAYKTSGGLHGVGISVVNALSESLKVKIFNNGKIYSQNYSKGKVKSKIKIEKCSKKLKGTEISFIPDKGIFEIISFNPGRLYQFIKMKAVLVKSTSVIFNIDKELIKDSTPSKEIFFYKKGIEEFI

SEQ ID NO: 184678 - protein, 432 aa, Unknown
  Bacterial polypetide isolated from the Sargasso Sea
MKIKKTGKSKKFSNSGGLSSYVKFLKGRKQNISEIFHCEGEQDGVSVEIALQWNDAYSENVLCYTNNIPQKDGGTHLSGFRSSLTRVMKSFIKKEELNKKSPVELLGEDVREGLTAIVSVKIPDPKFSSQTKEKLVSSEVESVVSNVFNKNFNDYLLENPKEAMSILTKISEAALAREAARKAREMTRRKGVLEVAGLPGKLADCQEKDPALSEIYIVEGDSAGGSAKQGRNRQNQAILPLKGKILNVEKARLDKVLSSQEIGTLVTALGCGIGADEFDADKLRYHRIIIMTDADVDGSHIRTLLLTFFFRQMFEILNRGHVYIALPPLYKVSKGKTIKYAASEKEKDIALKELSKNGTRGIEIQRYKGLGEMNPDQLWTTTMDPQNRRMMRVRIDDANEANNSFEVLMGDQVEPRREFIDENALSVANLDI

SEQ ID NO: 184679 - protein, 338 aa, Unknown
  Bacterial polypetide isolated from the Sargasso Sea
VRKRPGMYIGDTYDGSGLHHMVYEVVDNSIDEALAGYCKSIEIEINTDGTITVKDDGRGIPVDIHKGEKKSAAEVIMTQLHAGGKFDHDSYKVSGGLHGVGVSVVNALSEKLELEISRDGKKYFIEFKNGNAKAPLKVLGKSKNSGTKITFLPSKEIFSSIKFSSNILQKRMRELAFLNKGVMISIDDLNKKKENKIEYKFDGGILEFVNFLDQKREKLQNKNGNDLFKKPIFIEGKKNNTEIECSLQWNAGYSEDVYSYTNNIYQKDGGTHLLGFRSALTRVINKYASEHNLLKKNKLNISGDDIKEGLTCVLSLKMADPKFSSQTKDKLVSSEVRM

SEQ ID NO: 184680 - protein, 646 aa, Unknown
  Bacterial polypetide isolated from the Sargasso Sea
MNKTKKYDASSIEVLEGLEPVRRRPGMYIGGTDNSSMHHLFSEVIDNAMDEAVANFASFIEVKVKKDNIITVYDNGRGIPIDPHPNFPNKSALEVIMTTLHAGGKFSNKVYQTSGGLHGVGISVVNALSEFVDVEIYRDKKIYNQKFSKGHPTSKLKELKKKTNRKGTKVSFKPDPEIFGLDNYFNCKKLYDFSKSKAYLFAGVEIRWFCEGEISKKENIPENDVFKFSNGLIDLVENEVDEKMSLLTEIFSGNRERDKNNLSFEWAINWSLGNNTFLNSYCNTVPTPQGGTHELGLKGGLLKAIKSHGERTGDKVAQKINSDDLSKNLIGAISVFLPDPKFQGQTKDKLSNKSIQKVIENAIKDRFETLLSNSPQQTESLLQYLYSITEERLKKKQDKETSRKSAIRKLRLPGKLADCSQGNSEGTELFIVEGDSAGGSAKQARDRRFQAILPLRGKVLNVANSTKSKIRDNQQISDLIQALGCGSGDLYNENGLRYEKIIIMTDADVDGAHIASLLITFFHEEIPEIIDQGKLFLALPPLYKISQGKKVFYAKDDHDRDEMIKKHLDETKKIEINRFKGLGEMMPAQLKETTMLPGNRTLLRIVNPEDRKKVSKTVVTNLMGNKPELRFEFIREKANLYDNIRN

SEQ ID NO: 184681 - protein, 447 aa, Unknown
  Bacterial polypetide isolated from the Sargasso Sea
MAENQEIRFEKEMRNSYLSYAMSVIVGRALPDVRDGLKPVHRRVLFSMHELNNSWNKSYKKSARIVGDVIGKYHPHGDTAVYDTIVRLAQPFSMRHPLVDGQGNFGSVDGDSPAAMRYTEVRMSKLSHELLQDIDRDTVDFSANYDGSENEPTVLPTRIPNLLVNGSTGIAVGMATNIPPHNLIEIIDSTICMIDNPTLINRENLDDLISKSNLQGPDFPTHGEIKNDGGIRKALETGRGSFKIRAKHIIEKKDNDKTSIVFKELPYQVNKSKLIENIAQLVRDKKISGISNLRDESDREGMRLVIELKRGEQHQVVLSSLYKHTNAQISYSVNMVCLVQGEPKTLGIQEILNEFIKHRREVITRRTLFDLHKSKNKANTLEGLGIALINVDKIIELIKISKTIQEAKNNLVQKEWEIGNIEKYLGVITKETKDFFPSDDNYGLKGK

SEQ ID NO: 184682 - protein, 256 aa, Unknown
  Bacterial polypetide isolated from the Sargasso Sea
MPGVGSRQARRSSASALPRGPALPGKLADCVGQDSKRSELFLVEGDSAGGSAKQARDKEFQAIMPLRGKILNTWEVESSEVLGSQEVHDIAVAIGVDPGAASLEQLRYGKICILADADSDGLHIATLLCALFVRHFRPLVEAGHVFVAMPPLYRIDIGKDVYYALDDAEKQGILDRIEAEGKRGKIQVTRFKGLGEMNPLQLRETTMAPETRRLVQLTVDETQDTEQLMDMLLAKKRSSDRKVWLESKGNLAEVLL

SEQ ID NO: 184683 - protein, 891 aa, Unknown
  Bacterial polypetide isolated from the Sargasso Sea
MKTPKEQSIIPILIDTEMQNSYLDYAMSVIVSRALPDVRDGLKPVHRRILYAMHESGYEWNKQHRKSARVVGDVIGKYHPHGDQAVYDALVRLAQDFSMSATLIDGQGNFGSMDGDKAAAMRYTEVRMAKISSFLLEDIEKNTVEFRPNYDETESEPTVLPAKYPNLLVNGAGGIAVGMATNILPHNLGEVVEACKAFLEDDQISFEKINQIIKGPDFPTGGKIIGTSGIKASQSTGRGSIVVQAKSMIEEFKNDREAIIFTEIPYQVNKSVLLEKIAELVRDKKIEGISDLRDESDRQGVRVVVELKKGVIAQVILNKLYKFTSLQSSYGVNSLALTNGKPKLMNIKEFIHHFVHFRKDIISNRTRYDLSKARDRAHTLIGLAIAVANVDSIIDIIKSSKDPNEAKTSLLKTKWKTKDIIDLLKIVDDPRQVKNDKEVYLTEEQAKAILELRLQRLTALGKDEIKVELSELSKKIGYFLSVLKDNSVLKKVINDELDSIKEQFDVPRRTEINEGEVSEIDQEDLVQRSDMVVSVTNSGYIKRVPLNMYRAQKRGGKGRAGMKTNDEDFVTQVFTASTHDNMLFFTSSGIAFKLKTWKIPESSPQAKGKAIVNLLNLKEKDRLSSILVLPEMKMDEESDFLVFATADGSIRKNSLEDFKRIQANGKIAMKLAGDNSIVGVKLCTNDDDILLTTKYGKCIRTPVTKLRTTKSRTSTGVRGIKLVKGDEIISISVISHTDTTSGESKAFLKMRSKEKDNDDHIDSDDSESDVSEAEVKLSNERYDEMKAKEQFILTLTENGFGKRSSSYQFRISNRGGSGIMCIATSDRNGNVLASFPVNDDDDVMLITKSGQVIRCPVKDVRVAGRNTQGVSIFKTNDNEKVVSASRVEIDN

SEQ ID NO: 184684 - protein, 158 aa, Unknown
  Bacterial polypetide isolated from the Sargasso Sea
MKLGIEVAMWWNDSYHENVLPFTNNIPQRDGGAHTAGFRGALTRTINSYAQASGIAKKEKVNFTGDDAREGLTCVLSVKVPDPKFSSQTKDKLVSSEVRPAVESLMNEKLGEWFEENPNEAKLIVGKIIEAALAREAARKARELTRRKTALDVNYLAG

SEQ ID NO: 184685 - protein, 79 aa, Unknown
  Bacterial polypetide isolated from the Sargasso Sea
MVDINRDNTLPRDIVDEMRESYLNYSMSVIVSRALPDVRDGLKPVHRRILYGMSELGSSWNRPYKKSARIVGDVLGKYH

SEQ ID NO: 184686 - protein, 370 aa, Unknown
  Bacterial polypetide isolated from the Sargasso Sea
MLHKQHTSKRRRNTSFRISIKFNKSNENIYQKGRINKKSPVELLGEDVREGLTAIVSVKIPDPKFSSQTKEKLVSSEVESVVSNVFNKNFNEYLLENPKEAMSILTKISEAALAREAARKAREMTRRKGVLEVAGLPGKLADCQEKDPALSEIYIVEGDSAGGSAKQGRNRQNQAILPLKGKILNVEKARLDKVLSSQEIGTLVTALGCGIGTDEFDADKLRYHRIIIMTDADVDGSHIRTLLLTFFFRQMFEILNRGHVYIALPPLYKVSKGKNIKYAASEKEKDIALKELSKTGNRGIEIQRYKGLGEMNPDQLWTTTMDPQNRRMMRVRIDDANEANNSFEVLMGDQVEPRREFIDENALSVANLDI

SEQ ID NO: 184687 - protein, 522 aa, Unknown
  Bacterial polypetide isolated from the Sargasso Sea
GEKVSAVEVILTRLHAGGKFSDKSYTYSGGLHGVGVSVVNALSKKLEVSVKRGGQEYQMTFRDGVPIAPLKAVRKIGARNSGTMVQFWPDPVFFDSPGISVARLKRLLRAKAVLCPGLRIDFKDEDSKDNNETWEYEDGLSDYLSSQVDAAERVPDPPFVGHIAQQEQQLDWAISWLEDDGEVFAESYVNLIPTPQGGSHVSGFRTGLTDAVREFCDYRNLLPRGVKLSPEDVWQRCAFVLSLRMKDPQFSGQTKDRLSSREAASLTAAAVKDAFSLWLNQNAAEGERIAALAISSAQSRLRTARQVERKKAATGPTLPGKLADCASQDLEHTELFLVEGDSAGGSAKQARDKDYQAILPLRGKILNTWEVESAEVLASQSVHDIAVALGVDPGTGDCSGLRYGRVCILADADSDGAHIATLLCALFVRHFRPLVDAGRVCVSMPPLYRIDVGKHVFYALDDTEKDAILDRIKKDKLRGTVNVQRFKGLGEMNPAQLRETTMDPDSRRLIELTLDQGKKTDA

SEQ ID NO: 184688 - protein, 549 aa, Unknown
  Bacterial polypetide isolated from the Sargasso Sea
TIDRDGKKYYIEFKNGDSIKPLKLVGKSKFNGTEINFLPSKEIFSSTKFSFNILQKRLRELAFLNKGIKIKINDYSQKKTKSIEFKFDGGILEFIDHLCLNKEQLKNKNDKDLFKKPIFIEGKKDKLEIECSLKWNANYAEDVYPYTNNIFQKDGGTHLLGFRSALTRVINKYANEQNLLKKNKLSISGDDIKEGLTCVLSVKIPDPKFSSQTKDKLVSSEVRNVVESIINEKLSVWFDQNPSVAKVILAKIVQAALARDVARKARENVRRKGALELTGLPGKLADCQNSKQEGTELFIVEGDSAGGSAKQGRNREYQAVLPLRGKILNTYTSNNGNKKNGNGNDLKTKTLAKLISSNEIVTLINALGLDPKDEEIDSKDLRYGKIIIMTDADVDGSHIRALLLTFFNNKPFNKLIEQGHIFLAQPPLYKINKGSKSIYIKDDQELENYILKNSKEITKVKKGSKEYEKKLQEEKSKISIQRFKGLGEMNPDELWNTTLNPETRNLLKVEYSKDIKKDSDLIHTLMGNDVSLRKDFIVDNAINVSNLDI

SEQ ID NO: 184689 - protein, 250 aa, Unknown
  Bacterial polypetide isolated from the Sargasso Sea
VEGDSAGGSAKQGRNREYQAVLPLRGKILNTFTEINGSKKNGNQNDLRTKSLSKMISSNEIVTLINALGLDPKTEEIDLEDLRYGKIIIMTDADVDGSHIRALLLTFFNNIPFNKLIEKGHVYLAQPPLFKINKGSKGIYIKDEKDLENYIINNSKELKKIKKNSKEFEKIIQQEKSKLNIQRFKGLGEMNPEELWNTTLNPETRNLLQVQYSKNLQKDQNLIQTLMGNDVASRKDFIVDNAINVVNLDI

SEQ ID NO: 184690 - protein, 363 aa, Unknown
  Bacterial polypetide isolated from the Sargasso Sea
MEKEKLIPIKIEDEMKSAYIDYSMSVIVSRALPDVRDGLKPVHRRVLFGMNEMGVRSSSAYKKSARIVGDVMGKYHPHGDSSVYDTMVRMAQEWSLRYILVDGQGNFGSVDGDSPAAMRYTEARMQKISEELLSDIDKETVDFQLNFDDTILEPTVLPTRVPALLINGASGIAVGMATNMPPHNLSEVIDGIIQYIDNNDISIDELIQYVKAPDFPTGGTIYGYDGVKEAFHTGKGRIVMRGKAIIENVNDRECIIVSEIPYLVNKAEMIRKTAELINDGKIEGISTIRDESDRKGMRIVYVLKRDAIPNIVLNKLYKFTPLQSSFSVNNVALVDGRPQLLNLKDLIHHFVNHRHDVVVKRTT

SEQ ID NO: 184691 - protein, 426 aa, Unknown
  Bacterial polypetide isolated from the Sargasso Sea
KLTLEVHRDGGEYFQEYNEGKPKAKLKKIKKSDKTGTIITFHPSNKIFTSTEFDIEKIHKRIQELSFLNAGVSINVEDKRTGKSRKFKNNGGLSSYVTHLRGRKQIVSDIFECSAEENEVGVEIAMQWTDSYSENVLCYTNNIPQKDGGTHLAGFRGSLTRVLKSFIKKENAKKSPTDLLGEDVREGLIAIISVKVPDPKFSSQTKEKLVSSEVEGVVSTIFNKYFNEFLLENPKDAMSIISKVSEAALAREAARKAREMTRRKGVLEIAGLPGKLADCQEKDPAQSEIYIVEGDSAGGSAKQGRNRKNQAILPLKGKILNVEKARIDKVLGSQEVGTLIKALGCGIGEEDFDINNLRYHRIIIMTDADVDGSHIRTLLLTFFYRQMYEIVDKGHIYIALPPLYKITKGKEFLYASDEKEKDKAIK

SEQ ID NO: 184692 - protein, 590 aa, Unknown
  Bacterial polypetide isolated from the Sargasso Sea
RVAEQQLTDIDLDTVDFNLNFDDSIQEPQVLPTRLPTLLINGASGIAVGMATSMPPHNLSEICEAINYVINNPTCTSDELLQIVPGPDFPTAGIIKGRSGIVDTYTTGRGRIVMEAATDIEETRNGRQRIIVTELPYQVNKSSLVEKIAQLVRDKRIQGISDIRDESDRKGMRIVIELRRDAQPNITLNNLYRHTQLRDSFNSNMLALVNGQPQVLPLKRMIELFIQHRQQIIRRRSEFLLQKAKDRDHVVQGLLLALDRMDEIIAIIRGSDDVTSARENLMSTLTLSEIQAQAILDMQLRRLAALERQRLEKEHEELLAEIKELEELLGDESKILEQVKVETDEINKQFGNPRRTVIHDAEVTKQTDADLIPHSDVVITLSKRGYIKRVPADTYRTQHRGGKGVRGMSTRDDDELMEIYITDTHDHILLFTNRGRVYPLRAFDISEDTSRTTRGTQIINLVPLERGETVQTILPVKDPKEDYLMVLVTKQGQVKALRAGELVNIRARGLIAMNLKSDDELVGVQQVEESDDIIMVSQNGQAMRFSMSNLSPRRRGAGGVRGMRLLSKDQVISVGKITEDSKLLIVSSGG

SEQ ID NO: 184693 - protein, 567 aa, Unknown
  Bacterial polypetide isolated from the Sargasso Sea
MSETIIPSDIVDEMRDSYMEYAMSVIVGRALPDVRDGLKPVHRRVLFSMNEQGNDFNKPFRKSARVVGDVIGKYHPHGDSAAYDTIVRMTQAFSMRYQLVDGQGNFGSVDGDSPAAMRYTEVRMKRMAQDLMIDLDKDTVDFQPNYDDSQEEPIVLPTRVPNLLANGSTGIAVGMASNIPPHNLTELMNAFLYYIEHRHQADIASLMELIPGPDFPTGGTIVGKQGIYEAYTTGRGVIRIRAKTHTETSKDGRESLIITELPFMVNKAMLLEKIAELVRQKKIDGISDLRDESDRKGMRVYIQIKRGDNPDVVLSNLYKHTSMQTSFGINMLAIVDRQPKILALPQVLEFFLQHRIEVVTRRTRYELQQAENRMHLLEGLMTALANLDDVLEIIRAAESGAVAENVLKERFGLTSKQGKAILDMRLQRLTGLEQEKIRDEHKTVGEAIADYKDILATPERVISIIREESEEIRDRYGDERRTEIIEGDHSIMIEELINEENMVVTITHSGYIKRSSVSDYRLQRRGGKGRLGMSTKDEDFVETMFVASTHDYLLFFTDRGQIFRKKV

SEQ ID NO: 184694 - protein, 533 aa, Unknown
  Bacterial polypetide isolated from the Sargasso Sea
CFCGYALSEWLWVEVKRDGKVYKQDYKIGEPQADLKATGSAKKTGTRVCFYPDNKIFKTITFEYDIISERLRELAYLNKGIEIHLKDERDEEGRNDVFKFKGGLSDFVKYLDENNNPLHNKVITVNKDTNDVPVEVAMRYGNTYNDNILTFVNNINTIEGGTHLSGFRSALTRAMNNHASKNNLIKSKKNEKINLTGEDFREGLTAIISVKVAEPQFEGQTKTKLGNGDVKGIVDKIVYEGILDFLEQNPSIGRRVIEKALLAARSRSAARKARELIRRKSALGGSSLPGKLSDCSNKDPVFCELYLVEGDSAGGSAKQGRDRRTQAILPLRGKVINSEKARVDKLLSNNEVQSMITALGAGFGGSEDESGEKSAGDFDSEKLRYHKIIIMTDADVDGSHIRTLLLTFFYRKMKEVIDGGYLYLALPPLYRVSQGKKESYAYDDNERDLLIERMQKDNKNTKVSIQRYKGLGEMNPGQLWETTMDPEKRTLMKVTVESAAEAAETFQNLMGSDVEARRSFIERNAKFVVNLDV

SEQ ID NO: 184695 - protein, 604 aa, Unknown
  Bacterial polypetide isolated from the Sargasso Sea
ILKKRLRELSYLNSGIEISLTDERNSKSEIFKSTGGLIEFVEFKNKNKSPLNKTFRFIKEQSDGISIEVALQWNDSYQENIQCFTNNIPQKDGGSHLIGFRTALTRTINNFIEKESLAKNETVQTSGEDVREGLTAIISAKLPDPKFSSQTKDKLVSSEIQPVVEKETYKHLTDYLLENPTDAKSIATKIIDAARAREAARKAREMTRRKGVLDGLGLPGKLSDCQEKDPSVSELYLVEGESAGGSAKQGRNRQNQAILPLKGKILNVEKARIDKVLGSDEIVTLITALGCGIKEEFNLEKLRYHSIIVMTDADVDGSHIRTLLLTFFYRQMPELIEAGHIFIAQPPLYKVSKGKKDVYLKDDPALNDYLLEKISESYELNLTKTVKMKSQDFTDLLKAFKNFDELTTIPDLNISFDFLMTLLKVKPFPKSGSQKEVKSWITAFNKISDSSSLNLDEKVKNLVSSRNEFGNSVIDLIPFSFFKSKKYKLILDFQERSKKIKPGISSIQKNEDVEIIDDLFFTFKSLMEEVRRGSNIQRYKGLGEMNPDQLWETTMNPVGRRLVQVKIDDADEASDLFEQLMGDNVETRREFIEANVNLVSNIDF

SEQ ID NO: 184696 - protein, 572 aa, Unknown
  Bacterial polypetide isolated from the Sargasso Sea
IKVGYDWSKPFRKSSRIVGDVIGKYHPHGDQAVYDALVRLVQEFSMSLPLIQGQGNFGSIDGDPPAAMRYTETKLSKVAQFLTDGIEKNTIDYRNNYDDTEKEPVVLPSHYPNLLVNGAGGIAVGMATSIPPHNLGEVINGTIDFIKNKDITISQLMKHIPGPDFPTGGIIIGKDIIKQGYNKGRGSFKIRGEIGEESLKNGKTRLIIKSIPYQVNKSILNEKIADLSREKKIEGVSDIRDESNRDGIRVVIDLRRGVEPETIKRQLYKLTSIESSFGFNTLAIVDGRPKVLNLKEFISEFVDFREKTVIRRIKFDLKKTEERAHILIGIATAVENIDAIIKIIKSSKDTETAKKNLLNKKWTVKKSSKLISLIEKKQSISKYQLSNQQVDSILELKLQKLTAFGITEIETEIKKLSEQIIYFNKLLKSKKELFNLIINELEEIKSKFSVKRRTKIIDAVLNYNIEETIQKESVVINITNQGYIKRGSLAAVKTQKRGGKGKTGITTRDEDFVVRILSGNSHSQVLFFSSQGLAYKLKAWKIPKGSLNSKGKSLFNLLPLKTNQSITSTMLL

SEQ ID NO: 184697 - protein, 376 aa, Unknown
  Bacterial polypetide isolated from the Sargasso Sea
NVQCFTNNIPQVDGGTHMAGFRGGLTRAIKTFIKKEDMMKKKDIELTGEDVREGMMAVISLKMPDPKFSSQTKDKLVSSEARPAVETLINDYFMDFLLANKQQAKEILGKILEAAYAREAARKAKEMTRRKGILDLGGLPGKLADCQEKDPEKSEIFLVEGDSAGGSAKQGRDRSFQAILPLKGKIINVQKQRLDKVLASNEIGTLITALGTGIGHDEFDSEKLRYHRIIFMMDADVDGSHIRTLLLTFFNRHMRDLILKGHVYMALPPLYKIKKGGKTHYAKDEEEKDEILKDIRKDDNENARSPEIQRYKGLGEMNPEQLWETTFDPTNRRLVQITIDDVGETDDIFETLMGDEVKPRREFIDENALRAENVDV

SEQ ID NO: 184698 - protein, 461 aa, Unknown
  Bacterial polypetide isolated from the Sargasso Sea
NTQKKEKSIGFKYDGGILEFVEFLDEKREKLKNKNNNELFKKPIFIDGKKQNLDIECSLKWNASYSEDIYAYTNNIFQKDGGTHLLGFRSALTRVVNKYAAEQNLLKKNKLSISGDDIKEGLTCVLSIKIPDPKFSSQTKDKLVSSEVRNAVETIINEKLSVWFDQNPSVIKIVLAKIVQAALARDVARKARENVRRKGALELTGLPGKLADCQISTQEGTELFIVEGDSAGGSAKQGRNREYQAVLPLRGKILNTYTDSNGHKKNGKENEIKTKALSKLISSNEIVTLINALGLDPKIEKIELKDLRYGKIIIMTDADVDGSHIRALLLTFFNNKPFNQLIENGHIFLAQPPLFKINKGSKGIYIKDEKELENYILNNNKEIKKLKKGSKEYEIKISEEKSKLNLQRFKGLGEMNPDELWNTTLNPETRNLLKVEYSKNIKKDHDLIHTLMGNDGPQGKT

SEQ ID NO: 184699 - protein, 221 aa, Unknown
  Bacterial polypetide isolated from the Sargasso Sea
AGGSAKQGRDRKIQAILPLWGKVINSEKARIDKLLSNNEVQSIITALGTGFGGSVDEDGERSAGDFDIEKLRYHKIIIMTDADVDGSHIRTLLLTFFYRKMKEIIDGGYLYLALPPLYRVSQGKKEYYAYDDNERDLMIERMQKENKNTKVGLQRYKGLGEMNPGQLWETTMDPETRTLMQVTVESAAEAAETFQNLMGSDVEARRTFIEKNAKFVVNLDV

SEQ ID NO: 184700 - protein, 594 aa, Unknown
  Bacterial polypetide isolated from the Sargasso Sea
GHCDQIAITLNSDGSVTVEDNGRGIPTEIHPEEKISAAEVIMTQLHAGGKFDQDSYKVSGGLHGVGVSVVNALSSKLHLNIYRDQKEHFIEFNNGEALSPLSITNKNIKKNGTKLTFYPDKNIFSDTEFDSKILKQRFREMAFLNSKITIIFYDSRNADKKESKFHYEGGIGEFVKYLDKSKKSLIEKPISIEGYKNNIQFSCSLWWNDSYYEQILTFTNNIRQKDGGTHLSGFRAALTRVVNNYLDGSKFSKKQSISPNSDDIREGLTSVLSVKVQDPKFSSQTKDKLVSSEVRPVVENLVNEKLSDWFERHPNIAKEIFLKIQKAAEAREAARKARELTRRKSALEITNLPGKLADCQEKDPSLSEIFIVEGDSAGGSAKQGRDRKFQAILPLRGKILNTWKSRTDKILGSQEIGTLITALGTGIGPNEFNSDKLRYHKVIIMTDADVDGSHIRTLLLTFFFKEMRGLIENGNLYIARPPLFKIKRGKEELYISDEENLQKSLIKYGVDDAIFKTALGNQLKEEELVKTLNKITEVIEIYSKVPDRYDKKVLEQIAISGCLDVNKFLGSKEKTKDAINYISKRINISRPDYD

SEQ ID NO: 184701 - protein, 428 aa, Unknown
  Bacterial polypetide isolated from the Sargasso Sea
KKESIEIECSLKWNGSYSEDIYSFTNNIFQKDGGTHLLGFRSSLTRVINKYATENNLIKKNKVSISGDDIKEGLTCVLSIKIPDPKFSSQTKDKLVSSEVRPVVENIVNEKLSIWFDQNPSIAKIILAKIIQAAVARDVARKARENVRRKGALELSGLPGKLADCQISKQEGTELFIVEGDSAGGSAKQGRNREYQAVLPLRGKILNTYVETKNGHNKNGNGTEAKTKSLSKMISSNEIVTLINALGLDPKVEEIDLKDLRYSKIIIMTDADVDGSHIRALLLTFFNNKPFNKLIENGHIYLAQPPLYKINKGSKATYIKDDKQLENYILKNSKDLAKLKKGSKDFVKIFEIEKSKLNIQRFKGLGEMNPEELWSTTLNPETRNLLQVEYSKNIKKDQEILHTLMGNDVAARKDFIIENAINVLNLDI

SEQ ID NO: 184702 - protein, 409 aa, Unknown
  Bacterial polypetide isolated from the Sargasso Sea
EFSINVEDKKSGKSKKFKNNGGLSSYVTHLRGRKQTVSDIFECSATDNDVGVEIAMQWTDSYTENVLCYTNNIPQKDGGTHLAGFRGSLTRVLKSFIKKENAKKTPTDLLGEDVREGLIAIISVKVPDPKFSSQTKEKLVSSEVEGVVSTIFSKYFNEFLLENPKDAMSIVSKVSEAALAREAARKAREMTRRKGVLEIAGLPGKLADCQEKDPSLSEIYIVEGDSAGGSAKQGRNRKNQAILPLKGKIINVEKARIDKVLGSQEVGTLIKALGCGIGKEDFDIDNLRYHRIIIMTDADVDGSHIRTLLLTFFYRQMYEIVEKGHVYIALPPLYKITKGKEFIYASDEKEKDDAIKKFSKNGNRGIEVQRYKGLGEMNPEQLWTTTMDPINRRMMRVDIKDIQDANESL

SEQ ID NO: 184703 - protein, 367 aa, Unknown
  Bacterial polypetide isolated from the Sargasso Sea
FDILSKRLRELSFLNSGLSIKLADTRSGKEEEFYFEGGISAFVSHLNKVQSPVHESVINFSKTINDITVDIAIQWNESYRENMYCFANTIRQKDGGTHLAGFRGALTRTINTYIDKEIVKADTSVSGEDCREGMTAIISVKHPDPKFSSQTKDKLVSSEVKGVVESVVNKHLKEFLIENPNEAKIIINKIVDSAAAREAARKAREMTRRKGALDIAGLPGKLADCQEKDPALSELFIVEGDSAGGSAKQGRDRKTQAILPLKGKILNVEKAQRAKMYSSAEIGTLITALGCGIHDEFDLEKLRYHKIIIMTDADVDGSHIRTLLLTFFYRELEDLIKGGYLYIAQPPLYKLKKRKKKRSMSFTDEGL

SEQ ID NO: 184704 - protein, 397 aa, Unknown
  Bacterial polypetide isolated from the Sargasso Sea
VEGDSAGGSAKQGRDRVTQAILPLRGKILNVIKANPHKILENNEISALITAIGAGYGNPPKDKEYNQSDYFNPDSMRYHKIVIMTDADVDGSHIRTLLLTFFYQFMRDIITTGRLYIAQPPLYKVKKGNAENYLLDDKELTKFLLLNNKDDLDFNIYNKKKKIQLKEEQLNELIDLASRANSAYQNLDLTYLDTQFFDQIINTGLFFLDFPPNKIEKSQFKTFLSNLNQVYKSQNIKFTFQSMISNELVFLQEKEGYNKIIKVPLDKLLHLREFISIENLNLYNKMGFSRSTDAYFGISKLSSKENFNCNGLVEFFNTLFEMSKKGQSISRYKGLGEMNPEQLWETTLDRTNRKLLQVKLEDQINAERQLIMLMGDDVTDRKSFIQENSVKVANLDI

SEQ ID NO: 184705 - protein, 378 aa, Unknown
  Bacterial polypetide isolated from the Sargasso Sea
VEGDSAGGSAKQGRDRKFQAILPLRGKILNTWKSRTDKILGSQEIGTLITALGTGIGPNEFDSDKLRYHKVIIMTDADVDGSHIRTLLLTFFFKEMRGLIENGNLYIARPPLFKIKRGKEELYISDENNLQRSLIKYGAEDVTFKTAQGRNLNEKNLVDILNKISEVIEIYNKVPDRYDKKVLEQIAIAGCLDINKFIESKEKTKEAINYITKRVNVSRPDYDRGWKGEYSKEKGFIFRRELRGLRDNIIIDNKLLKSQIIQNLNSSYADLYQLFEMPGELLIKNETTKVYSPSQLLGIILDIGKKGLSMQRYKGLGEMNPDQLWETTLDPQNRSLIQVKIDDEESTKGVFEDLMGENVLPRKEFIESRADKVVNLDI

SEQ ID NO: 184706 - protein, 620 aa, Unknown
  Bacterial polypetide isolated from the Sargasso Sea
FSLHLPLVDGQGNFGSVDGDPPAAMRYTEVRMEKIAHHLLNDINLDTVDFQENYDNSESEPIVLPAEFPNLLVNGAGGIAVGMATNIPPHNLNEITEACMFMIDNPETNDQEMDQRLCEIVPGPDFPTGGIILGKNGARSAYTTGRGSVVIRAKVEIEEIRKDREALIVTEIPYQLNKVLLIQKIADLVRSKTIEGISDLRDESDRHGMRIVIELKRDSVAEVILNQLYKFTQLQTSFGANMVALDKGTPKSMKLREMLTCFIDFREEVVTRRLKFKLNKARDRAHLLVGLAIAVSNIDEIIKLIRSSKSPAEAREDLMDREWPAKDVKSLIKLIDDPRHGITAKGNCSFTEEQARAILELRLQRLTAMGIDEIKSELDELKGTIEDLLSTLGDKRKIYDIIKDELTYVKDNFAVERRTEILGELDDVEDEDLIKKEDMAVTVTRSGYIKRVPLSTYRAQNRGGKGRAGMQTKDDDFVRHIFISNTHQPILFFSSKGMVYRLKTWKLPLSSPQAKGKAMVNLLPLDEDERITTVMSLPENQDEWENLYVIFATSSGGIRRNSLADFWRINKNGKIAMKLDSKERIISVQTCTEDNDILLASKKGQSIRFNVDKVRVFASR

SEQ ID NO: 184707 - protein, 373 aa, Unknown
  Bacterial polypetide isolated from the Sargasso Sea
NKKKASKKTKEKKDYGAESIKVLKGLEAVRKRPGMYIGDTDDGTGLHHMVYEVVDNSVDEALAGHCKMISVILNADESVTVKDDGRGIPTEIHKEEGISAAEVIMTQLHAGGKFDQNSYKVSGGLHGVGVSVVNALSEKLDLTIKRNGKEHAMSFANGEASKALKAVKDCKDETGTEITFYPSKSVFTMTEFSRRTLETRLREMAFLNSGISIHLEDKRKDEPWVKTMSYEGGLEEYVRHIDQTRKSLMEVPISFTGKKDEIEVDVSMWWNDSYYETVNCFTNNIPQKDGGTHLAGLRSALTRVVNSYAQESGLTKKENVQLVGEDIREGFTCVLSVKVADPKFSSQTKDKLVSSEVRPVVESLINDLLSNWF

SEQ ID NO: 184708 - protein, 294 aa, Unknown
  Bacterial polypetide isolated from the Sargasso Sea
RELSSRAVSGFVTGLIKDAFTLWLNQHPEAGDQIVARAIENAQKRAKKNIKVKRKKATGGPTLPGKLADCTSDEPDLCELFIVEGDSAGGSAKQARDRVFQAILPLRGKILNSWEVDESNLLSSQEISNISQALGVEPGADELGNLRYHKICILADADSDGLHIATLICALFLKHFRKLVENGHVYVSMPPLYRIDVGKEVHYALDETEKDSILKALEKKKPNTKTTVTRFKGLGEMSPVQLRETTMLQDSRRLVKLTIDNASYTEELMDKLMAKKRYTDRKEWLEEKGNLAEI

SEQ ID NO: 184709 - protein, 334 aa, Unknown
  Bacterial polypetide isolated from the Sargasso Sea
NKNYSAENIKVLEGLEAVRKRPAMYIGDVGKRGLHHLVYEVVDNSIDEALAGYCTKVAVVFNKDGSVTVEDNGRGIPVDIHKEEKKPAVEVVMTVLHAGGKFDKGSYKVSGGLHGVGVSVVNALSEWLWVEVKRDGKVYKQDYKIGEPQADLKATGSAKKTGTKVCFYPDNKIFKTITFEYDIISERLRELAYLNKGIEIHLKDERDEEGRNDVFKFKGGLSDFVKYLDENNNPLHNKVITVNKDTNDVPVEVAMRYGNTYNDNILTFVNNINTIEGGTHLSGFRSALTRAMNNHASKNNLIKSKKNEKINLTGEDFREGLTAIISVKVAEPQF

SEQ ID NO: 184710 - protein, 346 aa, Unknown
  Bacterial polypetide isolated from the Sargasso Sea
PKFSSQTKDKLVSSEVRMIVENIVNEKLSIWFDQNPNIAKIILAKIIQAALARDVARKARESVRRKGALELSGLPGKLADCQIGKQEGTELFIVEGDSAGGSAKQGRNRANQAVLPLRGKILNTYVDANDGKKNGNSNNGSDHRTKALSKMISSNEILTLINALGLDPKSQEIDLKDLRYGKVIIMTDADVDGSHIRALLLTFFNNKPFNKLIENGHVYLAQPPLFKINKGSKGIYIKDEKELEQYIINNSKDFKKIKKGSKEFDRFMESEKSKLNIQRFKGLGEMNPEELWSTTLNPDTRNLLQVQYSKDLKKDQVLIHTLMGNDVSLRKDFIVSNAINVQNLDV

SEQ ID NO: 184711 - protein, 230 aa, Unknown
  Bacterial polypetide isolated from the Sargasso Sea
LSDCSEQDPALCEIFLVEGDSAGGTAKQGRDRNFQAILPLRGKILNVEKAMQHKVFENQEIINIYTALGVTVGTEEDSKALNLEKLRYHKIVIMCDADVDGSHISTLILTFFFRYMRELIESGHVYIATPPLYLVKKASKKEYAWSDHDRDKLMEDFGTGSSVQRYKGLGEMNAIQLWETTMNPDSRTFRKVTIDNAGEADRVFSMLMGDEVPPRRDFIERNATYANIDA

SEQ ID NO: 184712 - protein, 178 aa, Unknown
  Bacterial polypetide isolated from the Sargasso Sea
ISFIFPEIGTLVTALGCGIGTDEFDADKLRYHRIIIMTDADVDGSHIRTLLLTFFFRQMFEILNRGHVYIALPPLYKVSKGKNIKYAASEKEKDVALKELSKTGNRGIEIQRYKGLGEMNPDQLWTTTMDPQNRRMMRVRIDDANEANNSFEVLMGDQVEPRREFIDENALSVANLDI

SEQ ID NO: 184713 - protein, 327 aa, Unknown
  Bacterial polypetide isolated from the Sargasso Sea
LGEDVREGLTAIVSVKIPDPKFSSQTKEKLVSSEVESVVSNVFNKNFNEYLLENPKEAMSILTKISEAALAREAARKAREMTRRKGVLEVAGLPGKLADCQEKDPALSEIYIVEGDSAGGSAKQGRNRQNQAILPLKGKILNVEKARLDKVLSSQEIGTLVTALGCGIGTDEFDADKLRYHRIIIMTDADVDGSHIRTLLLTFFFRQMFEILNRGHVYIALPPLYKVSKGKNIKYAASEKEKDVALKELSKTGNRGIEIQRYKGLGEMNPDQLWTTTMDPQNRRMMRVRIDDANEANNSFEVLMGDQVEPRREFIDENALSVANLDI

SEQ ID NO: 184714 - protein, 378 aa, Unknown
  Bacterial polypetide isolated from the Sargasso Sea
WKNEDDVNIKSFANNIHTLEGGTHEEGLRTAITKAINDFAKSRNLHSDISLTGDDIREGITGVISVRVKEPQFEGQTKTKLGNTEMKSKVQVLVNKELPKWLSKNTKEGRAIVERCAVAAKARMSAKKARELTKRKSILETAGLPGKLADCSSTDPIESELFIVEGDSAAGPAKQARESKTQAILPIRGKIINVQKVTENRALQNEEISSLIKAIGTGIKDEYKGDESRYGKIIFLTDADVDGAHIRTLLLTFFFKFMPGLIKEGKVWIAEPPLYRAKSSGSINYLKDDKSLEEFKKENKNKKFDISRFKGLGEMNAGELWDTAMNPDTRSLIKVSIADGKAAEAKAANMFEVLMGNDVAKRKTFIEQNAKDVRFLDV

SEQ ID NO: 184715 - protein, 324 aa, Unknown
  Bacterial polypetide isolated from the Sargasso Sea
MEKNEIPKINNNIKPISMYDEMSSSYLSYAMSVIVSRALPDVRDGLKPVHRRIIYAMHKGGFDWSKQFRKSARIVGDVIGKYHPHGDQAVYDALVRMVQEFSMSLPLVDGQGNFGSIDGDPPAAMRYTETKLAKVSQFLIDDIEKNTVSFKSNYDETEQEPVVLPAQYPNLLVNGAGGIAVGMATSIPPHNLGEVIDGTLALIKNKDIKINELMKHIPGPDFPTGGLIIGKDIIKQGYKTGRGSFKIRGEISVENLKNGKDRLVVSSIPYQINKSNLNERIAELVRDKKIEGISDIRDESNSEGIRVSIDLRRNVEPETVKRQL

SEQ ID NO: 184716 - protein, 211 aa, Unknown
  Bacterial polypetide isolated from the Sargasso Sea
VALVGGATGLIGDPSFKAAERKLNTEDTVQEWVDKIRKQVAPFLDFDCGDNSAIAANNYDWFGGMNVLTFLRDIGKHFSVNQMINKEAVKQRLNRDDQGISFTEFSYNLLQGYDFACLNKLHGVALQIGGSDQWGNITSGIDLTRRLHQNQVFGLTVPLITKADGTKFGKTESGAVWLDPKKPVRTILPVLDHTADADVYRFLKFFTFMDI

SEQ ID NO: 184717 - protein, 433 aa, Unknown
  Bacterial polypetide isolated from the Sargasso Sea
MWPFPPAVGDPMINPHLLDELTRRGLVAQNSDPVALASHLATPRTIYCGFDPTAGSLHIGHLVPLLMLRRFQLAGHTPVALVGGATGLIGDPSFKATERNLNSAETVQGWVASLSAQIKALLPASDGLAAPLLVNNADWMGQMSALDFLRDIGKHFSVNAMLARESVRQRLARPDQGISFTEFSYALLQSQDFAVLNQRLGCTLQIGGNDQWGNITSGMDLTRRLHQAQVYGMTLPLITKADGTKFGKTEGGAIWLDPALTSPYAFYQFWLGTADEDVYRFLRYYSFMALSEIEALEAEDAKRQGRKLAQQVLADELTELVHGKGALAAAQRISELLFSGEVARLGESDLAQLAQDGMPGWRIEGETDLVTLLVESGLANSRRIARELLAAGAISLNGEIRRDEPLTAADRLFGRYLLLRRGKKQYRLVTWQG

SEQ ID NO: 184718 - protein, 332 aa, Unknown
  Bacterial polypetide isolated from the Sargasso Sea
KRHYKAVKEIWSRLIKSNDIYLSKYSGWYSVSDEAYYDDDEIVTKENIKYSKNSGSKVEWVEEESYFFKLSAWQEKLIKFYEDNPKFILPESRKNEVVEFVKRGLKDLSVSRTSFSWGIPVPENSKHVIYVWLDALTNYLSALDFPDTKNKKYKKFWPATIHVIGKDILRFHAVYWPAFLMAANVPLPKRVYGHGWILSDEKKMSKSLGNILDPLEIIDKYGIDQLRYYLIKEVSLGNDGNISLESLKNCINNDLANNFGNLCQRVFAFVDKNCESKIPLCKNFFEEDNIILNDLTKKISNLKKLMNNQELNLYIKEVINFSFVANKYFNDL

SEQ ID NO: 184719 - protein, 323 aa, Unknown
  Bacterial polypetide isolated from the Sargasso Sea
KKISISSKSTVEWIEEESYFFRLSKWEKPLLDFYEKNPNFISPASRKNEVISFVKSGLKDLSVSRKSFSWGIKVPGNDKHVIYVWLDALTNYISALNYPNKEDELFKKFWPASIHLIGKDILRFHAVYWPAFLLAAKIELPKKVYGHGWILSGDEKMSKSKGNILDPLQIIDEYGLDPLRYYLIKEVSFGNDGNISQDKLEDCINSDLANNYGNLCQRVIAFAIKNCDGKIPEKIKFEEDDLNILNKFGDNLENIRSKIDHQNLNFYIDYIVNSLFEANKYFNDQEPWKKKDDIIRLNTIVFTALEIIRKISFLLYPIIPDQY

SEQ ID NO: 184720 - protein, 369 aa, Unknown
  Bacterial polypetide isolated from the Sargasso Sea
GVEPKEFVDKISQKFRDLWPNLHIEHDQFIRTTDSNHKACVQKILQKIYEQGEIYLKEYEGLYCIGCERFFDESELENGNCPDHQTPPEFYKEQNYFFKMSTYQEWLTKELKQNVDWIYPGRYRNELIQLLKDPLQDLCISRPKSRVKWGIELPFDSKFVTYVWFDALLNYVSALDWPDGEKYKKFWPHVNHTIGKDILKTHGIYWPCMLKAAEMPVFKKLVVHGHWVVGGNKMSKSLGNVVDPLAMRDQLGVDALRYFLLRDMSFGEDSNFTEELAVTRYNGDLANNFGNLMNRSISMSRKNFQGCVPPSGKTGDQEKELHQSFANGVKKCHEYIIKFQPHRTLEHVALLSSKVNKYIDTCKPWKLTK

SEQ ID NO: 184721 - protein, 261 aa, Unknown
  Bacterial polypetide isolated from the Sargasso Sea
TFKWGVPVPDDDDHIMYVWLDALTNYITAVGFPEVEGEYANYWPASLHMVGKDILRFHAVYWPAFLMAAGLPPPERVFAHGWWTNEGEKISKSLGNVIDPIDLVRRFGLDQVRYFLLREVPFGNDGDFSQRAMVNRINGDLANDYGNLAQRVLSMIAKNCEGIVPTPSLFNDEDNALQNSATALLGNLRGKIEVQAFHEALESIWALIRAANSYVDSQAPWKLRKGDPERMATVLYILADTIRKLAFLTQPFMPGSSSIIL

SEQ ID NO: 184722 - protein, 352 aa, Unknown
  Bacterial polypetide isolated from the Sargasso Sea
FDNFHTTHSDENREISERIYLALKDKGDIASKEIEQFYDDEAKMFLPDRFIKGECPKCGAKDQYGDSCEECGATYSSSEIKNPISTVTNTKPITKKTEHVFFKLSSYEKFLKKWMDDNDIQKEIKNKLSEWLSGGLVDWDITRDKPYFGFEIPGLKDKFFYVWLDAPIGYIASHKNYCDKNNQNYLDDWAEGSKTELYHFIGKDIAYFHGLFWPAMLEGAGFRKPDGVFCHGFLTIDGEKMSKSRGTFFNARTYLNYLQPDYLRYYFSSRLTNKIEDIDLNFDDFMARVNSDLVGKIINIGSRCAKFINKDFNDQLSDEIGNDNLLKSVSNKKNEIIDNYEAKKLCSKYENP

SEQ ID NO: 184723 - protein, 347 aa, Unknown
  Bacterial polypetide isolated from the Sargasso Sea
MVKKFYITTPIYYPSAKPHMGHAYSSIIADFFARFKRMDGFDVSFLTGTDEHGLKIERAAKKKGINTLQFCNEISQTFKDLSKILNLTNTDFIRTTEDRHKLSVQNLWKELEKNEDIYLSKYSGWYSVSDEAFYTEDEIEEVDGKKQAVSSKSPVEWMDEESYFFKLSKWEKPLLEYYEKNPNFISPISRKNEVISFVKSGLKDLSVSRKSLSWGIQVPNNKNHIIYVWLDALTNYISALNYPNTNDSLYKKFWPASIHLIGKDILRFHAVYWPAFLLAANIPLPKKVYGHGWILSGEEKMSKSKGNILDPIEIIEKYGLDPLRYYLIKEVSFGNDGNISQERLEDC

SEQ ID NO: 184724 - protein, 318 aa, Unknown
  Bacterial polypetide isolated from the Sargasso Sea
LWNELEKNDDIYLSNYSGWYSVSDEAFYNEDEMRELDGKKISISSKSSVEWIEEESFFFRLSKWEKPLLKYYEANPDFIAPQSRKNEVISFVKSGLKDLSVSRKSFSWGIPVPNNKNHVIYVWLDALTNYLSALNYPNTDDDLFKKFWPASIHLIGKDILRFHAVYWPAFLLAAKIDLPKRVYGHGWILSGEEKMSKSKGNILDPLEIIKQYGLDPLRYYLIKEVSFGNDGNISQERLEDCINSDLANNYGNLCQRVSTFAIKNCNGKIPLEVKFHDEDLLILNKYNDNLDSIRSQIGNQNINFYIDYIVNSLFEANK

SEQ ID NO: 184725 - protein, 298 aa, Unknown
  Bacterial polypetide isolated from the Sargasso Sea
THSEENKQFASEIYTKLDQGGYIKRKTISQLFDPEKQMFLPDRFVKGDCPKCGALDQNGDSCDSCGATYSPTELKNPRSVVSGATPVLKDSEHYFFDLPAFEQMLKDWTRSGSLQDEMANKLQEWFTEGLQQWDISRDAPYFGFEIPGAPGKFFYVWLDAPIGYLASFKNYCDKTGVNFDQFWQKDSEAEIYHFIGKDIIYFHSLFWPAMLDGAGYRKPTSVYAHGFVTVNGAKMSKSRGTFIKARTYLEHLNPEYLRYYFASKLTSNITDLDLNLEDFAQKVNADLVGKVVNIASRC

SEQ ID NO: 184726 - protein, 309 aa, Unknown
  Bacterial polypetide isolated from the Sargasso Sea
RYYITTPIYYVNDDPHIGHAYTTLACDVLARFMRLDGREVCFLTGTDEHGQKVEKAAENNGVDPQAFTDEISKNFRRLADVMNFSYDDFIRTTESRHLSSCQAIWQAIASKKSPLGKDNIYLGKYAGWYAVRDEAFYTESELKDDLAGKKIAPSGAEVEWVEEPSYFFRLSDWQEALLKFYTEHPDFIAPASRRNEVISFVEGGLNDLSISRTTFKWGVPVPGDEDHIMYVWLDALTNYITAVGYPDTDGDLWKYWPADLHMVGKDILRFHAVYWPAFLMAAGIEPPKRIFAHGWWTNEGQKISKSVGN

SEQ ID NO: 184727 - protein, 238 aa, Unknown
  Bacterial polypetide isolated from the Sargasso Sea
MNFYITTPIYYTNDIPHIGHAYTSIACDIIARYNKLLGNNVFFLTGTDEHGQKVEKAAINSNLKPKEFVDKLSVNFINLIPFLGCETDDFIRTTEERHIKASQELWKQLEKNNQLYLSNYEGWYSVRDEAFYLENELKKIDGKYVTDNGSPVEWVKEESYFFKLSEWQDKLINYYEKNPESILPKTRYNEVLSFIKGGLKDLSISRTTFNWGVPVPNNSKHVMYVWIDALCNYLTAIG

SEQ ID NO: 184728 - protein, 294 aa, Unknown
  Bacterial polypetide isolated from the Sargasso Sea
MKFQKEDNKYFYVWVDAPIGYIASMENWLKDKKLNATDLWSKNSDYEIYHFIGKDIAYFHGLFWPALLSSANLKLPDGIFVHGFLTINGEKMSKSKGTGISAKDFAEMCDPETLRYYLAAKLNDKVEDLDLNFEDYVQRINSDLVGKYLNIASRSATFLKKNNNELSESIDKNLIKSLTDEKEKIIKLYEERKYSKLIRLIMDLADDVNKYINEQTPWKKDINEAVSICSTSLNAFKIITIYLSPIIPNITKNAYKFLNLENCSFDDVDIKLSGKINTYKSLLNRLEPLIIPEE

SEQ ID NO: 184729 - protein, 183 aa, Unknown
  Bacterial polypetide isolated from the Sargasso Sea
MNNSFYISTPIYYVNDKPHIGHAYTTILADVIARFYRQLNYDTFFLTGLDEHGQKVQEAASNRKVEPQDHCNEMAPRFMELWEKLHISNDDFIRTTEERHKKVVQEFLQLVFDKGDIYKDEYTGLYSVSEERFITEKEAESGIFRDIKELKEINYFFKMSNFQTQLIDHIENNNNFIQPAHRK

SEQ ID NO: 184730 - protein, 278 aa, Unknown
  Bacterial polypetide isolated from the Sargasso Sea
MKSRKILVTSALPYANGSIHIGHVLESVITDIWVRYQNINGNECLYFCADDTHGTPVMLKAKELGIDPEELIKRTREEHIKSYSRFNINFDNFYTTHSDENKKYAEDIYQKCKEGNLIFKKEIEQFYDSEEGLFLSDRFIKGTCPKCGAEDQYGDGCSVCGTTYTPDDLLNPVSSLSNSELTKKRTEHVFFDLPQMKDFLENYLKDLTLQDPIKNKLNEWIEDGLKPWDISRDKPYFGFEIPGEKDKYFYVWLDAPIGYLASAKNWAENNNMDMKDLW

SEQ ID NO: 184731 - protein, 210 aa, Unknown
  Bacterial polypetide isolated from the Sargasso Sea
MTKKYYITTPIYYVNDVPHIGHAYTSVATDCLARFKKMEGYDVRFQTGTDEHGLKIQKAADKLKIKPIELCNKNSKVFEDLTKTLNLSNNDFIRTTENRHIEGAQNLWDKLQKNNQIYLDEYEGWYSINDETFYNEKDLIRDESGDFKTPTGGPVEWITEKSYFFKLSEWSDKLLTYYKKNPDFIKPASKKNEVIKFVEGGLKDLSVSRT

SEQ ID NO: 184732 - protein, 269 aa, Unknown
  Bacterial polypetide isolated from the Sargasso Sea
MLTMTQVAKKILVTCALPYANGSIHLGHMLEHIQADVWVRYQRMRGNEVNFICADDAHGTPIMLKAQQLGVSPEQMIGEMSQEHQTDFAGFDISYDNYHSTHSDENRELSELIYGRLKENGFIKNRTISQLYDPEKGMFLPDRFVKGTCPKCKSPDQYGDNCEVCGATYSPTELIDPKSVVSGATPVMRESEHFFFDLPSFSEMLQAWTRSGALQEQVANKMQEWFESGLQQWDISRDAPYFGFEIPNAPGKYFYVWLDAPIGYMGSFK

SEQ ID NO: 184733 - protein, 253 aa, Unknown
  Bacterial polypetide isolated from the Sargasso Sea
MRDSWRNNNCKVYFLTGTDEHGLKIQKAAEKNNSDPLAYCNKISKIFKDLAIKLDLSNDDFIRTTEKRHHTSVNDIWSRLIKSGDIYLSKYKGWYSVSDEAYYNSDEIIEKNGKKYSTFSGSLVEWVEEESFFFKLSSWQSKLIEYYENNKNFILPISRRNEVINFVKSGLKDLSVSRTSFTWGIKVPNKENHIIYVWLDALTNYLSALNFPNTKDSLYKNFWPASLHVIGKDILRFHAIYWPAFLMAAKLSL

SEQ ID NO: 184734 - protein, 152 aa, Unknown
  Bacterial polypetide isolated from the Sargasso Sea
MNFYITTPIYYTNDVPHIGHAYTSIACDIIARYNKLLGNNVFFLTGTDEHGQKVEKAAINSNLKPKEFVDKLSVNFINLIPFLGCEIDDFIRTTEERHIKASQELWKQLEKNNQIYLSNYEGWYSVRDEAYYLENELKKVNGKYVTDNGSPV

SEQ ID NO: 184735 - protein, 303 aa, Unknown
  Bacterial polypetide isolated from the Sargasso Sea
LKPWDISRDKPYFGFEIPGEKDKYFYVWLDAPIGYLASAKNWAENNNMDMKDLWGESSDYEIHHFIGKDIAYFHALFWPALLKSSNIRLPESINVHGFLTIGGEKMSKSNGTFINADDFAENYDGELLRYYFADKFNNSIDDLDFNEDEFIQKINSDIVGKYLNIASRVSKFIEKNGNNLSANLDVDFIEKNLSMIDEVIEHYENLNLSKSVKIIMKMADEVNKYINENEPWKSSEEKAVEVSSTAINCFRVISILLNPVLPTITSKALEVFNDSATNDFNNIKDYLVNTKINPYKPLLKRLR

SEQ ID NO: 184736 - protein, 303 aa, Unknown
  Bacterial polypetide isolated from the Sargasso Sea
MNLIFGFKIPGESSKYFYVWMDAPVGYLASIKNWADKNNVNFEDLLNNPDTNLVHFIGKDIVYFHLLFWPAMLNSADIHQLKNVFVHGFLTIEGMKMSKSKGNFILADHALKFSHPDYYRYYLSSKLNTDIADIDFSIDDFIQKVNSDLIGKFINIASRSQNFISKLNNGSLMASTLGQDKKLRDEYDLIISHTQNREYSKALKGIMALADQINTYISEQEPWKMAREDRVRECVEVCSNALHVFKDLIILLHPYIPEITNKLFEMLNLSEQTYANLLEGNLVQVEKFKPFVGRLDKANFEDM

SEQ ID NO: 184737 - protein, 133 aa, Unknown
  Bacterial polypetide isolated from the Sargasso Sea
AGKSGIDDATSTEAADQAMEKTAENNTIEFDDFAKLELRIAKIEKAEHVEGADKLIKLTLDIGTEQRQVFAGIKAAYQPDDIVGRLTVMVTNLAPRKMRFGVSEGMVLAAGPGGQDLFLLSPDSGAEPGMEVK

SEQ ID NO: 184738 - protein, 228 aa, Unknown
  Bacterial polypetide isolated from the Sargasso Sea
DFIRTTEERHIFSVQNLWKKLEKNDEIYLSKYSGWYSVSDEAFYNEDELKEIEGKKIAISSGSTVEWVDEESFFFRLSKWEKPLLKFYEDNPNFICPESKKNEVISFVKNGLKDLSISRKSFSWGIKVPNNDNHVIYVWLDALTNYLSALNYPDTNDELFQNFWPASLHLIGKDILRFHAVYWPAFLLAAKIELPKKVYGHGWILSGEEKMSKSKGNILDPIDIIKRY

SEQ ID NO: 184739 - protein, 295 aa, Unknown
  Bacterial polypetide isolated from the Sargasso Sea
DIVYFHSLFWPAMLEGSNFRKPTNLFVHGYVTVNGAKMSKSRGTFIKASTWLKHFDADSLRYYYTAKLSSRIDDIDLNLEDFVQRVNADIVNKVVNLASRNAGFIAKRFDGILATELADPALYKTFTDAAAAIGEAWESREFGKAIREIMALADVANRYVDEQAPWVVAKQEGRDADLQAVCSMGINLFRVLMTYLKPVLPTLAERVEAFLNCELSWDAIEQPLLGHKVNTFKALYNRIDMKQVEALVEASKEEVKAAAAPVTGPLADDPIQETITFDDFAKVDLRVALIENAEF

SEQ ID NO: 184740 - protein, 311 aa, Unknown
  Bacterial polypetide isolated from the Sargasso Sea
GAPVEWVKEESYFFKLSEWEDRLIEFYESNNQAILPKSRYNEVISFIKSGLKDLSISRTTFKWGIQVPDKNNHVMYVWIDALCNYITALNYPDIDSESFKKFWPGVHIIGKDILRFHAVYWPAFLMAADLDPPKKIFAHGWWTNEGEKISKSIGNIINPYEIIEEYGLDQIRFFLFRHVPFGNDGDFSKDSIAERINADLSNNYGNLIQRISTFIVKNSNSKVNKPTKFIKDDQELLNLFDKTHDDYIKHMNSFQIDRALKNVFEYLSDVNAYVDNQAPWLLKKTDTIRMQDVLYIVTLVIIRCSILLYPI

SEQ ID NO: 184741 - protein, 198 aa, Unknown
  Bacterial polypetide isolated from the Sargasso Sea
MSNRYTVTTALPYANGPLHLGHVAGVYIPADIYVRYLRANSKDVVFIGGTDEHGVPISIKAKNEGVSPKEVVDRYHGIIKNSLEGLGISLDFFGQTSSSTHYDVATEWFQKLYNDGVFSEEVLQQYYDEENNQFLADRYITGTCPSCKDEGAYGDQCEKCGASLSPTELINPKSALSGNKPVLKETKHWYLPLNNFEP

SEQ ID NO: 184742 - protein, 284 aa, Unknown
  Bacterial polypetide isolated from the Sargasso Sea
FYITTPIYYVNDIPHIGHAYTSVATDCLARFKRMEGFDVRFQTGTDEHGLKIQKAADKLNIQPIELCNKNSKVFKDLTEILNLSNDDFIRTTENRHIEGAQNLWDKLQKNGQIYLDEYEGWYSVNDETFYNEKDLIKGDDKSLKTPTGGPVEWITEKSYFFRLSEWSGELLNLYKNSDFIRPESKRNEVISFVESGLKDLSVSRTSFKWGIETPNDPDHIMYVWLDALTCYPNGVGYLKSESSDLANFWTETTHIVGKDILRHHAVYWPAFLMAAKLELPRRIL

SEQ ID NO: 184743 - protein, 304 aa, Unknown
  Bacterial polypetide isolated from the Sargasso Sea
FVTTQLFLADRYIKGTCPKCGAPDQYGDACEHCYSTYSATDLIDPISVFSGIAPVLKTSTHYFFKLEKYREIIQSWLDTNPVTQSVKNKLNEWFDQGLKDWDISRDGPYFGFKIPNTENKFFYVWMDAPIGYIATTEHWAAKHGKSHQDFWNNKDVEIHHFIGKDIMYFHTLFWPAMLTVAGYDVPTKVNIHGFLTVNGEKMSKSRGTFILARDYAKDFDTDILRYYYAAKLSSSMDDIDFNIEDFVNRINSDVLGKFINIASRIGSIVNKKLDGKLSTIDDEGQLLLDKFLVMLIKLRLNIQI

SEQ ID NO: 184744 - protein, 275 aa, Unknown
  Bacterial polypetide isolated from the Sargasso Sea
YKKNNDFILPKSRRNEVISFVEKGLKDLSISRTSFSWGIPVPQNNKHVIYVWLDALTNYLSALNFPNTDDKKYKTFWPADVHIIGKDILRFHAIYWPAFLIAANLPLPKRVFGHGWILSDDKKMSKSLGNILDPIEVIKDCGIDQLRYYLIKEVSLGNDGSISMENLKNCINNDLANNYGNLCQRVFSFIKKNCNNKIPKKNKLKENDIKLIENIKDNIPKLIKYINNQNLNDYIKMVVNFSFEANKYFNDSEPWSLKTKDPERMNTILNTILEQ

SEQ ID NO: 184745 - protein, 271 aa, Unknown
  Bacterial polypetide isolated from the Sargasso Sea
ELNGKDFNNLIKSDSTKLVHFIGKDIAYFHLLFWPAVLEAAGMKLPEEVFTHGFMTMEGKKMSKSRGNFISAEKALEYAPADFYRYYISSKLNESVSDIDFSLEDFVEKVNSDLVGKFINIPSRIQNFIYKHNQGKINPNTNSLNQRFSSDYQTIINATETRNYALAIRHIMKIADEINLYVSENKPWDLEKTGDLQGCLEICSEALVAFKSLVVLMEPYIPEISQQIYKLLNLSDCTYSIVYEQGISEINKYEHIIKRLDIDELKGVYDG

SEQ ID NO: 184746 - protein, 143 aa, Unknown
  Bacterial polypetide isolated from the Sargasso Sea
MSSFFVTTPIYYVNDKPHIGTSYTTIACDILARYHKLKGEDIFFLTGTDEHGQKVEKAAINESIKTISFVDKMSQYFKDLIPFLGCEINDFIRTTEKRHITASQHLWNKIFKNNQIYLSNYEGWYSVRDEAFYTESEIIKKNN

SEQ ID NO: 184747 - protein, 304 aa, Unknown
  Bacterial polypetide isolated from the Sargasso Sea
LEKNKQIFLSKYSGWYSVSDEAFYNEDEVEEKDGLKVAKSSGSAVEWVEEESFFFKLSEWEKPLLEFYEKNKNFILPESRRNEVISFVKSGLKDLSVSRKTFSWGVKVPSDENHVVYVWLDALTNYLSSLKYPDENNELYKSFWPADLHIIGKDILRFHAIYWPAFLLAAKIEPPKRVYGHGWILSGDEKMSKSKGNILDPLEIINVYGLDPLRYYLLKEVSFGNDGNISEEKLENCINSDLANNFGNLCQRVLSFAEKNCSSLIPDHKFTDEDLEILKPLNNLDKIRSFIDNQDINPIYEFYC

SEQ ID NO: 184748 - protein, 219 aa, Unknown
  Bacterial polypetide isolated from the Sargasso Sea
MTKQDFYLTTPIYYVNDKPHIGHAYTTLACDVLARFNRLDGKNVFFLTGTDEHGQKVQKSAEAAGKEPQEFTDSLSQNFRQLAEEMNYSHDDFIRTTESRHIKATQDLWKKIRENGHIYLGSYSGWYAVRDEAFYGEKELSVNDKGQKVAPSGAEVEWVEEPSYFFDLSKWQEPLLDFYNKNPNFIGPKSRRNEVISFVKGGLNDLSVSRTSFNWGIPV

SEQ ID NO: 184749 - protein, 292 aa, Unknown
  Bacterial polypetide isolated from the Sargasso Sea
YSSIVADIFARFKRLDGFNVLFLTGTDEHGLKIQREAEKNKKKPKIFCDELSKNFRDLTKILNLSNDDFIRTTESRHHKSVNEIWNRLIDSGDIYLDKYKGWYSVSDEAYYDEDEIESSNGKKYSKTSGSQVDWVEEESYFFKLSAWTKKLLKFYEENQDFILPKSRKNEVINFVKKGLTDLSVSRTSFTWGIPVPNNSKHVIYVWLDALTNYLSAINFPNTKDLKYKNFWPADVHIIGKDILRFHAIYWPAFLLAAKLPVPKRVFGHGWILSDDKKMSKSLGNILDPIEII

SEQ ID NO: 184750 - protein, 269 aa, Unknown
  Bacterial polypetide isolated from the Sargasso Sea
KIPDEIDKYFYVWLDAPIGYLASILNWANNNNLKMEDLWSKKSNYEIYHFIGKDIAYFHGLFWPALLSSGGYKLPNGINVHGFLTINGEKMSKSKGTGILAKDFANITNPETLRYFFAAKLNNKVEDIDLNFDDYTQRINSDLVGKYLNIASRSASFLKKNDNVVSENINQNIIDNLLQKKEDILDLYESKEYSKLVRIIMVLADIVNKYINDEKPWKLDLEDAVIVSSTSLNAFKILSIYLHPIIPNLTTDAFKFLNTKISSFHDIDE

SEQ ID NO: 184751 - protein, 59 aa, Unknown
  Bacterial polypetide isolated from the Sargasso Sea
MKPTYYITTPIYYVNDVPHIGHAYTTLACDAIARFKRLDDYEVFFLTGTDEHGQKVETA

SEQ ID NO: 184752 - protein, 189 aa, Unknown
  Bacterial polypetide isolated from the Sargasso Sea
MPRKIFVTSALPNANGPIHLGHMLEHIQTDIWVRFQRMRGHEVIYACADDTHGTATMLKAEEEDTTPEELIERVRVEHQLDFENFLVSHDNYYSTHSQENQYYSELIYTKLKEKGLIIKKDVEQLFDRHKGLFLADRFIKGTCPKCHAEDQYGDNCQVCGATYDATELLNSRSVYSGEPPELKKSEHFF

SEQ ID NO: 184753 - protein, 279 aa, Unknown
  Bacterial polypetide isolated from the Sargasso Sea
EELIERVRVEHQLDFENFLVSHDNYYSTHSQENQYYSELIYTKLKEKGLIIKKDVEQLFDKHKGLFLADRFIKGTCPKCHAEDQYGDNCQVCGATYDATELLNSRSVYSGEPPELKKSEHFFFDLAQFGEFLKDWLSQNPVRNEVANKLREWLEDGLRPWDISRDAPYFGFQIPGEDEKFFYVWMDAPIGYLASLKNWCDKSKLSNIEDYWAHNSPAEVHHFIGKDIINFHALFWPAVLEGSGFRKPTKVHVHGFLTVNGVKMSKSRGTFITAKTYSEL

SEQ ID NO: 184754 - protein, 312 aa, Unknown
  Bacterial polypetide isolated from the Sargasso Sea
LESVLLIFWVRYQNLNGNECLYFCADDTHGTPVMLKAKELGIDPEELIKRTRKEHIKSYSRFNINFDNFYTTHSVENKKYAEDIYQNCKEGNLIFKKEIEQFYDSEEGLFLSDRFIKGTCPKCGAEDQYGDGCSVCGTTYTPDDLLNPVSSLSNSELTKKKTEHVFFDLPQMKDFLEDYLKDLTLQDPIKNKLNEWIEDGLKPWDISRDKPYFGFEIPGEKNKYFYVWLDAPIGYLASAKNWAENNNMDMKDLWGESSDYEIHHFIGKDIAYFHALFWPALLKSSNIRLPESINVHGFLTIDGEKMSKSNGT

SEQ ID NO: 184755 - protein, 271 aa, Unknown
  Bacterial polypetide isolated from the Sargasso Sea
NPNFILPDSRRNEVIQFVKKGLKDLSVSRTSFTWGIPVPKNSKHIIYVWLDALTNYLSALNFPNLEDKKYKLFWPASLHIIGKDILRFHAIYWPAFLMAAKIPLPKRVYGHGWILSDDKKMSKSLGNILDPIGIIKDYGIDQLRYYLIKEVSLGNDGNVSLANLKNCINNDLANNYGNLCQRVFTFLSKNCESKIPSFENFSQEDEKLFNNLVNKIPELMNMMDNQNLNLYMKNVINFSFESNKYFNDSEPWSLKKDKPQRMNTILYVILN

SEQ ID NO: 184756 - protein, 219 aa, Unknown
  Bacterial polypetide isolated from the Sargasso Sea
MSNKYYITTPIYYVNDRPHIGHAYTSVATDFIARFMTLKGYDVRFQTGTDEHGLKIQKAAEAKKIDPIELCNQNSQIFRDLTVSLNLSNDDFIRTTEERHIDGASYLWKRLYERDQIYLGEYTGWYSISDETFYNEKDLVKQNDGSFKTITGGPVEWITEKSYFFKLSQWSNKLLDLYSSNPNFISPASKRNEVIKFVESGLNDLSVSRTSFKWGIKTP

SEQ ID NO: 184757 - protein, 42 aa, Unknown
  Bacterial polypetide isolated from the Sargasso Sea
MTDQNARKILVTSALPYANGSIHLGHLLEYIQTDIWVRFRKR

SEQ ID NO: 184758 - protein, 144 aa, Unknown
  Bacterial polypetide isolated from the Sargasso Sea
MSVYITTPIYYTNDKPHIGHAYTTIACDIFARFSKLSQKDVFFLSGTDEHGQKVEKAAKEAHIDPKKFVDNLSLNFEKLVNDLGCEINDFIRTTEIRHRNAAQSLWIKLKENNQIYLSNYEGWYSIRDEAFYQESELKKIDDKY

SEQ ID NO: 184759 - protein, 274 aa, Unknown
  Bacterial polypetide isolated from the Sargasso Sea
NDDIYLSKYSGLYSVSDEAFYSDEEIEEINGSKVAISSKSTVEWVDEESYFFRLSKWEKPLLEFYEKNPGFISPEARKNEVVSFVKSGLKDLSISRKSFSWGIKVPGNENHVIYVWLDALTNYISALNYPNTKEKLFKSFWPASIHLIGKDILRFHAVYWPAFLLAAKIDLPKKVYGHGWILSGDEKMSKSKGNILDPIEIINQYGLDSLRYYLIKEVSFGNDGNISQERLEDCINSDLANNFGNLCQRVTAFAIKNCDSKIPKKIELNDDDHK

SEQ ID NO: 184760 - protein, 173 aa, Unknown
  Bacterial polypetide isolated from the Sargasso Sea
MNKNFYITTPIYYPSAKPHMGHAYSSIVADFFARFKRIQGYKVFFLTGTDEHGQKIQRAAENKNMDPKAFCDKISKTFFDLSKTLNLSNDDFIRTTEERHKKSVENLWNILEKKNEIYLSKYAGWYSVSDEAFYSEEEIDTKDNIKLSKISGSQVEWVEEESFFFKLSKWQEP

SEQ ID NO: 184761 - protein, 241 aa, Unknown
  Bacterial polypetide isolated from the Sargasso Sea
MKSRKILVTSALPYANGSIHIGHVLESVITDIWVRYQNINGNECLYFCADDTHGTPVMLKAKELGIDPEELIKRTREEHIKSYSRFNINFDNFYTTHSDENKKYAEDIYQKCKEGNLIFKKEIEQFYDSEEGLFLSDRFIKGTCPKCGAEDQYGDGCSVCGTTYTPDDLLNPVSSLSNSELTKKKTEHVFFDLPQMKDFLENYLKDLTLQDPIKNKLNEWIDDGLKPWDISRDKPYFGFEI

SEQ ID NO: 184762 - protein, 335 aa, Unknown
  Bacterial polypetide isolated from the Sargasso Sea
IADFFARFKRIQGYNVFFLTGTDEHGQKIQRAAEKEGIDPKSFCDEISKTFKELSKILNLSNNDFIRTTEIRHFKSVENLWKILEKKGEIYLSKYSGWYSVSDEAFYSEDEIENVDNKKIAKTSGSPVEWIEEESYFFKLSKWQEPLLKFYSENPDFILPETRRNEVVSFVKGGLKDLSVSRKSFSWGIKVPSNKDHVIYVWLDALTNYISALNYPDTDNKLYKNYWPATLHLIGKDILRFHAVYWPAFLLAADIPTPKRVYGHGWILSGEEKMSKSKGNILDPIEIIENYGLDTLRYYLLKEVSFGNDGSISKEKLENCINSDLANNFGNYVRE

SEQ ID NO: 184763 - protein, 258 aa, Unknown
  Bacterial polypetide isolated from the Sargasso Sea
ASLHLIGKDILRFHAVYWPAFLLAAKLPLPDKIYSHGWILSGEEKMSKSKGNILDPIEIINEYGLDPLRYYLIKEVSFGNDGNISTDRLENCINSDLANNFGNLCQRVTAFVFKNLDGKIPNDVKYDKEDLKILDKFKINLNVVRKKIDKQDINFYINFIVDSLFDANKYFNDQEPWKKKNSPIRLNAIIYTTLEVIRKICYMLYPIIPLASLQALKIFNIKENEIKLSSLENHNYLRFGSKINKIDILFKKIEKNND

SEQ ID NO: 184764 - protein, 294 aa, Unknown
  Bacterial polypetide isolated from the Sargasso Sea
NDKSFYITTPIYYPSAKPHMGHAYSSIIADFFARFKLIDDYQVHFLTGTDEHGLKIQRSAEKAGKEPQIFCDQISQTFRDLSETLNLSNTDFIRTTESRHKKTVQHLWSELEKNDDIYLSNYSGWYSVSDEAFYNEDEIDEVDGKKIALSSKSPVEWIEEESYFFRLSKWEKPLLDFYLANPDFISPESRKNEVISFVKSGLKDLSVSRKSFSWGIPVPNNKNHVIYVWLDALTNYLSALNYPDTDDDLFKKFWPASIHLIGKDILRFHAVYWPAFLLAAKIDLPKRVYGHGWI

SEQ ID NO: 184765 - protein, 288 aa, Unknown
  Bacterial polypetide isolated from the Sargasso Sea
DLNLDDFVQKVNSDLVGKVVNIASRCAKFINTKFDNKLSATCAEPELVQSFIDAGASIAAQYESREFSAAIREIMALADKANQYIDEKKPWALAKIEGEDQQVHDVCSVGINLFRQLAVYLAPVLPTLAAQVQAFLKLDHFDFASAQTALVDHEIALFKPLMQRVDPKAVAAMVDASKDSLAAAAEPAKVEKKKEKKASTKPEPKVGEAEVIGIEDFMKVDLRVAEVLEAATVEGSDKLLQLTLNVGEAEPRNVFSGIREFYQPEDLKGKLVVMVANLAPRKMRFGIS

SEQ ID NO: 184766 - protein, 322 aa, Unknown
  Bacterial polypetide isolated from the Sargasso Sea
GCENDNFIRTTEIRHIRSAQTLWKTLFDNNQIYLSNYEGWYSIRDEAYYQESELKEINGNYFTDNGSPVEWVKEESYFFRLSEWQDKLIKFYENNPNSISPKSRYNEVLSFIKGGLKDLSISRTTFNWGVPVPNDQKHVMYVWIDALCNYLTAIGYPDISNNQFKKFWPANHIVGKDILRFHAVYWPAFLMAAEIEPPNKIFAHGWWTNEGQKISKSLGNVIDPYEIIDLYGLDQIRYFLFREVPFGNDGDFSKDSISNRINADLSNNYGNLVQRILKFIVKNCNSKLTTTSDYNKSDNDLFEFFENKFQEYLNFMNNYQID

SEQ ID NO: 184767 - protein, 282 aa, Unknown
  Bacterial polypetide isolated from the Sargasso Sea
MVTNANVGGSTLNATDLINPKSTITGETPVLKETKHWFLPLDRYQDFLEKWMLQDHKNDWKTNVLGQVKSWLDDGLKPRAVTRDLDWGIDVPVKGAEGKKLYVWFDAPIGYISSTKEWAEKEGKDWEPYWKDTDTKLVHFIGKDNIVFHCIIFPAMLKAEGSYILPDNVPANEFLNLEGNKLSTSKNWAVWLHEYLQDFPNQQDVLRYALTSNAPETKDNDFTWKDFQARNNNELVAVFGNFINRVVVLTNKYYDGIVPTPNEFTEVDEATLTELKAYPEVI

SEQ ID NO: 184768 - protein, 301 aa, Unknown
  Bacterial polypetide isolated from the Sargasso Sea
FSRFNKLRNEDTFFLTGTDEHGQKVEKASLIQNKDTNKFVEEMSKNFRNLIPILGCEIDDFIRTTENRHKKAAQFLWNQLKKNDQIYLSNYEGWYSVRDEAFYLESELKKVENGFIAPSGAPVEWVQEESYFFKLSEWEDKLIKYYEKNTDAILPKSRYNEVLSFIKGGLKDLSISRTTFNWGIKVPDADNHVMYVWIDALCNYITALNYPNIYNDSFKKFWPGIHIVGKDILRFHAVYWPAFLMAADLDPPKKIFAHGWWTNEGKKISKSDGNTINPYEIIEQYGLDQIRFFLFREVPFG

SEQ ID NO: 184769 - protein, 250 aa, Unknown
  Bacterial polypetide isolated from the Sargasso Sea
MDNSKKTKRKILVTQALPYANAPLHLGHILEAVQTDIWTRFQNFNGNECLFFCADDTHGTPVMLKANEMGIKPEELISDVYKDHKSSYELYGINFANFYSTHSDENRKYSEYIYECAKNNNLISKANIEQYYDEKEEMFLSDRFIKGTCPKCGAEDQHGDNCGVCGASYNVLDVIKPISIISNTVPIKKESEHIFFDLPQKNKMLKDFLKNVDLQESIKNKLNEWLNDDLKKWDISRDAPYFGFEYLEKR

SEQ ID NO: 184770 - protein, 259 aa, Unknown
  Bacterial polypetide isolated from the Sargasso Sea
FWPANIHVVGKDILRFHAVYWPAFLMAAGIELPKKIYAHGWWTVNGQKMSKSLGNVVNPKEIINNYGLDQVKYFLLREVKFGQDGDYSEDALLKRSNSDLANDYGNLAQRVLSFVYKNCDKKIPQANKLSKEDQLLIDSVEKSKDQILKLMNNYEITGALEELWKIIRESNAYIDSEAPWSLKNTNINRMNTVLNILCNTIRKISLIAQNFVPDGANNILDQLSVDKDKRNYLNFNDELKENAIDKPYGVFPRLEKRND

SEQ ID NO: 184771 - protein, 234 aa, Unknown
  Bacterial polypetide isolated from the Sargasso Sea
DEKEEMFLSDRFIKGTCPKCGTEDQNGDNCGVCGASYNVLDVKKPISIISNTVPIKKESEHIFFDLPQKNKMLKDFLKNVDLQESIKNKLNEWLNDDLKKWDISRDAPYFGFEIPGEENKYFYVWVDAPIGYLASISNWAEKNKLNMQDLWSENSKYEIYHFIGKDIAYFHGLFWPALLSAANLKLPSGINVHGFLTINGEKMSKSKGTGILAKEFAEITNPETLRYYFAAKLN

SEQ ID NO: 184772 - protein, 329 aa, Unknown
  Bacterial polypetide isolated from the Sargasso Sea
HVLKSVITDIGVRYQNLNGNECFYFCADDTHGTPVMLKAKELGIDPEELIKRTREEHIKSYSRFNINFDNFYTTHSDENKKYAEDIYQKCKEGNLIFKKEIEQFYDSDEGLFLSDRFIKGTCPKCGAEDQYGDGCSVCGTTYTPDDLLNPVSSLSNSELTKKKTEHVFFDLPQMKNFLENYLKDLTLQDPIKNKLNEWIEDGLKPWDISRDKPYFGFEIPGEKDKYFYVWLDAPIGYLASAKNWAENNDMDMKDLWGESSDYEIHHFIGKDIAYFHALFWPALLKSSNIRLPESINVHGFLTIDGKKMSKSNGTFINADDFAENYDGEL

SEQ ID NO: 184773 - protein, 295 aa, Unknown
  Bacterial polypetide isolated from the Sargasso Sea
MEKYYITTPIYYVNDKPHIGHAYTTILADTISRFRALIGEKPTFLTGLDEHGLKVQQAAEKNGKAPQDHCDSMAPAFVDLWKKLNINYSDFIRTTEHRHTKIVQQILTKVHESGDIYMDEYEGWYSISEERFITEKELDSGQFGQIKQIKEKNYFFRMSKYQATLIDKIEKDELLIQPKSRKNEVLGFLKNELSDLCISRPKSRLEWGIELPFDDNYVTYVWFDALINYISAIGAYSNDEQFSSLWPADVHLIGKDILTTHSVYWPTMLLSLGLPLPQRIFAHGWWLTDDQKMSK

SEQ ID NO: 184774 - protein, 156 aa, Unknown
  Bacterial polypetide isolated from the Sargasso Sea
MEKYYITTPIYYVNDKPHIGHAYTTILADTISRFRALIGEKPTFLTGLDEHGLKVQQAAEKNGKAPQDHCDSMAPAFIDLWKKLNINYSDFIRTTEHRHTKIVQQILTKVHESGDIYMDEYEGWYSISEERFITKKEFDSGQFGEAKQIKEKNYFF

SEQ ID NO: 184775 - protein, 196 aa, Unknown
  Bacterial polypetide isolated from the Sargasso Sea
MKPFYITTPIYYVNDKPHIGHAYTTILADVLARHYRNIGRDVFLLTGLDEHGQKVQQAAESRNINPKQHCDEMAPRFLKLWDKLHISYDDFIRTTEKRHTDIVKYFLQKVYDKGDIYEDSYEGLYSVSEERFITEKEAESGDFRDIKELKEKNYFFKMSKYQNKLIKHIEENPSFIQPKFRRNEVLGFLRSPLEDL

SEQ ID NO: 184776 - protein, 297 aa, Unknown
  Bacterial polypetide isolated from the Sargasso Sea
KYYITTPIYYVNDKPHIGHAYTTILADTISRFRALIGEKPTFLTGLDEHGLKVQQAAEKNGKAPQDHCDSMAPAFIDLWKKLNINYSDFIRTTEHRHTKIVQQILTKVHESGDIYMDEYEGWYSISEERFITKKEFDSGQFGEAKQIKEKNYFFRMSKYQKTLIDKIEKDELLIQPKSRKNEVLGFLKNELSDLCISRPKSRLEWGIELPFDDNYVTYVWFDALINYISAIGAFKNDEQFSSLWPADVHLIGKDILTTHSVYWPTMLLSLGLPLPQRIFAHGWWLTDDRKMSKSLGN

SEQ ID NO: 184777 - protein, 282 aa, Unknown
  Bacterial polypetide isolated from the Sargasso Sea
MSKNFYITTPIYYPSAKPHMGHAYSSIIADFFSRFKKIDGYNVYFLTGTDEHGLKIQRSAENQKKDPKSFCDEISKTFEDLTKTLNLSNTDFIRTTENRHKVSVQNLWNILEKNNQIYLSKYSGWYSVSDEAFYNIDEVEEKDGSKIAKISGSVVEWVEEESYFFKLSEWEKPLLEFYEKNKNFILPESRRNEVISFVKNGLKDLSVSRKTFTWGINVPNDEKHVVYVWLDALTNYLSSLKYPDENNDLFKNFWPADIHIIGKDILRFHAIYWPAFLLAAKY

SEQ ID NO: 184778 - protein, 242 aa, Unknown
  Bacterial polypetide isolated from the Sargasso Sea
SAEKEGLDPFNFCDQISKTFRDLSKTLNLSNTDFIRTTEERHKKTVQHLWKELEKNDDIYLSNYSGWYSVSDEAFYNEDEIEEVEGKKISISSKSPVEWIEEESYFFRLSKWEKPLLDFYEKNPNFISPASRKNEVISFVKSGLKDLSVSRKSFSWGIKVPGNDKHVIYVWLDALTNYISALNYPNKEDELFKKFWPASIHLIGKDILRFHAVYWPAFLLAAKIELPKKVYGHGWILTGDEK

SEQ ID NO: 184779 - protein, 271 aa, Unknown
  Bacterial polypetide isolated from the Sargasso Sea
YFYVWLDAPIGYIAILDNFLSENSSSISAEELWNESEIYHFIGKDIMNFHTLFWPALLDASDFKKPSNVFVHGFMTLNGKKMSKSKGNFLLIDDYLNLLNPDYMRYFLATKLSNGIDDLDLDLLDFQKKVNTDLVGKFVNIASRSQGFLKEFNNILSNDLDEDLIDEFSNKKNEIFNHYLDRNYSKALKEIMTLADKANQYIDSNKPWILNKESNNKEKVRKIASTAINLFKILNLYLEPVIPETSEKIKKYLKCNDSVDNVSFYLKNHEI

SEQ ID NO: 184780 - protein, 296 aa, Unknown
  Bacterial polypetide isolated from the Sargasso Sea
NNNFILPNSRRNEVISFVKGGLKDLSVSRTSFSWGVKVPNNDSHIMYVWLDALTNYLSACNYTSSENDTFYKFWPADIHMVGKDILRFHAVYWPAFLMAADLPLPKKIFAHGWWTNEGNKISKSLGNVIDPLELVDKYGVDQIRYFLMREVPFGNDGDFSNSQLINRINSDLANSYGNLFQRVISMILKNCNAIIPIRPKDFQDEDLRLINSIRNSLQNYRSLMDEQKFDQFLKNIWLVISDANKYVDNQAPWSLKKNDFQRMEVVLYTLIETIRQISIILQPFIPNTSKFILDHI

SEQ ID NO: 184781 - protein, 235 aa, Unknown
  Bacterial polypetide isolated from the Sargasso Sea
SEHYFFKLPSFSAEIKEWILHSGAVQDDVKAKALEWIESGLKDWDISRDAPYFGFLIPGTTDKYFYVWMDAPIGYMATTQKWCADKGYDFDKIWKGDHYEIHHFIGKDIVYFHVLFWPLMLQVGGFKKPNKVHVHGFLTINGEKMSKSRGTFITAQTYLEHLDPELLRYYYACKLSGNITDIDLNLEDFVYRVNSDIVNKVVNIGSRLGSIINKKLDGKLGSLDKEGEDLLATIT

SEQ ID NO: 184782 - protein, 199 aa, Unknown
  Bacterial polypetide isolated from the Sargasso Sea
MNKNYYITTPIYYPSAKPHMGHAYSSIVADFFARFKKIQGYNVFFLTGTDEHGQKIQRAAEKKQMDPLSFCDEISKTFRDLSKTLNLSNTDFIRTTEERHAKSVANLWNILEKKNEIYLSKYSGWYSVSDEAFYSDEEINEENGNKISKVSGSPVEWVEEESYFFRLSKWQEPLLEFYSKNSKFILPESRKNEVLSFVK

SEQ ID NO: 184783 - protein, 209 aa, Unknown
  Bacterial polypetide isolated from the Sargasso Sea
MPYFITTPIYYVNDAPHIGHAYTTIACDILTRFSKLNGHETYFLTGTDEHGQKVEKAAISNKKDTQDFVDEMSKNFRNLIPYLGCQIDDFIRTTEERHKKATQFLWNKLKENEQIYLSNYEGWYSIRDEAFYLESELIKTENGFIAPSGASVEWVKEESYFFKLSKWEDKLIEYYGNNPESILPRSRYNEVLSFIRGGLKDLSISRTTL

SEQ ID NO: 184784 - protein, 286 aa, Unknown
  Bacterial polypetide isolated from the Sargasso Sea
SGSKLSGLRKNHIFLNYQHAENKLLKLYENNKKFILPESRKNEVVQFVKKGLKDLSVSRTSFSWGIPVPKNSKHVIYVWLDALTNYLSAVNYPNTDDEKYKSFWPANVHIIGKDILRFHAVYWPAFLMAANIPVPNRVYGHGWILSDDKKMSKSLGNILDPIEIIKNFGIDQLRYYLTKEVSLGNDGNISLKSLTDCINNDLANNYGNLCQRVFSFIEKNSNSKIPKIKKLDLDDKKISDEIINKLPKLRTLMDNQELNLYLKEVIKFSFNANKYFNDQAPWKLKK

SEQ ID NO: 184785 - protein, 283 aa, Unknown
  Bacterial polypetide isolated from the Sargasso Sea
THGTPVMLKAKELGIDPEELIKRTREEHIKSYSRFSINFDNFYTTHSDENKKYAEDIYQKCKEGNLIFKKEIEQFYDSDEGLFLSDRFIKGTCPKCGAEDQYGDGCSVCGTTYTPDDLLNPVSSLSNSELTKKKTEHVFFDLPQMKNFLENYLKDLTLQDPIKNKLNEWIEDGLKPWDISRDKPYFGFEIPGEKDKYFYVWLDAPIGYLASAKNWAENNDMDMKDLWGESSDYEIHHFIGKDIAYFHALFWPALLKSSNIRLPESINVHGFLTIDGEKMSKSN

SEQ ID NO: 184786 - protein, 174 aa, Unknown
  Bacterial polypetide isolated from the Sargasso Sea
VKNGLKDLSVSRKSFSWGIPVPNNKNHVIYVWLDALTNYLSALNYPNMDDDLFKKFWPVSIHLIGKDILRFHAVYWPAFLLAAKIELPKRVYGHGWILSGEEKMSKSKGNILDPLEIIKQYGLNPLRYYLIKEVSFGNDGNISQERLEDCINSDLANNYGNLCQRVICFCNKKL

SEQ ID NO: 184787 - protein, 192 aa, Unknown
  Bacterial polypetide isolated from the Sargasso Sea
HGDNCGVCGASYNVLEIENPVSTISNTKPVKKESEHIFFDLPAKRDMLKEFIEKVDIQESIKNKLKEWLGDDLKKWDISRDAPYFGFEIPGEDNKFFYVWVDAPIGYIASISNWANSNQIAMEDLWSENSSYEIYHFIGKDIAYFHGLFWPALLSSAKLKLPSGINVHGFLTINGEKMSKSLGTGILAKDFA

SEQ ID NO: 184788 - protein, 249 aa, Unknown
  Bacterial polypetide isolated from the Sargasso Sea
MTNPFYISTAISYTNGPPHIGHAYEVIAADAIARFKRLDGYDVFFLTGTDEHGLKVQKKAKEMGVDPKKYVDDISKEFIKLSISLDCSNNDFIRTTDERHIKNVHSIWKILFDKGDIYLDQYSGWYSITDEAFYNEEELIKTESNSFLSPNGNPVEWVDEESYFFKLSKYENNLLELYEKNEEFIFPNSRMNEIKNFVKSGLKDISISRKNISWGIPVKENTDHSIYVWLDALTNYISALDWCDNNELL

SEQ ID NO: 184789 - protein, 187 aa, Unknown
  Bacterial polypetide isolated from the Sargasso Sea
MESRKYYLTTPIYYVNDVPHIGHAYTTLACDVLARFKRLDGFDVLFLTGTDEHGQKVEKAAEAVDMKPQAFTDKVSQNFRDLLPFMNISNDDFIRTTETRHKEAAQAIWHRLMKNGHIYLDKYSGWYSVRDEAYFSEGELVDGKAPTGAPVEWVEEPSYFFDLSQWETKLLQFYEDNPDFIAPVSRR

SEQ ID NO: 184790 - protein, 283 aa, Unknown
  Bacterial polypetide isolated from the Sargasso Sea
IQTDIWTRFMRNSNHEVLSFCADDAHGAPIMMKADEMQIKPIDFIDQMKKDHINSLEKFGIKYTNYHSTHSSENEGLVSEIYLAAKDAGLIYKEDIEQCFDEEKKMFLADRYVIGECPKCGAKDQYGDGCDSCGATYSATELINPKSSLTGSTPSTKISEHVFFNLQKSKSNLKKFLKTASIQNSVVGKLSEWLEGDLRSWDISRDAPYFGFKIPDESDKYFYVWVDAPIGYIASAKNWAKKNNLSIDKLWGKNSEYEIHHFIGKDITYFHGLFWPALLDNSN

SEQ ID NO: 184791 - protein, 288 aa, Unknown
  Bacterial polypetide isolated from the Sargasso Sea
GSQVEWVEEESFFFKLSKWQEPLLKFYNENPEFILPESRRNEVISFVKSGLKDLSVSRKSFSWGIKVPSNKDHVIYVWLDALTNYISALNYPDTNSNLYKSYWPATLHLIGKDILRFHAVYWPAFLLAANLPPPKRVYGHGWILSGEEKMSKSKDNILDPLEIIDTYGLDPLRYYLIKEVSFGNDGNISKEKLENCINSDLANNYGNLCQRVISFIEKNLDLRVPNNYTLINEDNNVLKIYNESFNKLIGAIDSQNVNFYVNFIQEQLFSANKYFNDQEPWSKKDDTV

SEQ ID NO: 184792 - protein, 215 aa, Unknown
  Bacterial polypetide isolated from the Sargasso Sea
DARGDQCDNCTKQLDLTDLINPRSSISGATELEQRETKHLYLCQSNMRDNLENWIESKTDWPVLTTSIAKKWLHDGEGLQDRGITRDLDWGIPVKKGNSPWPGMEDKVFYVWFDAPIEYIACAQEWVNAGKGNDWEKWWRTDKGADEVVYTQFMGKDNVPFHTLSFPATVLGSGEPWKLVDYIKSFNYLNYDGGQFSTSRGRGVFMDDALKILPA

SEQ ID NO: 184793 - protein, 224 aa, Unknown
  Bacterial polypetide isolated from the Sargasso Sea
MNNSFYISTPIYYVNDKPHIGHAYTTILADVIARFYRQLNYDTFFLTGLDEHGQKVQEAASNRKVEPQDHCNEMAPRFIELWEKLHISNDDFIRTTEERHKKVVQEFLQLVFDKGDIYKDEYTGLYSVSEERFITEKEAESGIFRDIKELKEINYFFKMSNFQSQLIDHIENNNNFIQPAHRKNEILGFLKQPLSDLCISRPKSRLNWGIELPFDDEYVTYVWF

SEQ ID NO: 184794 - protein, 294 aa, Unknown
  Bacterial polypetide isolated from the Sargasso Sea
IQGFKVYFLTGTDEHGQKIQRAAEEKKMDPLLFCDEISKTFRDLSDTLNLSNNDFIRTTEKRHAKSVENLWNILEKKDEIYLSKYSGWYSVSDEAFYAESEIEDLDGIKKSISSGSKVEWVEEESYFFKLSRWQDKLLEFYNKNPDFILPETRKNEVISFVKSGLKDLSVSRKSFNWGIKVPSNKDHVIYVWLDALTNYLSALNYPNESDNLYKSFWPADLHLIGKDILRFHAIYWPAFLLAADIEPPKRVFGHGWILSGDEKMSKSKGNILDPLEIIDNYGLDPLRYYLIKEV

SEQ ID NO: 184795 - protein, 309 aa, Unknown
  Bacterial polypetide isolated from the Sargasso Sea
EHQTDFAGFNISYDNYHSTHSDENRELSELIYGRLKENGFIKNRTISQLYDPEKGMFLPDRFVKGTCPKCKSPDQYGDNCEVCGATYSPTELIEPKSVVSGATPVMRESEHFFFDLPSFSEMLQAWTRSGALQEQVANKMQEWFESGLQQWDISRDAPYFGFEIPNAPGKYFYVWLDAPIGYMGSFKNLCDKRGDTTSFDEYWKKDSTAELYHFIGKDIVYFHSLFWPAMLEGSNFRKPTNLFVHGYVTVNGAKMSKSRGTFIKASTWLKHFDADSLRYYYTAKLSSRIDDIDLNLEDFIQRVNADIGT

SEQ ID NO: 184796 - protein, 273 aa, Unknown
  Bacterial polypetide isolated from the Sargasso Sea
DEHGLKVEKAARKKNSDPQEYVDIISKNFLNLSEILNLSNDDFIRTTELRHKESVKSFWEKLVKNNQIYLDKYEGWYSIKDETFYQEKELTKKNGGFETKDGEKVEWVEEESYFFKLSRWQNKLLELYETNEKFILPKSRRNEVVSFVKNGLKDLSISRTSFSWGIKVPNTENHVIYVWIDALTNYITSLDYPNINKHGSSLWKNSIHIIGKDILKFHAVYWPALLMGANLDPPKQIFAHGWWTNEGKKISKSLGNTIDPLEIVKKFGLDQIR

SEQ ID NO: 184797 - protein, 308 aa, Unknown
  Bacterial polypetide isolated from the Sargasso Sea
SVSRTSFSWGITVPNHNKHVIYVWLDALTNYLSALDFPDLKSIKYNKFWPASVHIIGKDILRFHAIYWPAFLMAAKIPLPKRVYGHGWILSDEKKMSKSLGNILDPLEIIDKYGIDPLRYYLTKEVSLGNDGSISLKSLTNCINNDLANNYGNLCQRVFTFLEKNCNSIIPKYGKLNNQDKDLTQDLTNKISDLKKLMNNQELNQYIKEVINFSFKSNKYFNDLKPWDLKKSNPDRMNTVIYVVLNQIRSISILLNPIIPNSTEKILSCLNIKKADITIDNLLNTEFLKPGMKIMKPNILFKKIDNDN

SEQ ID NO: 184798 - protein, 231 aa, Unknown
  Bacterial polypetide isolated from the Sargasso Sea
MEKYYITTPIYYVNDKPHIGHAYTTILADTISRFRALIGEKPTFLTGLDEHGLKVQQAAEKNGKEPQDHCDSMAPAFIDLWKKLNINYSDFIRTTEHRHTKIVQQILTKVHESGDIYMDEYEGWYSISEERFITEKELDSGQFGEAKKIKEKNYFFRMSKYQKTLIDKIEKDELLIQPKSRKNEVLGFLKNELSDLCISRPKSRLEWGIELPFDDNYVTYVWFDALINYIS

SEQ ID NO: 184799 - protein, 188 aa, Unknown
  Bacterial polypetide isolated from the Sargasso Sea
MKNYYITTPIYYVNDKPHIGHAYTTILADTLSRFRQLINQKTFFLTGLDEHGLKVQQAAEKNGANPQDHCDAMAPAFLELWKKLDIQYSDFIRTTEARHVKIVQNILTEVYNNGDIYKDKYEGWYSISEERFITEKELDSGLFRDVKKIEEENYFFKMSKYQKQLIKKIEDDEEFIQPSTRKNEVLGF

SEQ ID NO: 184800 - protein, 274 aa, Unknown
  Bacterial polypetide isolated from the Sargasso Sea
TNYLSALNYPNENDDLYKRFWPASIHLIGKDILRFHAVYWPAFLLAAGIPLPKRVYGHGWILSGEEKMSKSKGNILDPIEIIKNYGLDSLRYYLIKEVSFGNDGNISKEKLESCINSDLANNYGNLCQRVISFNEKNCDFKIPKVDSFNKDDLDLLERFETNFDKLIHHIDKQDLNSYMNFVVESLFIANKYFNDQEPWKKKSDQLRLNTIVYVALEVIRKISIMLYPVIPNSSLKVLRVFNINEQNIDFNSIKKHNVLIADKKINKINILFAR

SEQ ID NO: 184801 - protein, 302 aa, Unknown
  Bacterial polypetide isolated from the Sargasso Sea
ESRKNEVVNFVKKGLKDLSVSRTSFSWGIPVPNNKKHVIYVWLDALTNYISALNFPNTNDKLYKDFWPADIHIIGKDILRFHAIYWPAFLLAAKLKAPKRVYGHGWILSDEKKMSKSLGNILDPLEIIKNYGVDQLRYYLMKEVSLGNDGSISLENLKNCINNDLANNFGNLCQRVFSFVEKNCNSKIPSPEKFNTKDNELLNEIIKKLPKLKEMMDNQELNSYVKEIINFSFNSNKYFNDLEPWKLKKSNLGRMNTVLYCILNQIKSISILLYPIMPNSIEKTFQLMGLKKGDIALSEVKN

SEQ ID NO: 184802 - protein, 296 aa, Unknown
  Bacterial polypetide isolated from the Sargasso Sea
QEAEQFLADRFVVGTCPHCGHEEAYGDQCESCGRSLNANDLIHPTSTISGSVPVTKATKHWFLPLDRYQSFLEDWILKGHADDWKPNVYGQVKSWLDDGLKPRAVTRDLDWGIPVPVPGGENKVLYVWFDAPIGYISATKDWAQQNNSDWEPYWKDKNTKLIHFIGKDNIVFHCIIFPSMLKAEGSYVLPTNVPANEFLKLEGQKLSTSKNWAVWLHEYLEDFPGKQDVLRYVLTANAPENKDNDFTWRDFQARNDNELVAVYGNFINRIVVLTHKYYEGVVPAPNHNTQVDKETL

SEQ ID NO: 184803 - protein, 278 aa, Unknown
  Bacterial polypetide isolated from the Sargasso Sea
KVEWVEEESYFFKLSNWQHKLIEFYNKNPDFILPETRKNEVISFVKSGLKDLSVSRKSFNWGIKVPSNKDHVIYVWLDALTNYLSALNYPNENDDLYKSFWPADLHLIGKDILRFHAIYWPAFLLAADIEPPKRVFGHGWILSGDEKMSKSKGNILDPLEIIDNYGLDPLRYYLIKEVSFGNDGNISQEKLEACINSDLANNYGNLCQRVLSFCDKNANLEVPDIDKLTEDDKIILDQYSKYYDDLVKYSDNQDVNSYINFIVEQLFSAKKYFNDQEP

SEQ ID NO: 184804 - protein, 274 aa, Unknown
  Bacterial polypetide isolated from the Sargasso Sea
MNYPNTKEKLFKNFWPASIHLIGKDILRFHAVYWPAFLLAAKIDLPKKVYGHGWILSGDEKMSKSKGNILDPIEIINKYGLDSLRYYLIKEVSFGNDGNISQERLEDCINSDLANNFGNLCQRVTAFAIKNCNSKIPKKIEFNEHDHKILNNYKDNIDLIREKIDNQDINFYINFIVNSLFEANKYFNDQEPWNKKEDLLRLNTIVFTTLEIVRKVSFLLYPIIPESSIKALKIFGINEADINLSSIENNNFLSKVDKINKIDILFKKIERKDD

SEQ ID NO: 184805 - protein, 283 aa, Unknown
  Bacterial polypetide isolated from the Sargasso Sea
MSLNFQNLTKILNLSNNDFIRTSSQRHINAVRSFWEKLNNNGQVYLDKYSGWYSIRDEAFYNEEEIVDGHAPTGAPVEWVEESSYFFKLSDWEEKLLKFYEDNPTFIQPKSRYNEVVSFVKQGLKDLSISRTSFDWGVKVPGDESHVVYVWIDALTNYLTALGYPDNDSKSLKDFWPANFHFVGKDILRFHAVYWPALLMAAGMETPKKIIAHGWWTVEKEKMSKSLGNVVNPQDIINKYGLDQFRYFLLREVPFGNDGDFSEDALISRINSELANNFGHLVN

SEQ ID NO: 184806 - protein, 229 aa, Unknown
  Bacterial polypetide isolated from the Sargasso Sea
MNKTFYITTPIYYVNDIPHIGHAYTTILADVLSRYQKQIGNDSFFLTGVDEHGQKVQEAAKKRGVNPLQHCDEMAKRFTSLWQELHISNDDFIRTTEQRHQKVVKKILNIVNDAGDIYADEYEGLYSISEERFITEKESESGQFRDIKKLKEKNYFFKMSKYQDQLINHINKNPKFIQPEHRKNEILGFLKQPLNDLCISRPKSRLDWGIELPFDSNYVTYVWFDAFDK

SEQ ID NO: 184807 - protein, 122 aa, Unknown
  Bacterial polypetide isolated from the Sargasso Sea
MSRKIFVTSALPNANGPIHLGHMLEHIQTDIWVRFQRMRGHEVVYACADDTHGTATMLKAEEEDTTPEELIERVRVEHQLDFENFLVSHDNYYSTHSQENQYYSELIYTKLKEKGLIIKKDV

SEQ ID NO: 184808 - protein, 299 aa, Unknown
  Bacterial polypetide isolated from the Sargasso Sea
LVNEKTEKQVFSNQDQRFLPDRYIEGTCPNCGFEEARGDQCDNCTKQLQPNELINPRSTISGSTDLEERETKHLHLRQSLMKEELESWIDTKSDWPILTTSIAKKWLNDGDGLQDRGITRDLNWGVPVKKGQENWPGMDGKVFYVWFDAPIEYIACAEEWVDAGKGEDWHRWWKTDKGADDVIYTQFMGKDNVPFHTLSFPATILGSGEPWKLVDYIKSFNYLNYDGGQFSTSRNRGIFMDQALEILPPDYWRWWLLSHAPESSDSEFTWENFQQTVNKDLADVLGNFVSRVTKFCRSK

SEQ ID NO: 184809 - protein, 302 aa, Unknown
  Bacterial polypetide isolated from the Sargasso Sea
RGRGNEVMFLCATDEHGTPAELAAAKAGKPVADYCAEMHEVQADIAKRFGLSFDHYGRSSSPQNHALTQHFAGKLEEAGLITEVSEKQVYSNADGRFLPDRYIEGTCPNCGFEKARGDQCEECTKQLDPTDLINPRSAISGSTDLEVRETKHLFLRQSAMRDQLDQWIDSKTDWPVLTTSIAKKWLHDGDGLQDRGITRDLDWGIAVKKGTEDWPGMEGKVFYVWFDAPIEYIAAAGEWAEAHGKSDADWERWWRTDKGADDVKYVQFMGKDNVPFHTLSFPATLLGSGEPWKMVDHLKSFN

SEQ ID NO: 184810 - protein, 309 aa, Unknown
  Bacterial polypetide isolated from the Sargasso Sea
KLNGSVDDIDLNLEDFVQRINSDLVGKIVNIASRTASFITKNFNGGLADDVHDPALLAQFKATGKEISNLYENREFNKAVREITGLADLANQYIAKHEPWKLAKNPDKSSQLHLVCSQAIEMFRMLQIFLKPILPNSAAKAEEFLDTDPLLWADLDKPLFGKSIKPFKKLLDRIEIKTVMQLVKEPDQDGKSMLEENPSTIVHIGIEDFAKIDLRVAKIESAETVDGADKLLRLTLDVGNVKRTVFSGIKEAYKPEDLEGRLTVLVYNLAPRKMKFGVSEGMVLAAGPGGGDIFLLSPDSGATPGMIVS

SEQ ID NO: 184811 - protein, 270 aa, Unknown
  Bacterial polypetide isolated from the Sargasso Sea
YVWLDALTNYISALNYPNTKEKLFKSFWPASIHLIGKDILRFHAVYWPAFLLAAKIDLPKKVYGHGWILSGDEKMSKSKGNILDPIEIINEYGLDSLRYYLIKEVSFGNDGNISQERLEDCINSDLANNFGNLCQRVTAFAIKNCDSKIPKKIKFNEEDHKILNNYKDNIELIRKKIDNQDINFYINFIVNSLFEANKYFNDQEPWNKKEDLLRLNTIVFTTLEIVRKVSFLLYPIIPESSIKALKIFSINEADINLSSIENNNFLSKVD

SEQ ID NO: 184812 - protein, 250 aa, Unknown
  Bacterial polypetide isolated from the Sargasso Sea
LKANELGIKPEELIADVLEDHKSTYDLYSINFNNYYTTHSDENKQFSEQIYESAKKNNLISKSSVEQYFDEKEEMFLSDRFIKGTCPKCGAEDQHGDNCGVCGASYDILDLKNPISIISNSVPVRKKSDHIFFDLPQKKEMLKEFIKNVELQTSIKNKLNEWLDDDLKKWDISRDAPYFGFKIPDEIDKYFYVWLDAPIGYLASILNWADNNNLKMVDLWSEKSNYEIYHFIGKDIAYFHGLFWPALLSS

SEQ ID NO: 184813 - protein, 278 aa, Unknown
  Bacterial polypetide isolated from the Sargasso Sea
KPLLNHYKDNPDFISPKSRRNEVISFVKSGLKDLSVSRKSLSWGIPVPSNKDHVIYVWLDALTNYISALNYPDLNDKLFNKYWPASIHLIGKDILRFHAIYWPAFLLAAKISLPKKIYGHGWILSGEEKMSKSKGNILDPIEIINEYGLDPLRYYLIKEVSFGNDGNISQERLEDCINSDLANNFGNLCQRVTAFTIKNCNGKIPSKIEFEKDDLKILDKFKLNLDLIREKIDNQDLNYYIDFIVNSLFETNKYFNDQEPWKKKDNSTRLNTIVYTTL

SEQ ID NO: 184814 - protein, 278 aa, Unknown
  Bacterial polypetide isolated from the Sargasso Sea
HAKSVQNLWNVLEKKGEIYLSKYSGWYSVSDEAFYSESEIEDVDGVKKSISSGSNVEWVEEESYFFRLSKWQDKLIEFYSKNPNFILPETRKNEVISFVKSGLKDLSVSRKSFNWGIKVPTNNEHVIYVWLDALTNYLSALNYPNESDNLYKSFWPADLHLIGKDILRFHAIYWPAFLLAADIKPPKRVFGHGWILSGDEKMSKSKGNILDPLEIIDNYGLDPLRYYLIKEVSFGNDGNISQEKLELCINSDLANNYGNLCQRVLAFCEKNANYEVPE

SEQ ID NO: 184815 - protein, 300 aa, Unknown
  Bacterial polypetide isolated from the Sargasso Sea
LPDRYIEGTCPACGFEDARGDQCDSCTKQLDPTDLINPRSSISGATELEQRETKHLYLCQSNMKDNLENWIESKTDWPVLTTSIAKKWLHDGDGLQDRGITRDLDWGIPVKKGNSPWPGMEDKVFYVWFDAPIEYIACAQEWVNADKGNNWEKWWRTDKGADDVVYTQFMGKDNVPFHTLSFPATILGSGEPWKLVDYIKSFNYLNYDGGQFSTSRGRGVFMDDALDILPADYWRWWLLSHAPESSDSEFTWDNFQSSVNKDLADVSRHFVSRVTKFCRSKFGEEIPAGGDYGQAESSLI

SEQ ID NO: 184816 - protein, 310 aa, Unknown
  Bacterial polypetide isolated from the Sargasso Sea
MIFTHDDFIRTTEPRHKAACQAIWKRLFDAGDIYLGSYEGWYAVRDEAFYGEGELTTGPDGKRIASSGAEVEWIQEPSYFFRLSAWEDRLLQFYDDNPNFILPRTRRNEVISFVKGGLQDLSVSRTTFKWGVPVPSDDAHIVYVWLDALTNYITAVGFPETEADSFTQYWPADLHMVGKDILRFHAVYWPAFLMAAGLEPPKRIFAHGWWTNEGQKISKSVGNVIDPIELVNKYGLDQVRYFLLREVPFGNDGDFSQQAMVNRMNGELANDYGNLAQRVLSMIAKNCDRQVPAPDKFTVDDENLLAQAMA

SEQ ID NO: 184817 - protein, 272 aa, Unknown
  Bacterial polypetide isolated from the Sargasso Sea
TFNWGVPVPNNPKHVMYVWIDALCNYLTAVGYPDTNNHNYKQFWPATHIVGKDILRFHAVYWPAFLMAAGLEPPKRIFAHGWWTNEGQKISKSLGNIIDPYEIINEYGLDQIRFFLFREVPFGNDGDFSKKSISNRINADLSNNFGNLVQRISSFAVKNNDSLIKPSQNLTNDDQELINLLQIKYDEYCNFMENQQIDRAIKSVLELISAGNVYVDNQAPWLLKKSNKIRMEEVLYIICNIIIKSAIMLYPVIPNSSKKILNIFNYNIDKLR

SEQ ID NO: 184818 - protein, 243 aa, Unknown
  Bacterial polypetide isolated from the Sargasso Sea
MDKNYYITTPIYYPSAKPHMGHAYSSILADFFARFKKIQGFNVFFLTGTDEHGQKIQRAAQKKNMDPQSFCDEISENFRKLSKTLNLSNNDFIRTTEPRHSTSASKLWNILESNNEIYLSKYSGWYSVSDEAFYSEDEIKVLNGKKIAINSGSEVEWVEEESYFFRLSKWEKPLLDFYKKNPKFILPESRKNEVISFVKSGLKDLSVSRKSFSWGIKVPSNKDHVIYVWLDALQIILVHSITQ

SEQ ID NO: 184819 - protein, 304 aa, Unknown
  Bacterial polypetide isolated from the Sargasso Sea
KTFYITTPIYYPSGKPHMGHAYSSIVADFFARFKRIQGHKVFFLTGTDEHGQKIQRSAEKAKMDPQTFCDQISKTFFNLSKVLNLSNDDFIRTTENRHKKSVLNLWKILEKKNEIYLSKYSGWYSVSDEAFYSDDEIEEIDNKKVSKSSGSLVEWVEEESYFFKLSKWQKSLLNFYNENPNFILPESRKNEVISFVKSGLKDLSVSRKSFSWGIQVPSNKDHVIYVWLDALTNYLSALNYPNTNDNLYKNFWPASLHLIGKDILRFHAIYWPAFLLAAEIPLPKRIYGHGWILSNEQKMSKSKG

SEQ ID NO: 184820 - protein, 281 aa, Unknown
  Bacterial polypetide isolated from the Sargasso Sea
NKDPKSFCDEISKTFEDLTKTLNLSNTDFIRTTEDRHKVSVQNLWNILEKNNQIFLSKYSGWYSVSDEAFYNEDEVEEKDGLKVAKSSGSAVEWVEEESFFFKLSEWEKPLLDFYEKNKNFILPESRRNEVISFVKSGLKDLSVSRKTFSWGVKVPSDENHVVYVWLDALTNYLSSLKFPDENNELYKSFWPADLHIIGKDILRFHAIYWPAFLLAAKIEPPKRVYGHGWILSGDEKMSKSKGNILDPLEIINIYGLDPLRYYLLKEVSFGNDGNISEEKL

SEQ ID NO: 184821 - protein, 257 aa, Unknown
  Bacterial polypetide isolated from the Sargasso Sea
NIAKLYEELDYSKAVRLIMSRADLANKYINEKQPWVVAKDNPQSTELQGICSTGINAFRLLIIYIKPVLPAIAEKAESFLNVQPLNWEDIESILTNHTIGKFEALVHRVELDKVGIMVEETKSAFQAKENMNSESNEFENIFEPEISVDDFFKIDLRVARIISATQVEGADKLLKLKLDLGQDEEGQPVERTVFSGIKSAYEPEKMMGMLTVVVANLKPRKMKFGVSEGMILAAGPGGKDIWLIEPHTGASPGMRVT

SEQ ID NO: 184822 - protein, 108 aa, Unknown
  Bacterial polypetide isolated from the Sargasso Sea
MNFYITTPIYYTNDIPHIGHAYTTIACDILARFNKLSNNQVFFLTGTDEHGQKVEKAANEANLDPQKFVDQLSLNFEKLVPELGCEVNDFIRTTEKRHILSSQAFGIN

SEQ ID NO: 184823 - protein, 301 aa, Unknown
  Bacterial polypetide isolated from the Sargasso Sea
ALGWLRDEGLIDRAITRDLDWGVELPVDDLGEGKRIYVWYDAVIGYLSASKEWAERQGTPDRWKHWWHNDKSRHVYFIGKDNIPFHALFWPAQLMAVGEQVAGKELHLPDDIPANQYVTFKGGKASASRGVGMTIEEGLQHFQADALRYALASNFPEQADTEISYEEIVRRINEELVANWGNLVNRVLSMTHKTCGGAVAEPGELTKDDTALLAFIDRSLEESAELFEIVELRAALRKGMEAAQAANRYLNATEPWKLAKTDLGRAQTILFVALSAINGIRVMLSPFLPFTSEKLNDLLGH

SEQ ID NO: 184824 - protein, 299 aa, Unknown
  Bacterial polypetide isolated from the Sargasso Sea
EELEVKPEQLIARIYESHIKTFNSYNIKHDNYHTTHSEENRILSERIFNELNEKGLIEVKTIEQLYDNSRNMFLSDRYVKGTCPKCLAEDQYGDNCEICSATYEATELIDPVSVLSKTTPVIKESDHLFFKLSALKVEIKNWLESSKIQSPVKNKLSEWLEEDLRDWDISRDSPYFGFKIPGYEDKYFYVWLDAPIGYLASHINYLEKQNSEEFEQFWDPNSNSEIYHFIGKDIMYFHTLFFPVMLSNAGFKMPSGVFVHGFVMLDGEKMSKSRGNFISADDFVTVLDPEYLRYYFASK

SEQ ID NO: 184825 - protein, 284 aa, Unknown
  Bacterial polypetide isolated from the Sargasso Sea
SVNEMWTRLVNSGDIYLDKYKGWYSISDEAYYDESEIEDNEGVKTSKVSGSKVDWVEEESYFFKLSAWEKPLLDHIKENPEFILPKSRKNEVVNFIEKGLKDLSVSRTSFSWGIPVPKNNKHVIYVWLDALTNYISALNFPNVTDKLFKSFWPADLHVIGKDILRFHAIYWPAFLMAAKLPIPRRIFGHGWILSDDKKMSKSIGNILDPIEIINKFGIDQLRYYLIKEVSLGNDGNVSMENLKNCINNDLANNFGNLCQRVFSFIEKNCDNRIPKPIKLSETRY

SEQ ID NO: 184826 - protein, 181 aa, Unknown
  Bacterial polypetide isolated from the Sargasso Sea
MVNKEKKFYITTPIYYVNDVPHIGHAYTTVICDTIANFNKWLGNEVNFLTGTDEHGQKVEKSALKANMDPQTFTDNVSTSFKKLASKLEINNTDFIRTTEDRHIKSVKHLWNVLVNKGDIYIDKYSGWYSIRDEAFYSNDEIIEDKNGKKLAPNGSEVEWLEEPSYFFKLSSWQDKLLKFY

SEQ ID NO: 184827 - protein, 291 aa, Unknown
  Bacterial polypetide isolated from the Sargasso Sea
MIEVRTIEQFFDPEKNMFLPDRYIKGECPKCHAKDQYGDNCEVCGTVYAPTDLINPFSALSGAKPELKHSEHFFFKLSDPRCVEFLENWTQDGKLQPEVANKIKEWFTVRTNPDGTTSEGLGDWDISRDAPYFGIEIPDAPGKYFYVWLDAPVGYLASLKNLLEKRGESYDAYMADPAMEQYHFIGKDIVTFHTLFWPAMLHFSGRKTPNNVFVHGFLTVNNGEKMSKSRGTGLDPLKYLSLGMNAEWLRYYLAAKLSARNEDIDFNAEDFMLRVNSDLIGKYVNIASRAA

SEQ ID NO: 184828 - protein, 289 aa, Unknown
  Bacterial polypetide isolated from the Sargasso Sea
SIIADIFARFKRIDGFNVMFLTGTDEHGLKMQREAEKKSKDIKLFCDELSLKFKDLTKTLNLSNDDFIRTTEKRHHKSVLDIWSRLEKSKDIYLSKYKGWYSVSDEAYYDEDEIETKNNIKYSKSSGSKVEWVEEESYFFKLSSWQDKLLKLYEKDNPKFILPSSRKNEVVQFVKKGLKDLSVSRTSFSWGIPVPKNSKHVIYVWLDALTNYLSALNFPNTTDKKYKTFWPADVHVIGKDILRFHAIYWPAFLMAAKIPVPKRVYGHGWILSDEKKMSKSLGNILDPIE

SEQ ID NO: 184829 - protein, 257 aa, Unknown
  Bacterial polypetide isolated from the Sargasso Sea
MNEFFYITTPIYYVNSHPHIGHAYTTIATDVLTRYMKLFGAETYFLTGTDEHGQKIAESAANSGIEPKEFVDKISQEFRELWPNLHIEHDQFIRTTDSNHKACVQRILQKIFDQGEIYLKEYEGLYCIGCERFFDESELENGNCPDHQTPPEFYKEQNYFFKMSSYQKWLTKELNQNEDWIYPGRYRNELIQFLKDPLQDLCISRPKSRLKWGIELPFDNKFVTYVWFDALLNYVSALDWPDGEKYKKFWPHVNHTI

SEQ ID NO: 184830 - protein, 213 aa, Unknown
  Bacterial polypetide isolated from the Sargasso Sea
MNNSFYISTPIYYVNDKPHIGHAYTTILADVIARFYRQLNYDTFFLTGLDEHGQKVQEAASNRKVEPQDHCNEMAPRFTELWEKLHISNDDFIRTTEERHKKVVQEFLQLVFDKGDIYKDEYTGLYSVSEERFITEKEAESGIFRDIKELKEINYFFKMSNFQTQLIEHIENNNNFIQPAHRKNEILGFLKQPLSDLCISRPKSRLNWGIELP

SEQ ID NO: 184831 - protein, 145 aa, Unknown
  Bacterial polypetide isolated from the Sargasso Sea
MSTTPRNILVTSALPYANAPLHLGHMLEQAQTDIWVRFQRSRGHHCRYVCADDAHGTAIMLSAEAANRTPKEHIAAIQAQHEQDSAGFLIQFDHYHSTHSPENQRWSETIFKRLEAGGHIAVRDITQAYDPEKGLFLADRFIKGT

SEQ ID NO: 184832 - protein, 269 aa, Unknown
  Bacterial polypetide isolated from the Sargasso Sea
MAKNYKRHTITSALPYANGPVHIGHLAGVYVPADIYARYLRCKGEDVAFIGGSDEHGVAIELRARKEGKTPQQIVDFYHNQIKDSFEKFGISFDVYSRTSKQIHHETASEYFKKLHAEGKFTEEVSQQFYDESEKQFLADRYIKGTCPNCGFEEAYGDQCENCGSTLSPAELKNPKSMLSGNAPILKETKHWYLPMDQYEPWLKEWLLEGHKEWKPNVYGQCKSWIDNGLKPRPMTRDLKWGIPVPVDGGDGKVLYVWFDAPIGYISAT

SEQ ID NO: 184833 - protein, 169 aa, Unknown
  Bacterial polypetide isolated from the Sargasso Sea
MNFYITTPIYYTNDIPHIGHAYTSIACDIIARYNKLLGNNVFFLTGTDEHGQKVEKAAINSNLKPKDFVDKLSVNFINLIPFLGCEIDDFIRTTEERHIKASQEMWRQLEKNNQIYLSNYEGWYSVRDEAFYLENELKKVNDKYVTDNGSPVEWVKEESYFFKLSEWQD

SEQ ID NO: 184834 - protein, 272 aa, Unknown
  Bacterial polypetide isolated from the Sargasso Sea
KAGKEPQIFCDQISQTFRDLSDTLNLSNTDFIRTTEARHKKTVQYLWNELEKNDDIYLSNYSGWYSVSDEAFYNEDEIEDVDGKKIAISSKSSVEWIEEESYFFRLSKWQKPLLEYYEANPEFILPESRRNEVISFVKGGLKDLSVSRKSFSWGIPVPNNKNHVIYVWLDALTNYLSALNYPNIKDDLFKKYWPASLHLIGKDILRFHAVYWPAFLLAAKIQLPKKVYGHGWILSGEEKMSKSKGNILDPKKIIKEYGIDPLRYYLIKEVSF

SEQ ID NO: 184835 - protein, 295 aa, Unknown
  Bacterial polypetide isolated from the Sargasso Sea
RSMLQKKDLMTRILITSALPYINGVKHLGNLVGSQLPADAFARFMRLKKYNVLFICATDEHGTPAELAAAEANMEINEFCSLMWKSQKKLSDGFNLSFDYFGRSSSKENHKLTQNFAKALHANNLIEEVIEKQIFSLEDNRFLPDRYIEGTCPNCGYNKARGDQCESCTKQLNPTDLIDPKSAISGSKNLEIRETKHLYLKQSNIKEKLEDWISKKTDWPILATSIAKKWLTDGEGLKDRGITRDLKWGIPVKKGSELWPGLEDKVFYVWFDAPIGYIAATEEWEKSNKIKSGTW

SEQ ID NO: 184836 - protein, 296 aa, Unknown
  Bacterial polypetide isolated from the Sargasso Sea
MNLSNTDFIRTTEVRHKKTVQHLWNQLEKNDDIYLSNYSGWYSVSDEAFYSEDEIEELDGKKIAISSKSPVEWIEEESYFFRLSKWEKPLLDYYEANPDFIFPQSRKNEVISFVKNGLKDLSVSRKSFSWGIPVPNNKNHVIYVWLDALTNYLSALNYPNIDDDLFKKFWPVSIHLIGKDILRFHAVYWPAFLLAAKIELPKRVYGHGWILSGEEKMSKSKGNILDPLEIIKQYGLDPLRFYLIKEVSFGNDGNISQERLEDCINSDLANNYGNLCQRVTTFAIKNCDGKIPSEIK

SEQ ID NO: 184837 - protein, 291 aa, Unknown
  Bacterial polypetide isolated from the Sargasso Sea
YYEKNPESILPKTRYNEVLSFIKGGLKDLSISRTTFNWGVPVPNNSKHVMYVWIDALCNYLTAIGYPDTNNNNYKKFWPATHIVGKDILRFHAVYWPAFLMAAGIEPPKRIFAHGWWTNEGQKISKSLGNVIDPYEIINEYGLDQIRFFLFREVPFGNDGDFSKQAIANRINADLSNNFGNLVQRISSFVVKNNDSILKPTENLTNDDQDLINILQNKFDEYCKFMNNQQIDRAIKSVLELISSGNAYVDTQAPWTLKKTNKIRMEEVLYIVTNIIIKSAIMLYPIIQTSS

SEQ ID NO: 184838 - protein, 146 aa, Unknown
  Bacterial polypetide isolated from the Sargasso Sea
MKNFFITTPIYYINSDPHIGHAYTSIACDILSRYNKINGKNVYFLTGTDEHGQKVEKAALDQSLKPKIFADKMSKKFQDLTNFLNCEINDFIRTTEQRHKVAATALWNKLLENDQIYLSTYEGWYSVRDEAFYSEDELSKKNNKMY

SEQ ID NO: 184839 - protein, 280 aa, Unknown
  Bacterial polypetide isolated from the Sargasso Sea
ESFFFKLSSWEKRLLEFYDKNKKFILPASRRNEVINFVKSGLKDLSVSRTSFTWGIKVPENDKHVIYVWLDALTNYLSALNYPDINSKLYKDFWPASLHVIGKDILRFHAIYWPAFLLAAKIEPPIRVFGHGWILSGDEKMSKSKGNILNPIEIIEKYGIDELRYYLMKEVSHGTDGSISLKSLENCINSDLANNYGNLCQRVFSFIRNNCSNKVTKSPKLTDSDKTLIEKTKQLTKNLDELMDNQNLNSYLKSVIEISFLTNKYVNDEEPWKLKKKDED

SEQ ID NO: 184840 - protein, 296 aa, Unknown
  Bacterial polypetide isolated from the Sargasso Sea
ELTKTENGFTAPSGSPVEWVKEESYFFKLSEWENKLIDFYEKNKEAILPKSRYNEVISFIKGGLKDLSISRTTFKWGIKVPEETNHVMYVWIDALCNYITALNYPDINNDSFKKFWPGIHIVGKDILRFHAVYWPAFLMAADLEPPKKIFAHGWWTNEGQKISKSLGNVINPYEIIDQYGLDQIRFFLFREVPFGNDGDFSKDAIAQRVNADLSNNFGNLIQRIASFIIKNTNAEVSKPKKIEEKDDHLIQEFNRTFSNYLNNMDNFQIDKALKNIFEYLSDVNAYVDEQAPWSLK

SEQ ID NO: 184841 - protein, 288 aa, Unknown
  Bacterial polypetide isolated from the Sargasso Sea
MNKYFFITTPIYYPSARPHMGHAYSSIVSDVIARFKRLDGYNVEFLTGTDEHGLKIQRAAEKNGIDPKKFCDEISETFRGLSKILNLSNTDFIRTTENRHIKSVQNLWKVLESKDEIYLSNYSGWYSVSDEAFYSEDEIIKENSINVSKNSGSKVEWVEEESYFFKLSKWQDKLLKFYDENPEFILPNSRRNEVINFVKSGLKDLSISRKSFSWGIKVPNNNNHVIYVWLDALTNYISALNYPDTKDKKYKNFWPADIHMIGKDILRFHAVYWPAFLLAADLPPPKKI

SEQ ID NO: 184842 - protein, 303 aa, Unknown
  Bacterial polypetide isolated from the Sargasso Sea
YSEEEIDTIGDQKKSKVSGSIVEWIEEESYFFRLSKWQEPLLKFYSENPNFILPESRKNEVISFVKSGLKDLSVSRKSFSWGIKVPSNKDHVIYVWLDALTNYLSALNYPDTNDKLYKNYWPADLHLIGKDILRFHAVYWPAFLLAANIPPPKRVYGHGWILSGEEKMSKSKGNILDPIEIIKNYGLDPLRYYLLKEVSFGNDGNISKEKLESCINSDLANNFGNLCQRVIAFTEINLKLKIPDKYEFNKDDISILNSYSSNYEKLIDHVDSQNLNNYMNFIQEQLFLANKYFNDQEPGIKNQ

SEQ ID NO: 184843 - protein, 288 aa, Unknown
  Bacterial polypetide isolated from the Sargasso Sea
TLFWFSIPGEEEKFFYVWMDAPIGYLASLKNWCDESKLSNIEDYWAHNSSAEVHHFIGKDIINFHALFWPAVLEGSGFRKPTKVHVHGFLTVNGVKMSKSRGTFITAKTYSELLDPEYLRYYLAAKLNGSVDDVDFNLEDFVLRTNSDLVGKVINIASRCSGFIEKNFENTLSNNIDNQVLLDDLLAQTETIASYYEQNDTSKAVREIMSLADLCNQYIAEKQPWKIIKDKNRVDEVQQVCSLGINLFRILMAYLKPILPELASKAEVFLNCAPLDWSNIDQPLLKHK

SEQ ID NO: 184844 - protein, 134 aa, Unknown
  Bacterial polypetide isolated from the Sargasso Sea
MRKILVTSALPYANGSIHLGHLVEYLQTDIWVRNQKMSGNTCYYICADDAHGTPIMLKAKELDVKPEELIQKTYQEHVKDFEDFGIEFDNYYTTHSEENREYSEFIYNSLKDNGDIKSQEIEQFYDESAKMFLP

SEQ ID NO: 184845 - protein, 253 aa, Unknown
  Bacterial polypetide isolated from the Sargasso Sea
DKREILVTSALPYANGELHLGHMLEQIQTDIWVRYQKLIGNECTYVCADDAHGTPIMLRAEELGIDPEHLISDVYENHLRDSKGFLIDQDNYHSTHSDENKYFSELIFERCKEKGYILEKEIDQLFDIEKQIFLSDRYVKGICPSCGAKDQYGDNCEVCGKTYLATDLIDPISTLSDTIPEVKKSLHLFFALSQLNDEAKSWFKSSKVQKQALNKLNEWIDDLRDWDISRDAPYFGFEIPNYPNKYFYVWLDA

SEQ ID NO: 184846 - protein, 106 aa, Unknown
  Bacterial polypetide isolated from the Sargasso Sea
MTYFITTPIYYVNDAPHIGHAYTTIACDILSRYNKLKGDKTFFLTGTDEHGQKVEKAALSKKKDTQNFVDEMSQNFRDLVPFLGCQIDDFIRTTEERHKIATPIFM

SEQ ID NO: 184847 - protein, 260 aa, Unknown
  Bacterial polypetide isolated from the Sargasso Sea
MPRKIFVTSALPNANGPIHLGHMLEHIQTDIWVRFQRMRGHEVIYACADDTHGTATMLKAEEEDTTPEELIERVRVEHQLDFENFLVSHDNYYSTHSQENQYYSELIYTKLKEKGLIIKKDVEQLFDKHKGLFLADRFIKGTCPKCHAEDQYGDNCQVCGATYDATELLNSRSVYSGEPPELKKSEHFFFDLAQFGEFLKDWLSQNPVRNEVANKLREWLEDGLRPWDISRDAPYFGFQIPGEDEKFFYVWMDAPHWVPG

SEQ ID NO: 184848 - protein, 292 aa, Unknown
  Bacterial polypetide isolated from the Sargasso Sea
ETSPGPPGEDYFFRMSAYQEWLIGLLEENKDLVQPARYRNELLSFLKAPLQDLCISRPKSRLEWGIDLPFDNDFVTYVWFDALLNYVTALGWPEDSRYEHFWTHCHHVIGKDILKTHGIYWPCMLKAAGFPVFKKLAVHGHWVVQGSKMSKSLGNVVNPLEMKDLIGVDGLRYFLLREMSYGEDANFTEDLVFARYHGELSNNFGNLLNRSISMSRKNFENVVPPRGEPGKQEIELYQMFEQETSQIKAWVQQFEPHRALERIAMMSSAVNKYLDENKPWKLAKEEDQNERL

SEQ ID NO: 184849 - protein, 319 aa, Unknown
  Bacterial polypetide isolated from the Sargasso Sea
MKPFYITTPIYYVNDKPHIGHAYTTILADVLARHYRNIGRDVFLLTGLDEHGQKVQQAAESRNINPKQHCDEMAPRFLNLWEKLHISYDDFIRTTEKRHTDIVKYFLQKVYDRGDIYEDSYEGLYSISEERFITEKEAESGDFRDIKELKEKNYFFKMSKYQSKLIKHIEENPSFIQPKFRRNEVLGFLRSPLEDLCISRPKSRLSWGIEMPFDSNYVTYVWFDALINYVSAIGFNSDEKKYKTLWPVNYHLIGKDILTTHSVYWPTMLMSAGIKLPKSIFAHGWWLSDQSKMSKSLGNVIDPLKLIETYGVDPVRFYL

SEQ ID NO: 184850 - protein, 258 aa, Unknown
  Bacterial polypetide isolated from the Sargasso Sea
MTGSDKKRFYVTTPIYYVNDKPHIGHAYTTLACDVLARFKRLDGFEVMFLTGTDEHGQKVEKAATDKGVTPQAFTDSVSQNFRDLTFRMNFSNDDFIRTTEARHRAACQKLWSILLERGHITLGSYAGWYAVRDEAFYTETEIVDGKAPTGAPVEWVEEPSYFFNLSHWQEPLLEFYEANPDFVGPASRFNEVKSFVSGGLRDLSVSRASFSWGVPVPDDDAHVMYVWLDALTNYLTATGLARGRRFRRQGQGTSVSG

SEQ ID NO: 184851 - protein, 166 aa, Unknown
  Bacterial polypetide isolated from the Sargasso Sea
TKSISWGIKVPNNDKHVIYVWLDALTNYLSSLKYPDTKNKLYKDFWPAHLHLIGKDILRFHAIYWPAFLLATKIPLPKKIYGHGWILSGDEKMSKSKGNILYPLEIIDNYGLHPLRYYLIKEVSFGSDGNISKDKLENCINSDLANNFGNLCQRVVSFNEKNFSLS

SEQ ID NO: 184852 - protein, 225 aa, Unknown
  Bacterial polypetide isolated from the Sargasso Sea
QTLNLSNNDFIITTEERHKKSAKNIWNILEKKGEIYLSKYSGWYSVSDEAFYTDDEIEEVNGFKQCKISGSKVEWVEEESYFFKLSKWEKTLIKFYEDNPYFILPISRKNEVVSFVKGGLKDLSVSRKSFKWGIPVPTNDQHVMYVWLDALTNYLSALNYPNEKDELYKNFWPADLHVIGKDILRFHAVYWPAFLLAADIKPPKRVYGHGWILSGDQKMSKSKGN

SEQ ID NO: 184853 - protein, 250 aa, Unknown
  Bacterial polypetide isolated from the Sargasso Sea
MLKAEELNKEPEDLIEEIYANHVNTFNLYNINHDNFHTTHSEENRTLSERIFNALNEKGLIEIRTIEQLYDTSRNMFLSDRYVKGTCPKCYAEDQYGDNCEVCSATYDAIELIDPFSVLSNTSPVIKESEHLFFKLSELKQEIVEWLKGSKIQNPVQNKLAEWLDEDLKDWDISRDSPYFGFEIPGHKDKFFYVWLDAPIGYLASHINYLNKQNSNEFENFWNPESNSEIYHFIGKDIMYFHTLFFPVML

SEQ ID NO: 184854 - protein, 178 aa, Unknown
  Bacterial polypetide isolated from the Sargasso Sea
MKAKKQILVTSALPYANGPIHLGHLVEYIQTDIWVRYQRSIGQDVIYICSDDAHGTPIMLKAKELGISPEELILETKKQHEKDFKEFFVDFDHYSSTNSEKNKELCENIFNKLNAAGHISKKEISQFYDNEEKIFLPDRYIKGTCPKCKAPDQYGDSCESCGATYSPTDLIDPKSILS

SEQ ID NO: 184855 - protein, 226 aa, Unknown
  Bacterial polypetide isolated from the Sargasso Sea
MKDNFYITTPIYYPSAKPHMGHAYSSIVADFFARLKRIQGHKVFFLTGTDEHGQKIQRAAEKSKKDPLKFCDEISKTFRNLSSLLNLSNDDFIRTTEKRHASAVTNLWNILEKKEEIYLSKYSGWYSVPDEAFYNEDEIEDLNKKKISKSSGSHVEWVEEESYFFKLSKWQEPLLKFYSENPKFILPESRKNEVISFVKSGLKDLSVSRKSFSWGIKVPSNKDHVI

SEQ ID NO: 184856 - protein, 312 aa, Unknown
  Bacterial polypetide isolated from the Sargasso Sea
NEMGIKPEELISDVYKDHKSSYELYGINFANFYSTHSDENRKYSEYIYECAKNNNLISKANIEQYYDEKEEMFLSDRFIKGTCPKCGAEDQHGDNCGVCGASYNVLDVKKPISIISNTVPIKKESEHIFFDLPQKNKMLKDFLKNVDLQKSIKNKLNEWLNDDLKKWDISRDAPYFGFEIPGEKDKYFYVWVDAPIGYLASISNWAEKSKLNMQDLWSENSEYEIYHFIGKDIAYFHGLFWPALLSAANLKLPSGINVHGFLTINGEKMSKSKGTGILAKEFAEITNPETLRYYFAAKLNNKVEDIDLNFDD

SEQ ID NO: 184857 - protein, 299 aa, Unknown
  Bacterial polypetide isolated from the Sargasso Sea
FIRTTEQRHIKSVQHLWKILEDQNQIYMSKYEGWYSVSDEAFYQPDEIESKENKHFVISSGSPVEWVEEESFFFKLSEWEKPLLKFYDENPKFILPEGRRNEVISFVKNGLKDLSVSRKTFSWGIKIPSNNDHIIYVWLDALTNYLSALNYPNTKDELYKNFWPADVHIIGKDILRFHAIYWPAFLMAAKLPLPKRVYGHGWILSGDEKMSKSKGNILDPLEIIDVYGLDTLRYYLLKEVSFGNDGNISQEKLESCINSDLANNYGNLCQRVLAFCEKNCGSKIPTSDFINDDLEILKN

SEQ ID NO: 184858 - protein, 261 aa, Unknown
  Bacterial polypetide isolated from the Sargasso Sea
DEAFYLENELKKIDGKYFTDNGSPVEWVKEESYFFKLSEWQNKLIDYYEKNPESILPKTRYNEVLSFIKGGLKDLSISRTTFNWGVPVPNNSKHVMYVWIDALCNYLTAIGYPDINNKNYKQFWPATHIVGKDILRFHAVYWPAFLMAAGIEPPKRIFAHGWWTNEGQKISKSLGNVIDPYEIIDEYGLDQIRFFLFREVPFGNDGDFSKKAIANRINADLSNNFGNLVQRISSFAVKNNDSILKPAENLTNEDQDLINIL

SEQ ID NO: 184859 - protein, 268 aa, Unknown
  Bacterial polypetide isolated from the Sargasso Sea
MKPFYITTPIYYVNDKPHIGHAYTTILADVLARHYRNIGRDVFLLTGLDEHGQKVQQAAESRNINPKQHCDEMAPRFLKLWDKLHISYDDFIRTTEKRHTDIVKYFLQKVYDKGDIYEDSYEGLYSVSEERFITEKEAESGDFRDIKELKEKNYFFKMSKYQNKLIKHIEENPSFIQPKFRRNEVLGFLRSPLEDLCISRPKSRLSWGIEMPFDSNYVTYVWFDALINYVSAIGLNSDEKKYKTFWPVNYHLIGKDILTTHSVYWPTM

SEQ ID NO: 184860 - protein, 175 aa, Unknown
  Bacterial polypetide isolated from the Sargasso Sea
MENRKILVTSALPYANGPIHIGHLVEYIQTDIWVRFQKMCGHECYYICASDAHGTPIMLKAEEEGISPETLVTKTREEHLEHFSGFSIEFDNFHTTHSDENKQIVEQIYSSLLDEGHIKKRPVQQFFDPVKSMFLPDRFIRGSCPSCGAPDQYGDSCEKCGSTYSPLDLIDPRSV

SEQ ID NO: 184861 - protein, 261 aa, Unknown
  Bacterial polypetide isolated from the Sargasso Sea
VHFLTGTDEHGQKIQRAAEKQGKDPLSFCNEISLTFRNLSKTLNLSNDDFIRTTEDRHIKSVQNLWNILEKKGEIYLSKYSGWYSVSDEAFYSEDEIDSKDGNKVSKLSGSPVEWVEEESYFFKLSKWQKPLLKLYTDNPNFILPETRKNEVVSFVKSGLKDLSVSRKSFTWGIKVPSNKDHVIYVWLDALTNYLSALNYPDTESSLYKNFWPATIHLIGKDILRFHAVYWPAFLLAANLPVPIRVYGHGWILAGDEKMSK

SEQ ID NO: 184862 - protein, 315 aa, Unknown
  Bacterial polypetide isolated from the Sargasso Sea
KNFCDEISETFRSLTNTLNLTNNDFIRTTEARHYKSVNEIWKRLVKSGDIYLDKYSGWYSVSDEAYYDEDEIEEKDGKKISKSSGSLVEWVEEESYFFKLSAFQKKLLNYYKENKDFILPQSRRNEVVSFVEKGLNDLSISRTSFSWGIPVPENKKHIIYVWLDALTNYLSALNFPNTEDEKYKSFWPADVHIIGKDILRFHAIYWPAFLFAAKLPLPKRVFGHGWILSDDKKMSKSLGNILDPIEIIKNYGIDQLRYYLIKEVSLGNDGSISMENLKNCINNDLANNYGNLCQESILIYKKKFVITKLPKNLII

SEQ ID NO: 184863 - protein, 67 aa, Unknown
  Bacterial polypetide isolated from the Sargasso Sea
MRKILVTSALPYANGSIHLGHLVEYLQTDIWVRNQKMSGNTCYYICADDAHGTPIMLKAKELDVKPE

SEQ ID NO: 184864 - protein, 303 aa, Unknown
  Bacterial polypetide isolated from the Sargasso Sea
KQNGHISLGKYEGWYSVRDEAFYTETELVDGKAPTGAPVEWVEEPSYFFNLSTWQDKLLEFYDKNPQFVGPESRFNEVKSFVKGGLRDLSVSRASFKWGVPVPDDDNHVMYVWLDALTNYLTATGWPVDGPTGDQEKHDRLWPADLHMVGKDILRFHAVYWPAFLMAANLPLPKRIYAHGWWTNDGQKISKSLGNAIDPIKLAESFGLDQTRYFLMREVPFGNDGDFSVQAMTQRMNGDLANDLGNLSQRVLSMIFKNCDGMMPSFPDILNEEDQQLIQSADALLSNVRHHIDNQAFHEALRV

SEQ ID NO: 184865 - protein, 284 aa, Unknown
  Bacterial polypetide isolated from the Sargasso Sea
MSKNFRDLIPYLGCEIDDFIRTTEERHKIAVQSLWNKLKENNQIYLSNYEGWYSVRDEAYYLETELKKNENGNRVAPSGAPVEWVKEESYFFKLSQWQDKLIKYYESNKEAIVPKSRYNEVLSFIKGGLKDLSISRTTFKWGIKVPEDDNHVMYVWIDALCNYLTALNYPDKNNEDFKKFWPGIHIVGKDILRFHAVYWPAFLMAANMEPPKQIFAHGWWTNEGQKISKSVGNIINPYEIIDEYGLDQIRFFLFREVPFGNDGDFSKALFHHEIMQTYPIIMGN

SEQ ID NO: 184866 - protein, 296 aa, Unknown
  Bacterial polypetide isolated from the Sargasso Sea
SEQLHHHTAQEFFKKLWEEEKFVEKKSEQYFDQKNQQFLADRYITGTCPKCGYNHAYGDQCESCGADLSPMDLISPKSTLSGDIPIIKETKHWYLPMNRHEDWLKKWVKDGVLDGKSVHDPKEWRNQVVGQCLSWIDGGLKPRAMTRDLDWGVKVPIKGNEEKVLYVWLDAPIGYISATKQWAIENKKDWKKYWCKDEAGDRKLVHFIGKDNIVFHAIIFPILLKDHGGFILPHNVPSSEFLNLEGRKFSTSKNWAVWLHEYMERYPEKGDELRYVLTSIAPESKDAEFTWKEYQA

SEQ ID NO: 184867 - protein, 83 aa, Unknown
  Bacterial polypetide isolated from the Sargasso Sea
MDNFYITTPIYYVNDRPHIGHAYTSIACDILARYYKLKNFNVYFLSGTDEHGQKVEKASKESKMDTQDFVDKMSVSFRELIPF

SEQ ID NO: 184868 - protein, 260 aa, Unknown
  Bacterial polypetide isolated from the Sargasso Sea
FYLENELKKIDGKFVTDNGSPVEWVKEESYFFKLSEWQDKLINYYEKNPESILPKTRYNEVLSFIKSGLKDLSISRTTFKWGVPVPNNSKHVMYVWIDALCNYLTAIGYPDTNNKNYKQFWPATHIVGKDILRFHAVYWPAFLMAAGIEPPKRIFAHGWWTNEGEKISKSLGNVIDPYEIINEYGLDQIRFFLFREVPFGNDGDFSKKAIANRINADLSNNFGNLVQRISSFVVNNNDSLIKPAENITNDDQDLINILQR

SEQ ID NO: 184869 - protein, 180 aa, Unknown
  Bacterial polypetide isolated from the Sargasso Sea
MNFYITTPIYYTNDIPHIGHAYTSIACDIIARYNKLLGNNVFFLTGTDEHGQKVEKAAINSNLKPKEFVDKLSVNFINLIPFLGCEIDDFIRTTEERHIKAAQELWKQLEKNNQIYLSNYEGWYSVRDEAFYLENELKKVDGKYVTDNGSPVEWVKEESYFFKLSEWQDKLINYYEKNPE

SEQ ID NO: 184870 - protein, 275 aa, Unknown
  Bacterial polypetide isolated from the Sargasso Sea
MDKKFYITTPIYYPSAKPHMGHAYSSLIADFFARFKRMDDHEVYFLTGTDEHGLKIQRSAEKQNLDPLKFCDEISKIFRELTKILNLTNTDFIRTTEERHKKSVQHLWSQLEKNDDIYLSKYSGWYSVSDEAFYNEDEIEELDGKKIAISSKSLVEWIEEESYFFRLSKWQKPLLDYYKSHPNFISPESRKNEVISFVKSGLKDLSVSRKTFSWGIKVPGNDDHVIYVWLDALTNYLSALNYPDVNNKLYKDFWPASIHLIGKDILRFHAIYWPA

SEQ ID NO: 184871 - protein, 239 aa, Unknown
  Bacterial polypetide isolated from the Sargasso Sea
MDNPKNKRKILVTQALPYANAPLHLGHILEAVQTDIWVRFQNLNNNECHFFCADDTHGTPVMLKANEMAISPEELIENVYVDHKSTYKLYDINFANFYSTHSEENKKFSELIYNSAKSNNLISKATIEQYFDEKEKMFLSDRFIKGTCPKCGADDQNGDSCNECGASYEIQDLKNPKSILSGTAPIKRESEHIFFDLPQKTEMLKNFLKTVQLQESIKNKLNEWLGDDLKKWDISRDAP

SEQ ID NO: 184872 - protein, 262 aa, Unknown
  Bacterial polypetide isolated from the Sargasso Sea
FFFKLSEWEKPLLEFYDKNKNFILPESRRNEVISFVKSGLKDLSVSRKTFSWGIKVPNDEAHVVYVWLDALTNYLSSLKYPDEDNNLFKNFWPADLHIIGKDILRFHAIYWPAFLLAANIKPPKRVYGHGWILSGDEKMSKSKGNILDPLEIIKNYGLDSLRYYLLKEVSFGNDGNISEDKLENCINSDLANNYGNLCQRVLSFAEKNCSSLIPKHEFVNEDLIILNSITNLDKIRYFIDNQDINQYMSFIVDCLFASNKYF

SEQ ID NO: 184873 - protein, 302 aa, Unknown
  Bacterial polypetide isolated from the Sargasso Sea
KWLDNSRIQESVRNKLNEWLEGELKDWDISRDNPYFGFKIPGYEDKFFYVWLDAPIGYLASHLNYLKNRDLEAKFEDFWNPNSDKEIYHFIGKDIMYFHALFFPMMLSNADFKTPNGLFVHGFLTLNGQKMSKSRGNFISAENYIENLDPDYLRYFFASKLGIGVDDIDLNLEDFKQKTNSDLVNKYANIASRTAKFINKYYDSNLADELDSPEILDEFIEVSSKVAQFYENLEFSKAIREIMSLADKANQYVDSKEPWVLIKQEGNEQAVQSICTTAINLFRILTIMLHPGYSKVLLIKRQ

SEQ ID NO: 184874 - protein, 310 aa, Unknown
  Bacterial polypetide isolated from the Sargasso Sea
WYSVSDEAFYTESEIEDLDGTKKSISSGSKVEWVEEESYFFKLSNWQDKLIEFYNKNPDFILPETRKNEVISFVKSGLKDLSVSRKSFNWGIKVPSNKDHVIYVWLDALTNYLSALNYPNENDNLYKSFWPADLHLIGKDILRFHAIYWPAFLLAADIEPPKRVFGHGWILSGDEKMSKSKGNILDPLEIIDNYGLDPLRYYLIKEVSFGNDGNISQEKLESCINSDLANNYGNLCQRVLSFCEKNANLEVPAIEDLKEEDKIILNQYTKYYDNLVMYSDNQDVNSYINFIVQQLFSANKYFNDQEPGKK

SEQ ID NO: 184875 - protein, 274 aa, Unknown
  Bacterial polypetide isolated from the Sargasso Sea
EWFTDGLQQWDISRDAPYFGFEIPNAPGKYFYVWLDAPIGYMASFKNLCDKKGIDFDAFWAEGSEAELYHFIGKDIIYFHSLFWPAMLEGAKFRKPTNVFAHGFVTVNGEKMSKSKGTFIKARTYLDNLNPEYLRYYYAAKLNSGIIDLDLNLEDFAQRVNSDLVGKVVNIASRCAGFITKKFDGKLSATIMQPELLEEFQAAAPSITTHFENREYSRAIREIMALADKANQFIDGAAPWVLIKDETKQQEAHDVCSLGLNLFRVLITYLKPVL

SEQ ID NO: 184876 - protein, 244 aa, Unknown
  Bacterial polypetide isolated from the Sargasso Sea
DGKKIASSSKSPVEWLDEESYFFKLSKWEKPLLDFYKKNPNFICPESRKNEVISFVKNGLKDLSVSRKSFSWGIKVPNNNDHVIYVWLDALTNYISALNYPDNKSDLFKKFWPASVHLIGKDILRFHAVYWPAFLLAANIQPPMKVYGHGWILSGDEKMSKSKGNILDPVEIIEKYGLDPLRYYLIKEVSFGNDGNISRDRLEDCINSDLANNYGNLCQRVTTFAINNCESKIPKEINFEKEDL

SEQ ID NO: 184877 - protein, 294 aa, Unknown
  Bacterial polypetide isolated from the Sargasso Sea
NKKIFVTNALPYANGPIHIGHMVGYIQADIWSRFQRMQGHDVVFICASDAHGTPIMLSAEDLGVEPVELAAEYTRQHENDFNDFHVSFDNYHTTHSKENEELVGEIYQKLKENDCIRTEVIEQAYDEQENMFLPDRYVRGTCPKCNATDQYGDNCEKCGATYKPTDLIDPISVISGKAPSLKESEHYFMRLTKFENMLEDWIETIDMHQSVKSKLKEWFDVGLRDWDISRDTPYFGFLIPGEEDKYFYVWLDAPIGYFASLKNLSDKSDLQFEEYFKDGSDTHMVHFMERTSYI

SEQ ID NO: 184878 - protein, 65 aa, Unknown
  Bacterial polypetide isolated from the Sargasso Sea
NHDLYNNFWPADVHMIGKDILRFHAVYWPAFLLAADLPTPKRIYSHGWILSGDEKMSKSKGNILD

SEQ ID NO: 184879 - protein, 332 aa, Unknown
  Bacterial polypetide isolated from the Sargasso Sea
IGHAYTTIACDILSRFSKLNGDETYFLTGTDEHGQKVEKAALSNKKDTQDFVDEMSKNFRDLVPYLGCQIDDFIRTTEKRHKTSAQFLWNKLKNNDQIYLSNYEGWYSIRDEAFYLESELKKTDKGFLAPSGAPVDWVKEESYFFKLSKWEDKLIQYYEKNPDSILPKSRYNEVVSFIKGGLKDLSISRTTFNWGIKVPDAEKHVMYVWIDALCNYITALNYPNIENESFHKFWPGIHVVGKDILRFHAVYWPAFLMAADLEPPKKIFAHGWWTNEGQKISKSVGNIINPYEIIDTYGLDQIRFFLFREVPFGNDGDFSKGAIAQRVNAELS

SEQ ID NO: 184880 - protein, 282 aa, Unknown
  Bacterial polypetide isolated from the Sargasso Sea
VHGFLTINGEKMSKSKGTFITADQFADLCDPELLRYYFASKLNSKIEDLDLNLEDLAQKINSDLVGKFSNIFSRSAPFISKNNNFLGEEIHQDHLLHCNKNIEKILQHFENKEFSKAIKLIMEIADDTNKFINEHAPWKLDQTEAVTVATTAINVFKNLCILLSPVTPNLCRKMLLMLNIDNQNKENLEVELINAEIDEFEPIISRIKPINIQDLNKKEEKMNEEDNNIIQIDDFMKVDLRVAKVEEASYVEGADKLLAIKLNLGDLGTKNVFAGIKSAYEP

SEQ ID NO: 184881 - protein, 303 aa, Unknown
  Bacterial polypetide isolated from the Sargasso Sea
QCKSWLKEGLKPRAMTRDLDWGVKVPLKDSEGKVLYVWFDAPIGYISATKEFIPEKWEKYWMDNNTNLVHFIGKDNIVFHCIIFPMMLMEHGDYILPSNVPANEFMNLEGEKISTSKNWAVWLHEYMDEFPNQQDVLRYVLTSNAPESKDSDFTWKDFQAKNNNELVASYGNYINRVFVLCHKFFNGNIPSKGRFNKDEDKLLNSIIDIRDKIERSIEKFKFREALTFLMDLSRIGNKYLTDTEPWKIIKEDKERVGTILNVSMQVVCNIAILSAPFLPFTSNKIFKLLNIKTKIWDDIDKEI

SEQ ID NO: 184882 - protein, 303 aa, Unknown
  Bacterial polypetide isolated from the Sargasso Sea
IDGKYVTDNGSPVEWVKEESYFFKLSEWQNKLIDYYEKNPELILPKTRYNEVLSFIKGGLKDLSISRTTFKWGVPVPNNSKHVMYVWIDALCNYLTAIGYPDKNNKNYKQFWPATHIVGKDILRFHAVYWPAFLMAADIEPPKRIFAHGWWTNEGQKISKSLGNVIDPYEIIDEYGLDQIRFFLFREVPFGNDGDFSKKAIANRINADLSNNFGNLVQRISSFAVKNNDSLLKPVENLSKDDEDLMNILQNKFDEYCNFMNNQQIDRAIKSVLELISSANAYVDTQAPWSLKKTNKIRMEEVL

SEQ ID NO: 184883 - protein, 303 aa, Unknown
  Bacterial polypetide isolated from the Sargasso Sea
HGQKIQKEAEKNKKDPKIFCDEISKTFRSLTNTLKLTNDDFIRTTESRHFKSVNEIWNRLINSGDIYLDKYSGWYSVSDEAYYDEDEIEVKEELKVSKISGSKVEWVEEESFFFKLSSFQNKLLDHYKKNENFILPQSRRNEVISFVEKGLKDLSISRTSFSWGIPVPENKKHVIYVWLDALTNYLSALNFPNTDDIKYKSFWPADVHIIGKDILRFHAIYWPAFLIAANLPLPKRIFGHGWILSDDKKMSKSLGNILDPIKIIDNFGVDQLRYYLVKEVSLGNDGSISMENLKNCINNDLAN

SEQ ID NO: 184884 - protein, 257 aa, Unknown
  Bacterial polypetide isolated from the Sargasso Sea
SKTFRDLSKTLNLSNTDFIRTTEERHKKTVQHLWKELENNDDIYLSNYSGWYSVSDEAFYNDDEIEEVEGKKISISSKSTVEWIEEESYFFRLSKWEKPLLDFYEKNPNFISPASRKNEVISFVKSGLKDLSVSRKSFSWGIKVPGNDKHVIYVWLDALTNYISALNYPNKEDELFKKFWPASIHLIGKDILRFHAVYWPAFLLAAKIELPKKVYGHGWILSGDEKMSKSKGNILDPLQIIDEYGLDPLRYYLIKEV

SEQ ID NO: 184885 - protein, 135 aa, Unknown
  Bacterial polypetide isolated from the Sargasso Sea
MSNNAEKRDILVTSALPYATAPLHLGHILEHTQTDIWVRYQRLIGNNCTYVCADDAHGTPIMLKAEELNKEPEDLIEEIYANHVNTFNLYNINHDNFHTTHSEENRTLSERIFNALNEKGLIEIRMIEQLYDTSR

SEQ ID NO: 184886 - protein, 231 aa, Unknown
  Bacterial polypetide isolated from the Sargasso Sea
EYSKAMRKIISLADEANRYLENKKPWIMIKDEALHKEVQSVCTQGLNLFRILMIYLYPVIPEIAINAMKLFNEKEWRWKDLNSPILGKKIKEYRPLLTRIEKKKVENLMTSKEDQSDKITKETGKITIDDFMKIDLRVGIIDEAKEVEGADKLLKLIVNLDKEKRTIFAGIKSAYKVEDLVGRSVVVAANLAPRKMKFGTSEGMILAAGPGGDQIFLLSTDEGAKPGMKIK

SEQ ID NO: 184887 - protein, 291 aa, Unknown
  Bacterial polypetide isolated from the Sargasso Sea
MPFYITTPIYYVNDAPHIGHAYTTIACDIFARFNKLIGEETFFLTGTDEHGQKVEKAAKNQGKDTQIFVDNMSNNFRKIIPFLGCDIDNFIRTTEDRHKKAAQFLWNTLKENNQIYLSNYEGWYSIRDEAFYQENELKKIDGILTAPTGAPVEWVKEESYFFKLSEWENKLLKFYEQNQESILPKTRYNEVLSFIKGGLKDLSISRTTFKWGIKVPNEEKHVMYVWIDALCNYLTALDYPDTESKLFKKFWPAIHIVGKDILRFHAVYWPAFLMAANIEIPKKNFCTMVGG

SEQ ID NO: 184888 - protein, 251 aa, Unknown
  Bacterial polypetide isolated from the Sargasso Sea
YEKREFGKAMREIMALADHANVYIADKAPWSLSKEEGKEQEVLAICSTAINVFRLLVIYLKPVLPALAERAEAFMQVEPLTWADSEQLLLGHEIAKFKPLLSRVDMAQVESMLEDSKESTPAPAAAKPKKAATQKADAGDNDETISIDDFLKVKLRVARVAKAAHVDGADKLLQLTLDVGELGERNVFAGIKARYAPEELEGKLVVLVANLAPRKMKFGISEGMVLAAGPGGDDIHILSPDSGAEPGMEVR

SEQ ID NO: 184889 - protein, 258 aa, Unknown
  Bacterial polypetide isolated from the Sargasso Sea
SSIIADFFARLKRIQGFNVYFLTGTDEHGQKIQRAAEEKKMDPLLFCDEISKTFRDLSDTLNLSNNDFIRTTEKRHSKSVVNLWNILEKKGEIYLSKYSGWYSVSDEAFYTESEIEDLDGIKKSISSGSKVEWVEEESYFFKLSNWQDKLIEFYNKNPDFILPETRKNEVISFVKSGLKDLSVSRKSFNWGIKVPSNKDHVIYVWLDALTNYLSALNYPNESDDLYKSFWPADLHLIGKDILRFHAIYWPAFLLAAHI

SEQ ID NO: 184890 - protein, 299 aa, Unknown
  Bacterial polypetide isolated from the Sargasso Sea
VLSFIKGGLKDLSISRTTFNWGVPVPNNSKHVMYVWIDALCNYLTAIGYPDINNKNYKQFWPATHIVGKDILRFHAVYWPAFLMAAGIEPPKRIFAHGWWTNEGQKISKSLGNVIDPYEIINEYGLDQIRFFLFREVPFGNDGDFSKKAIANRINADLSNNFGNLVQRISSFALKNNDSILKPTENLTNDDQDLIKILQNKFDEYCKFMNNQQIDRAIKSVLELISAGNAYVDTQAPWTLKKTNKIRMEEVLYIITNIIIKSAIMLYPIIPTSSKKILNIFNYNMDNNKFENLTQLINQ

SEQ ID NO: 184891 - protein, 266 aa, Unknown
  Bacterial polypetide isolated from the Sargasso Sea
DALTNYLSALNYPNENDKLFKNFWPADIHIIGKDILRFHAVYWPAFLLAAEIKPPKRVYGHGWILTGDEKMSKSKGNILDPLEIISNYGLDPLRYYLIKEVSFGNDGNISKEKLENCINSDLANNFGNLCQRVITFSEKNTDLTIPEKSNFNDDDIKILDIYNKNYENLVEETNNQNINSYINFIVDQLFAANKYFNDQEPWKKKNDIKRLNTIIYTSFELIRRVSILLYPIMPETSLKVLNIFGINEDQIKFETIIINDYLKSKT

SEQ ID NO: 184892 - protein, 63 aa, Unknown
  Bacterial polypetide isolated from the Sargasso Sea
MSYYITTPIYYTNDVPHIGHAYTTISCDILARFNKLLNNDVFFLTGTDEHGQKVEKAAKEAGV

SEQ ID NO: 184893 - protein, 237 aa, Unknown
  Bacterial polypetide isolated from the Sargasso Sea
EWVEEESYFFKLSKWQEPLLKFYSENPKFILPESRKNEVISFVKSGLKDLSVSRKSFTWGIKVPSNKDHVIYVWLDALTNYLSALNYPKETEKLYKDFWPANIHIIGKDILRFHAVYWPAFLLAAGIKPPQRVYGHGWILSGDEKMSKSKGNILDPIEIIDIYGLDALRYYLLKEVSFGNDGNISKEKLESCINSDLANNYGNLCQRVILFCEKNIGLKVPEKYDFINDDLKILDDF

SEQ ID NO: 184894 - protein, 262 aa, Unknown
  Bacterial polypetide isolated from the Sargasso Sea
GKKVSKVSGSTVDWVEEESYFFKLSSWSEKLLKYYKSNKDFILPSSRKNEVVNFVKKGLKDLSVSRTSFSWGIPVPKDNKHVIYVWLDALTNYISALNFPDINDKNYKKYWPANVHIIGKDILRFHAIYWPAFLLAAKLPLPERIFGHGWILSEDKKMSKSLGNILDPIEIIKIYGIDQLRYYLVKEVSLGNDGSISLQNLKNCINNDLANNYGNLCQRVFSFIKKNCSNKIPKVKKLSDSDNKLLNQLKNNIPKLIELMNK

SEQ ID NO: 184895 - protein, 271 aa, Unknown
  Bacterial polypetide isolated from the Sargasso Sea
DELIKNDDIYLSKYSGWYSVSDEAFYNEDEIYEENGSKIAKVSKSPVEWVDEESFFFRLSKWQEPLLKFYNENPDFIQPESRKNEVISFVKSGLKDLSVSRKSFSWGIKVPNNDEHVIYVWLDALTNYISALNYPNTKNDLFKSFWPASLHLIGKDILRFHAIYWPAFLMAAKVELPKRVYGHGWILSGDEKMSKSKGNILDPIEIINKYGLDPLRYYLVKEVSFGNDGNISQDRLEDCINSDLANNYGNLCQRTISFAIKNCNQKNSKKY

SEQ ID NO: 184896 - protein, 284 aa, Unknown
  Bacterial polypetide isolated from the Sargasso Sea
CKAAADNGVDPIELCNQNSNNFRKLLATLNISNDDFIRTTEQRHKSACQALWKSLFDKGHIYMGKYSGWYAVRDEAYYDEAELSKGPSGERLAPTGAVVEWMEEETYFFDLSKWQNELLAFYDSNPDFIGPQSRFNEVYSFVKGGLKDISISRATFSWGIPVPGETKHVMYVWIDALTNYLTALGFPALKDDYAKFWPVCHHMVGKDIIRFHCVYWPAFLMAANLMPPKRVYAHGWWTVEGQKMSKSLGNAIDPNHMVAEYGLDQMRFFLMREVPFGNDGDFSE

SEQ ID NO: 184897 - protein, 133 aa, Unknown
  Bacterial polypetide isolated from the Sargasso Sea
MAYFITTPIYYVNDVPHIGHAYTTIACDIFSRFNKLKGNKTFFLTGTDEHGQKVEKAALSKQINTQNFVDEMSQNFRELIPFLGCEIDDFIRTTEKRHKIATQFLWNKLKDNDQIYLSNYEGWYSIRDEAFYL

SEQ ID NO: 184898 - protein, 225 aa, Unknown
  Bacterial polypetide isolated from the Sargasso Sea
MVTSALPYANGSIHIGHVLESVITDIWVRYQNINGNECLYFCADDTHGTPVMLKAKELGIDPEELIKRTREEHIKSYSRFNINFDNFYTTHSDENKKYAEDIYQKCKEGNLIFKKEIEQFYDSEEGLFLSDRFIKGTCPKCGAEDQYGDGCSVCGTTYTPDDLLNPVSSLSNSELTKKKTEHVFFDLPQMKDFLENYLKDLTLQDPIKNKLNEWIDDGLKPWDIS

SEQ ID NO: 184899 - protein, 298 aa, Unknown
  Bacterial polypetide isolated from the Sargasso Sea
ELDKIDGKFITKNGSPVEWLKEESYFFKLSEWQDKLIDYYEKNNRPIYPESRYNEVLSFVKGGLKDLSISRTTFKWGIPVPNNNDHVMYVWIDALCNYLSAIGYPDINNSKFKKYWPAFHVVGKDILRFHAVYWPAFLMAANLEPPKKIIAHGWWTNEGKKISKSLGNVIDPYEIINEYGLDQIRYFLFREVPFGNDGNFSKKSISIRVNADLSNNYGNLIQRIATFVVKNCESKISPSINLNVNDKKLNETIKNVTIKYLELMDNMQFDSALKGIMELLNEANAYVDSQAPWKLRNT

SEQ ID NO: 184900 - protein, 244 aa, Unknown
  Bacterial polypetide isolated from the Sargasso Sea
NKDHVIYVWLDALTNYISALNHPNSEDKLYKSYWPADLHLIGKDILRFHAVYWPAFLMAANIPLPKRVYGHGWILSGDEKMSKSKGNILDPLEIIEKYGLDPLRYYLLKEVSFGNDGNISQEKLEKCINSDLANNYGNLCQRVVSFVEKNANLEIPEKDQFNSDDLKILDDFKKEFNNLITYINNQELNLYLNFIVDKLFSANKYFNDQEPWKKKSDMKRLNTIIYVALELIRKITIMLYPIIP

SEQ ID NO: 184901 - protein, 214 aa, Unknown
  Bacterial polypetide isolated from the Sargasso Sea
MSSNYYITTPIYYVNDVPHIGHAYTTLACDVIARFKRLDGFNVFFLTGTDEHGQKVELAAKNKGVMPKEFVDDVSQNFRNLLKCMNFSNDDFIRTTEKRHIDTCQKIWEKLLKNKSIYLDKYSGWYSVRDEAFYSETEIVDGKAPSGAPVEWVEEPSYFFNLSKWEDKLLKLYEENNDFILPNSRRNEVISFVKGGLKDLSVSRTSFSWGIKVQ

SEQ ID NO: 184902 - protein, 283 aa, Unknown
  Bacterial polypetide isolated from the Sargasso Sea
IDLPFDNDFVTYVWFDALLNYVTALGWPEDSRYEQFWKHCHHVIGKDILKTHGIYWPCMLEAAGFPVFKKLAVHGHWVVQGSKMSKSLGNVVNPLEMKDLIGVDGLRYFLLREMSYGEDANFTEDLVFARYHGELSNNFGNLLNRSISMSRKNFENEVPPRGEPGKQEIELYQIFEQETSQIKAWVQQFEPHRALERIAMMSSAVNKYLDENKPWKLAKEEDQNERLGTVLYTALDASAWLVCLLEPVMPEKMKAARIQLGLGESPMTLEMLKPGLVQSGTSL

SEQ ID NO: 184903 - protein, 290 aa, Unknown
  Bacterial polypetide isolated from the Sargasso Sea
VKISGSSLNPLELINPKSRLSGTKPILKMTKHWYLPLNKYEKFINDWIIKGHKNDWKPNVYGQVKSWIDSGLRPRAVTRDLDWGVQLPIEKYKNKVLYVWFDAPIGYISSTKEWAKKNNKDWKPYWKDEKTELIHFIGKDNIVFHCIIFPIILKTSKNYILPKNVPANEFLNLEGRKISTSKNWAVWLHEYLEEFPEQQDVLRYVLTANSPESKDNDFTWKDFQSRNNNELVAIYGNFVNRVVVLINKYYKGSVPKSESLLDDDIKIFQEIGTIPSKIKNSIEKFQFRDG

SEQ ID NO: 184904 - protein, 108 aa, Unknown
  Bacterial polypetide isolated from the Sargasso Sea
METSQPAILATIALPYANGQLHLGHMVEAVQADIWVRFQRQQGRECVFVCGSDAHGTAVMLSAEKAGVAPEQWVQTIRADHERDYRDIQVDFDHFHTTHSDENQRYQK

SEQ ID NO: 184905 - protein, 184 aa, Unknown
  Bacterial polypetide isolated from the Sargasso Sea
MNNVFYITTPIYYVNSHPHIGHAYTTIATDVFIRYKKLFGAETYFLTGTDEHGQKIAESAANSGIKPQEFADKISQEFREMWPHLHIENDQFIRTTDSKHKACVQQILQKIFDQGEIYLKEYEGLYCIGCERFLDEAELENGNCPDHQIQPEFHKEQNYFFRMSSYQTWLAEELKQNENWVYPA

SEQ ID NO: 184906 - protein, 219 aa, Unknown
  Bacterial polypetide isolated from the Sargasso Sea
MSDRYTVTTALPYANGPLHLGHVAGVYIPADIYVRYLRSNNKDVVFIGGTDEHGVPISIKAKNEGVSPKEVVDRYHGIIKNSLEGLGISLDFFGQTSSSNHYDVATEWFQKLHNDGVFSEEVLQQYYDEENKQFLADRYITGICPSCKQDGAYGDQCEKCGASLSPTELINPKSALSGNKPVLKETKHWYLPLNNFEPWLKEWIEKKKPLLKSKCLWSS

SEQ ID NO: 184907 - protein, 273 aa, Unknown
  Bacterial polypetide isolated from the Sargasso Sea
MTFYVTTPIYYVNDVPHIGHAYTTIACDILSRFNKLKGEETFFLTGTDEHGQKVEKASNLKNQDTQSFVDEMSKSFRDLIPFLGCDIDGFIRTTENRHKKAAQFLWNKLKDNNQIYLSNYEGWYSIRDEAFYLENELKKVNDSFIAPSGSPVEWVKEESFFFRLSSWEDKLIKYYEKNQDSILPKSRYNEVLSFIKGGLKDLSISRTTFKWGIKVPEEDNHVMYVWIDALCNYLTAINYPDEDNQNFKKFWPGVHVVGKRYFKVSCSILACFF

SEQ ID NO: 184908 - protein, 240 aa, Unknown
  Bacterial polypetide isolated from the Sargasso Sea
MSNSFYITTPIYYVNDIPHIGHAYTTILADVLSRYQKQVGNKPFFLTGLDEHGQKVQDAAKDRGIETQDHCDEMSKRFIFLWERLHISNDDFIRTTEIRHKNVVREILKTVFDAGDIYEDEYQGLYSVSEERFITEKEADTGQFRDIKTLKEKNYFFRMSKYQNRLINHIEANPSFIQPDHRKNEILGFLNQSLNNLCISRPKSRLNWGIELPFDSDYVTYVWFDALINYITAPGYLDDK

SEQ ID NO: 184909 - protein, 293 aa, Unknown
  Bacterial polypetide isolated from the Sargasso Sea
SEEIEENNGIKVSKTSGSTVEWVEEESYFFRLSEFQKRLLDHYKKNEDFILPKSRKNEVIKFVEKGLKDLSISRTSFSWGIPVPENKKHVIYVWLDALTNYLSALNFPNTKDEKYKSFWPADVHVIGKDILRFHAVYWPAFLLAAKLPLPKRIFGHGWILSDDKKMSKSLGNILDPIEVIKDYGIDQLRYYLIKEVSLGNDGSISMQNLKNCINNDLANNYGNLCQRVFAFIKKNCNNKIPKKIDLNDRDIKLIKNLKDEIPQLIEYINKQNLNEYIKTVINFSFEANKYFND

SEQ ID NO: 184910 - protein, 202 aa, Unknown
  Bacterial polypetide isolated from the Sargasso Sea
MTSNSFFITTPIYYVNDEPHIGHAYTSIACDVIARFNRLKNKDIMFLTGTDEHGLKIEQAAKKKNMDTKKFVDEMSQSFKKLTKTLNLTNDFFVRTTDSYHKKASQHIWNILKKNDQIYLDKYKGWYSVSDEAYFNDDEIITDEKTKKKLAPSGNEVQWVEEESYFFKLSKWQDKLLDFYKNNPNFIGPDSRRNEVISFVKN

SEQ ID NO: 184911 - protein, 295 aa, Unknown
  Bacterial polypetide isolated from the Sargasso Sea
HLGHILEHIQSDIWVRFQRLQGNNCTYICGEDAHGTSIMLKAEELGISPEDLIKQIRVSHEQDFKAFNISHDNYHTTHSEENRHYSETIFMRLKKEGLIEEKEIEQLYDTKKGLFLSDRYVKGTCPSCKSENQYGDNCEVCSSAYSAVDLIDPVSVITNTKPKLKKSTHLFFKLSVLKKEIKNWLNSAQVVSQAINKLSEWTESEIKDWDISRDAPYFGFEIPEYENKFFYVWLDAPIGYLASHKNYLDKLKKPEEFNYYWDSDSTAELYHFIGKDIMYFHTLFFPAMLLKSDFR

SEQ ID NO: 184912 - protein, 304 aa, Unknown
  Bacterial polypetide isolated from the Sargasso Sea
DPIKNKLNEWIEDGLKPWDISRDKPYFGFEIPGEKDKYFYVWLDAPIGYLASAKNWAENNDMDMKDLWGESSDYEIHHFIGKDIAYFHALFWPALLKSSNIRLPESINVHGFLTIDGEKMSKSNGTFINADDFAENYDGELLRYYFADKFNNSIDDLDFNEDEFIQKINSDIVGKYLNIASRVSKFIEKNDNNLSANLDEDFIEKNLSMIDEVIEHYEDLNLSKSIKIIMKMADEVNKYINENEPWKSSEEKAVEVSSTAINCFRVISILLNPVLPTITSKALEVFNNSSTNDFNNIKDYLVDT

SEQ ID NO: 184913 - protein, 232 aa, Unknown
  Bacterial polypetide isolated from the Sargasso Sea
KNYYITTPIYYPSAKPHMGHAYSSIISDFFARLKKIQGYEVFFLTGTDEHGQKIQRAAENNKKDPLKFCDEISATFKDLSKILNLSNNDFIRTTEVRHKKSVENLWKVLEKKKEIYLSKYSGWYSVSDEAFYSEDEIEDDGNLKISKLSGSKVEWVEEESYFFKLSKWQEPLLSFYENNPDFILPKTRKNEVVSFVRAGLKDLSISRKSFTWGIKVPSNNEHVIYVWLDALT

SEQ ID NO: 184914 - protein, 199 aa, Unknown
  Bacterial polypetide isolated from the Sargasso Sea
MSKCCRTGPAAVLCKAKWPINFRNGLKKVCSNADISRDAPYFGFEIPGAPGKFFYVWLDAPIGYLASFKNLCDKTGINFDDFWKLDSDAEVYHFIGKDIIYFHSLFWPAMLDGAGYRKPSSVFAHGFVTVNGAKMSKSRGTFIKARTYLDNLNPEYLRYYFASKLTSGIVDLDLNLEDFSQKVNADLVGKVVNIASRCA

SEQ ID NO: 184915 - protein, 280 aa, Unknown
  Bacterial polypetide isolated from the Sargasso Sea
FWNKLLKNDQIYLSDYEGWYSVRDEAFYQESELVNINGKLQTKLGAPVDLIKEESYFFKLSNYEERLINFYEKNPNIISPKSRYNEVLSFIKNGLKDLSISRTTFKWGVQVPNNPKHVMYVWIDALCNYLTAIDYPNTESQKFKNYWPATHIVGKDILRFHAVYWPAFLMAADLEPPKKIFAHGWWTNEGQKISKSLGNVIDPYLIVQEFGLDQIRYFLFSEVPFGNDGDFSKKAISKRVNADLSNNYGNLIQRILTFIVNNCNSSIKPSFDFTEDDKNL

SEQ ID NO: 184916 - protein, 101 aa, Unknown
  Bacterial polypetide isolated from the Sargasso Sea
MKPFYITTPIYYVNDKPHIGHAYTTILADVLARHHRNSGKEVFFLTGLDEHGQKVQQAAEKRGVDPKKHCDEMAPRFLDLWEQLHIQYDDFIRTTEKRHTD

SEQ ID NO: 184917 - protein, 258 aa, Unknown
  Bacterial polypetide isolated from the Sargasso Sea
TFKNLSKTLNLTNNDFIRTTESRHKKSVQYLWEELKKNDDIYLSKYSGWYSVSDEAFYNEDEIEDLDNKKVAISSKSPVEWVDEESYFFRLSKWEKPLLEFYEKNPDFISPASRKNEVISFVKSGLKDLSVSRKSFSWGIKVPNDNEHVIYVWLDALTNYISALNYPNKDDELYKRFWPASVHLIGKDILRFHAIYWPAFLLAAKIAPPKKVYGHGWILSNEEKMSKSKGNILDPLEIIKQYGLDPLRYYLIKEVSFG

SEQ ID NO: 184918 - protein, 270 aa, Unknown
  Bacterial polypetide isolated from the Sargasso Sea
ASEEKGLDPKNFCDELSKTFRSLSKTLNLSNTDFIRTTEDRHIKSVQNLWKILEKKNQIYLSKYSGWYSVSDEAFYGDNEIKEENGINISSISGSKVEWVEEESYFFKLSEWENKLLKFYEENPKFILPETRRNEVLSFVKGGLKDLSVSRKSFSWGIKVPGNNDHVIYVWLDALTNYISALNYPDTTDNKYKNYWPADLHMIGKDILRFHAVYWPAFLLAADLPPPKRVYGHGWILSGDKKMSKSKGNILDPLEIVDKYGLDSLRFYLL

SEQ ID NO: 184919 - protein, 317 aa, Unknown
  Bacterial polypetide isolated from the Sargasso Sea
NKFLPDRYVEGECPKCNYLEARGDQCDSCGITLDPEELINPKSKINGNPAEFKETEHYFLKLSALNDKLADWLNTKKGWRPHVINFSKSFVEEGLQDRAITRDLDWGIEIPDNELGDGKKIYVWFEAVIGYLSASKEWASNNGTPEAWKDFWLDENAESYYFVGKDNVPFHAIIWPAMLLAYGDLNLPTNVPANQYILIKGEKASASRGVGKTLNDYLDEWNPDSLRYSLASILPEQNDSEISEDEMIRRNNEELVAAWGNLVQRVFSQYINNFDDLDTSFEYEKIDEELMEGAKSCFKTTGEMIEKVELKSSLQNV

SEQ ID NO: 184920 - protein, 288 aa, Unknown
  Bacterial polypetide isolated from the Sargasso Sea
KIQRSAENEGQDPKTFCDQISKTFRDLSKTLNLSNTDFIRTTELRHKKSVEHLWNELEKNDDIYLSNYSGWYSVSDEAFYNDDEIEEIDGIKKAKLSNSIVEWVEEESYFFRLSKWQKPLLEYYEKHPNFISPESRKNEVISFVKSGLKDLSVSRTTFSWGIKVPNNKDHVIYVWLDALTNYLSALNYPDIKNELFKNFWPASIHLIGKDILRFHAIYWPAFLLAANIKLPLKIYGHGWILSGEEKMSKSRGNILDPIEIIKEYGLDPLRYYLIKEVSFGNDGNISQD

SEQ ID NO: 184921 - protein, 274 aa, Unknown
  Bacterial polypetide isolated from the Sargasso Sea
DEIIEKNGKKISSFSGSIVEWVEEESFFFKLSAWEKKLLNFYEENPKFILPTSRRSEVINFVKNGLKDLSVSRTSFTWGINVPNNKKHVIYVWLDALTNYLSALNYPDTNNKLYKNFWPASVHVIGKDILRFHAIYWPAFLLAAKIEPPKRVFGHGWILSGDEKMSKSKGNILNPLEIIESYGIDEMRYYLMKEVSHGSDGNISITNLKKCINSDLANNYGNLCQRVFSFIKNNCNSIVIKKGDYSENDKKFIKNIDNLTKNLRELIDNQNLNN

SEQ ID NO: 184922 - protein, 264 aa, Unknown
  Bacterial polypetide isolated from the Sargasso Sea
MSDTPRKILVTSALPYANGPIHLGHLLEYIQTDIWVRFQKLRGQQCIYVCADDAHGTAIMLKAEENGVTPEQQIAQVKADHERDFADFQVNFDNYYSTHSPENRALSEMVFQRNKDAGYILEKTITQLYDPQKGMFLADRFVKGTCPKCKSEDQYGDNCEVCGATYTPAELIEPYSSVSGATPVEKETTQLFFDLPKFEALLREWTRSGALQEQVANKLQEWIEDLQPWDISREAPYFGFEIPGYPGKYFYVWLDAPIGYMASF

SEQ ID NO: 184923 - protein, 288 aa, Unknown
  Bacterial polypetide isolated from the Sargasso Sea
MPKTRYNEVVKFVEGGLNDLSISRNSFSWGINVPDDEEHIIYVWLDALFNYKSIFEKNNCIKDFWPADVHIVGKDILRFHSIYWPAFLMSAGYELPKTIYAHGWWTIEGKKMSKSLGNVVDPNQVIKKYGSDQIRYFLLKEIPFGEDGNYSEELLIKRINSDLANDLGNLFQRVLSMLSKYFDGVLPQLQDTNDKDKTLIGFPANTLEDLHKHMKLLQFNKSINSIWQIVKAANAYVDMEEPWKLNKENPKRLQTVMYLLVNSIYKITILLQPFLPNTSTNILTQLKQ

SEQ ID NO: 184924 - protein, 254 aa, Unknown
  Bacterial polypetide isolated from the Sargasso Sea
TLADRANEYIQAKAPWAMSKEEGREQEVLEVCSVAVNLFRQLMTYLSPVLPELAEKTAAFLNLESLGWEDRRSILTGHAINKFKPMLARAEMDKVTAILEETKTELEKENGGAATAKDQKTDKKTEKKAKNKGPELREDGNEVIADTIEFPDFAKVDLRIARIIKADHVEGADKLLQLTLDIGNGETRNVFSGIKAAYKPEDLEGKLTVMVANLAPRKMKFGLSEGMVLAAGPGGSEIYLLEPHDGAQPGMRVM

SEQ ID NO: 184925 - protein, 286 aa, Unknown
  Bacterial polypetide isolated from the Sargasso Sea
SQWESRLLEFYEKNPDFIRPESRMNEVKSFVKSGLKDLSVSRTSFNWGIKIPESPDHIMYVWIDALTNYLTSIGYPKIENDKMNFWKNCIHVIGKDILKFHAIYWPAMLMSINFPLPKSIFAHGWWTNEGKKISKSLGNSIDPNKMIDEFGLDQFKYFLLREVPLGNDGDFSEKALVSRVNSDLSNNLGNLVQRVIKFFDKNFNNTVTHSLCKEKNISKIQKKGYELINIVKKKMEKFEISKALEEIFFYVDDLNKFVDESQPWKSFKTNPEKAAKDLSLLIECFR

SEQ ID NO: 184926 - protein, 299 aa, Unknown
  Bacterial polypetide isolated from the Sargasso Sea
IYLDKYSGWYSVSDEAYYDEDEIEKNNKGENTSKSSGSKVEWVEEESYFFKLSSWEKKLLKFYEENSNFILPQSRKNEVVSFVKRGLKDLSVSRTSFTWGIKVPKNEKHVIYVWLDALTNYLSALNFPDEQNKLYKDFWPASVHIIGKDILRFHAVYWPAFLMAAGLKCPQRVFGHGWILSDDKKMSKSIGNILDPLEIIDKFGIDQLRYYLIKEVSLGNDGNISMYNLKNCINNDLANNYGNLCQRVLTFVEKNCDNEIPRPEALNEKDKKLIKRLKDEVKNMIDLINRQKLNTYVKK

SEQ ID NO: 184927 - protein, 258 aa, Unknown
  Bacterial polypetide isolated from the Sargasso Sea
DTTKQMFLSDMYVKGSCPVCLEKDQYGDNCEKCSATYDAVELIDPVSVISGTKPIIKESDHLFFKLSSLKKQIINWLNNSNIQDPVRNKLNEWLEGDLRDWDISRDSPYFGFEIPNYPDKFFYVWLDAPIGYLASHLNYLKRNDQEEKFEEFWNTKSKGEVFHFIGKDIMYFHTLFFPVMLSESNLKTPNGVFVHGFLTLNGDKMSKSRENFISAENYINTLDADYLRYFFASKLGTGVDDIDLNLEDFRQKSNSDLV

SEQ ID NO: 184928 - protein, 283 aa, Unknown
  Bacterial polypetide isolated from the Sargasso Sea
IKQPTLLKIKSFTAQIYLQLKKNGHIKRRTIKQAYDDKKGLFLPDRYVRGECPACGAKDQYGDACEHCSATYTPMDLKNPISVISGTTPSLRESEHLFFQLADFQEELRAWVPDHVDASMVNKLSEWLESGLKDWDISRDAPYFGFEIPDENEKYFYVWFDATIGYMASFLNLCRKSDKEADFNKFWKKNKNTELYHFIGKDIIYFHALFWPSVLSGSGYRKPSSIFVHGFLTVDGQKMSKSRGTFIMASTYYKHLDPDYLRYYLTAKLSSNIDDIDLNFDDF

SEQ ID NO: 184929 - protein, 255 aa, Unknown
  Bacterial polypetide isolated from the Sargasso Sea
HIIGKDILRFHAVYWPAFLLAAKLPLPKRVFGHGWILSDEKKMSKSLGNILDPIEIIRNYGIDQLRYYLIKEVSLGNDGSISMENLKNCINNDLANNYGNLCQRVFSFIKKNCNNKVPKTNNFKEIDTKLINNLKDNIPKLIDLINKQNLNEYIKTVVNFSFEANKYFNDSEPWLFKQKNPERMNAILNTIVVQIKNISILLNPIIPISTKKVLNTINISDKDILVETIKKENIIDNNKELKNLDILFKKIENDN

SEQ ID NO: 184930 - protein, 279 aa, Unknown
  Bacterial polypetide isolated from the Sargasso Sea
LDFYKKNPDFISPESRKNEVIKFVENGLRDLSVSRKSLSWGIKVPNNKNHVIYVWLDALTNYISALNYPNNNDDLFKKFWPASLHLIGKDILRFHAVYWPAFLLAANIKPPKKIYGHGWILSGDEKMSKSKGNILDPIEVIKEYGLDPLRYYLIKEVSFGNDGNISQERLEDCINSDLANNFGNLCQRVTAFTIKNCQSKIPDKIEFNNDDLNILNKYKDNLDEIRSKVDNQNINFYIDYIVNSLFEANKYFNDQEPWKKKDKLIRLNTIIFTSLEIIR

SEQ ID NO: 184931 - protein, 280 aa, Unknown
  Bacterial polypetide isolated from the Sargasso Sea
MNNKNFYITTPIYYPSGKPHMGHAYSSIIADILARFNKIDGKNVFFLTGTDEHGLKIQREAEKNNKNPIDFCDELSKKFKDLTSTLYLSNNDFIRTTEKRHYESVKNIWNKLYDNGNIYLDKYSGWYSVSDEAYYDEDEIETRDGNKFAKLSGSKVDWVEEESYFFRLSKWSEKLLEHYDKNPEFILPSSRKKEVVNFVKKGLKDLSVSRTSFTWGIKVPQNHKHVIYVWLDALTNYISALNYPNTNDKLYKEFWPANIHIIGKDILRFHAIYWPAFLMA

SEQ ID NO: 184932 - protein, 306 aa, Unknown
  Bacterial polypetide isolated from the Sargasso Sea
KNIDLQKSVKNKLNEWLNDDLKKWDISRDAPYFGFEIPGEKNKYFYVWVDAPIGYLASISNWAEKNNLDMQDLWSENSEYEIYHFIGKDIAYFHGLFWPALLSAANFKLPNGINVHGFLTINGEKMSKSKGTGILAKEFANIINPETLRYYFAAKLNNKVEDIDLNFEDYVQRINSDLVGKYLNIASRSASFIKKNKNVLSTNINKDILNNLILKKDKIISLYETREYSKLVRIIMDLADDINKYINEQTPWKKDINEAVDITSTAINAFYIITTYLHPIIPNITNEAFKFLNIKTISIDDVDKTE

SEQ ID NO: 184933 - protein, 307 aa, Unknown
  Bacterial polypetide isolated from the Sargasso Sea
ILEHTQTDIWVRYQKLIENNCTYVCADDAHGTPIMLKAEELNKEPEDLIEEIYANHVNTFNLYNINHDNFHTTHSEENRILSERIFNSLNEKGLIEIRTIEQLYDTSRNMFLSDRYVKGTCPKCYAEDQYGDNCEVCSATYDAIELIDPFSVLSNTSPVIKESEHLFFKLSELKQEIVEWLKNSNIQKPVQNKLSEWLDQDLKDWDISRDSPYFGFEIPGHKDKFFYVWLDAPIGYLASHINYLNKQNSNEFEKFWNPESNSEIYHFIGKDIMYFHTLFFPVMLSNANFKKPSGVFVHGFLTLEEKG

SEQ ID NO: 184934 - protein, 296 aa, Unknown
  Bacterial polypetide isolated from the Sargasso Sea
FSDLNIDGYKVYFLTGTDEHGLKIQRSAEKEGLNPLNFCDQISKTFRDLSKTLNLSNTDFIRTTEERHKKTVQHLWKELENNDDIYLSNYSGWYSVSDEAFYNDDEIEEVEGKKISISSKSTVEWIEEESYFFRLSKWEKPLLDFYEKNPNFISPASRKNEVISFVKSGLKDLSVSRKSFSWGIKVPGNDKHVIYVWLDALTNYISALNYPNKEDELFKKFWPASIHLIGKDILRFHAVYWPAFLLAAKIELPKKVYGHGWILSGNEKMSKSKGNILDPLQIIDEYGLDPLRYYLI

SEQ ID NO: 184935 - protein, 245 aa, Unknown
  Bacterial polypetide isolated from the Sargasso Sea
MNKNYYITTPIYYPSGKPHMGHAYSSIIADFFARFKRMQGGDVFFLTGTDEHGQKIQRAAEKDGSDPLSFCNKISKNFYELTKKLNLSNDDFIRTTEKRHNDSVVHLWNILEKKNQIYLSKYSGWYSVSDEAFYTEDEVETIDNLKISKTSGSKVEWVEEESYFFRLSEWQKPLLKFYSDNKNFILPESRRNEVISFVKNGLNDLSVSRKSFSWGIKVPSNNDHVIYVWLDALTNYLSALDYTNV

SEQ ID NO: 184936 - protein, 314 aa, Unknown
  Bacterial polypetide isolated from the Sargasso Sea
KDFIKKVNLQESVKNKLSEWLNDDLKKWDISRDPPYFGFKIPGEVEKYFYVWVDAPIGYLASISNWAKKNNLDMNQLWSQKSDYEIHHFIGKDIAYFHGLFWPALLSSANYKLPDSINVHGFLTINGEKMSKSRGTGILAKDFVSVINPETLRYYFAAKLNNKVEDIDLNFEDYVQRINSDIVGKYLNIASRSASFIKKNNNLLSKNINQDILDSLLNKKGEIIDLYDSKQYSKLIRIIMDLADDVNKFINDETPWKKDINEALDISSTALNAFKILSIYLHPIIPNITKDAFEFLNLKKFTLNDVDVNLNEKI

SEQ ID NO: 184937 - protein, 294 aa, Unknown
  Bacterial polypetide isolated from the Sargasso Sea
HAYSSIVADFFARFKRIQGYKVYFLTGTDEHGLKIQRAAEKKGMQPKDFCDQISKTFYDLSSDLNLSNDDFIRTTEQRHKKAVEHLWNILEKKNEIYLSKYKGWYSVSDEAFYSEDEIEKADGKVVSKVSKSTVEWVEEESYFFKLSKWQNSLLKFFDDNPNFILPETRKNEVVSFVKSGLKDLSVSRKSFSWGIKVPSNNEHIIYVWLDALTNYLSALNFPDDKDKKYIDFWPASVHLIGKDILRFHAVYWPAFLLAAGIKPPKRIFSHGWILSGEEKMSKSKGNILDPLEIL

SEQ ID NO: 184938 - protein, 268 aa, Unknown
  Bacterial polypetide isolated from the Sargasso Sea
MSKGNFYITTPIYYPSGKPHMGHAYSSIIADVLARFKKIDGHKVYFLTGTDEHGLKIQREAKKNNKDPKVFCDEISITFKNLTKILNLSNNDFIRTTEKRHHESVKEIWKRLEKSGDIYLDKYSGWYSVSDEAYYDEDEIIHENGFKKSKTSGSNVEWVEEESYFFKLSAWGEKLLKFYEKNPNFILPESRKNEVVNFVKKGLKDLSVSRTSFSWGIGVPTNKKHVIYVWLDALTNYISALNFPNTDDKLYKDFWPANVHIIGKDILR

SEQ ID NO: 184939 - protein, 325 aa, Unknown
  Bacterial polypetide isolated from the Sargasso Sea
MSKHFYITTPIYYPSAKPHMGHAYSSIVADFFARFKVIDGYDVHFLTGTDEHGLKIQRSAEKAGKDPQEFCDEISKTFKNLSNTLNLSNTDFIRTTEQRHKKTVQYLWSQLKKNDDIYLSKYSGWYSVSDEAFYNDDEIEEVDGKKFSISSKSSVEWIEEESYFFRLSKWEKPLLEFYKSNPYFILPESRRNEVISFVQNGLKDLSISRKTFTWGIPVPNNNKHIIYVWLDALTNYLSALNYPDLNDNLYKKFWPASIHLIGKDILRFHAIYWPAFLLAAKIDLPKRVYGHGWILSGEEKMSKSKGNILDPIGIINKYGLDPLRY

SEQ ID NO: 184940 - protein, 229 aa, Unknown
  Bacterial polypetide isolated from the Sargasso Sea
MEAPTYYLTTPIYYVNDVPHIGHAYTTLACDVLARFMRLDGCDVLFLTGTDEHGQKVEKAAKTLKMEPQAFTDKVSKNFRDLLPFMNISNDDFIRTTEARHKVSAQAIWRRLMQNGHIYLDKYSGWYSVRDEAYFAENELIDGKAPTGAPVEWVEEPSYFFDLSKWQTKLLEFYNENPNFIAPASRRNEVISFVSSGLRDLSISRTSFNWGIAVPDDEKHIMYVWLDAL

SEQ ID NO: 184941 - protein, 289 aa, Unknown
  Bacterial polypetide isolated from the Sargasso Sea
DQYGDSCEECGATYSPTDVKNPISTVSNTAPVRKKTEHVFFQLSSYESFLKDWMQNNDIQREIKNKLSEWLEGGLVDWDITRDKPYFGFEIPDLEDKYFYVWLDAPIGYIASHKNYCDKNKQNYLDDWKEDSKTELYHFIGKDIAYFHGLFWPAMLEGAGLKKPNGVFCHGFLTIDGEKMSKSRGTFFNARTYLNHLQPDYLRYYFSSRLTSKIEDIDLSFDDFMTRVNSDLVGKIINIGSRCAKFINKDFNDQLSKEIGNKLLLDSLLSKKNEIIANYESRNFATNIR

SEQ ID NO: 184942 - protein, 291 aa, Unknown
  Bacterial polypetide isolated from the Sargasso Sea
LYYVNDKPHLGSVYTTIICDSIARYKRLAGEDVIFITGVDEHGLKIQRTANEKGIEPKSHCDEISEVFNNNWKNWNISLDKFIRTSSKNHEIIVNEFYERVKASDDIYMGVQKGWYCVGCEEFKDNPENSSTYKCPIHQKNLEWKNEENLFFRLSKYQKEIETIIKEPSFIEPIERKNEILNFVSRGLKDFSISRTNVTWGIPVPGYDNHTFYVWFDALLGYVSAISSDATEHSLEKSINGGWPADVHFIGKDILRFHAVYWPAMLISANMKVPKKVFGHGFLTREGQKMG

SEQ ID NO: 184943 - protein, 307 aa, Unknown
  Bacterial polypetide isolated from the Sargasso Sea
DFFARFKRIDGYKVHFLTGTDEHGLKIQRAAENKKIDPLKFCDEISQTFRDLSKTLNLTNTDFIRTTEQRHIKSVQNLWDKLKQNDEIYLSKYSGWYSVSDEAFYNEDELEEIAGKKIAISSGSTVEWVDEESFFFRLSKWEKPLLKFYEDNPDFICPESKRNEVISFVKNGLKDLSISRKSFSWGIKVPNNDDHVIYVWLDALTNYLSALNYPDTDDELFKNFWPASLHLIGKDILRFHAVYWPAFLLAAKIELPKKVYGHGWILSGEEKMSKSKGNILDPIDIIKRYGLDPLRYYLIKESFLGND

SEQ ID NO: 184944 - protein, 280 aa, Unknown
  Bacterial polypetide isolated from the Sargasso Sea
DFFARFKKIDGYSIFFLTGTDEHGLKIQRAAEKKGIEPQEFCNQISKTFNDLSKTLNLSNTDFIRTTEDRHKKSVRFLWKELEKNDDIYLSKYSGWYSVSDEAFYNEDEIEEIDGKKIAISSKSSVEWVDEESYFFRLSKWQKPLLDFYKNNPKFIQPESRRNEVISFVERGLKDLSISRKSFSWGIKVPGNEEHVIYVWLDALTNYISALCYPDTENTLFKKYWPASIHLIGKDILRFHAIYWPAFLLAAKIKLPKKIYGHGWILSGDEKMSKSKGNIL

SEQ ID NO: 184945 - protein, 56 aa, Unknown
  Bacterial polypetide isolated from the Sargasso Sea
MNPFYITTPIYYVNDKPHIGHAYTTIACDIIARFNKLLNKDVYFLTGTDEHGQKVE

SEQ ID NO: 184946 - protein, 188 aa, Unknown
  Bacterial polypetide isolated from the Sargasso Sea
MNNSFYISTPIYYVNDKPHIGHAYTTILADVIARFYRQLNYDTFFLTGLDEHGQKVQEAASNRKVEPQDHCNEMAPRFTELWEKLHISNDDFIRTTEERHKKVVQEFLQLVFDKGDIYKDEYTGLYSVSEERFITEKEAESGIFRDIKELKEINYFFKMSNFQTQLIEHIENNNNFIQPAHRKNEILG

SEQ ID NO: 184947 - protein, 202 aa, Unknown
  Bacterial polypetide isolated from the Sargasso Sea
VVSFIESGLRDLSISRTTFTWGVPVPDDNKHVMYVWIDALCNYLTSIGYPDIKNKNFEKFWPAIHVVGKDILRFHAVYWPAFLMAAELDPPKKIFAHGWWTNEGKKISKSIGNVIDPYEIINKYGLDQIRFFLFREVPFGNDGDFSKNAIANRINADLANNYGNLVQRITSFAFKNCNSTVKKSEDFTDDDKILLNNLNNRY

SEQ ID NO: 184948 - protein, 291 aa, Unknown
  Bacterial polypetide isolated from the Sargasso Sea
FVKSGLKDLSVSRKTFSWGIQVPNDKKHVIYVWLDALTNYLSALNYPNKNDELFKKFWPASIHLIGKDILRFHAVYWPAFLLAAKIQPPKKVYGHGWILAGDEKMSKSKGNILDPLQIIKEYGLDPLRYYLIKEVSFGNDGNISQDRLEDCINSDLANNYGNLCQRVTAFAIKNCDGKIPEKIKFEEDDLIILDKFKDNLDKIRSKIDQQNLNYYIDYIVNSLFEANKYFNDQEPWKKKNDITRLNTIVFTSLEIIRKISFLLYPIIPGSVLKALKIFNLGENDIKLEDIS

SEQ ID NO: 184949 - protein, 289 aa, Unknown
  Bacterial polypetide isolated from the Sargasso Sea
NDVFFLSGTDEHGQKVEKAAKVAKIEPKIFVDKLSLNFKKLIPFLGCEIDDFIRTTEERHIKSAQALWNKLIDNDQIYLSTYEGWYSVRDEAFYHENELKKTDGKLVTDNGSSVEWVKEESYFFKLSNWEKKLIEFYENNPDNISPKSRYNEVLSFIKSGLKDLSISRTTFKWGVPVPNNNKHVMYVWIDALCNYLTAIGYPDTNNLNYKKYWPAIHIVGKDILRFHAVYWPAFLMAAELEPPKKIFAHGWWTNEGQKISKSLGNVIDPYDIIHEYGLDQIRFFLFREV

SEQ ID NO: 184950 - protein, 325 aa, Unknown
  Bacterial polypetide isolated from the Sargasso Sea
GTTYTPDDLLNPVSSLSNSELTKKKTEHVFFDLPQMKDFLEDYLKDLTLQDPIKNKLNEWIEDGLKPWDISRDKPYFGFEIPGEKNKYFYVWLDAPIGYLASAKNWAENNNMDMKDLWGESSDYEIHHFIGKDIAYFHALFWPALLKSSNIRLPESINVHGFLTIDGEKMSKSNGTFINADDFAENYDGELLRYYFADKFNNSIDDIDFNEDEFIQKINSDIVGKYLNIASRVSKFIEKNGNYLSADLDEDFIEKNLSMIDEVIEHYEDLNFSKSVKIIMKMADEVNKYINENEPWKSSEEKAVEVSSTAVNCFRVISILLNPVL

SEQ ID NO: 184951 - protein, 192 aa, Unknown
  Bacterial polypetide isolated from the Sargasso Sea
MSKNKREILVTSALPYANGELHLGHMLEQTQADIWVRYQKLIGNECTYVCADDAHGTPIMLRAEELNIDPELLISNVFKNHLRDSNGFLIDHDNYYSTHSDENKYFSELIFERCKEKGLILEKEIDQLFDIEKQIFLSDRYVKGICPSCGAKDQYGDNCEVCGKTYLATDLIDQISTLSDTIPEVKKSLHLF

SEQ ID NO: 184952 - protein, 298 aa, Unknown
  Bacterial polypetide isolated from the Sargasso Sea
QVDELSNQSPIKHKLKEWFDGDLKDWDVSRDEPYFGFKVPGEESKYIYVWMDAPVGYLSSIKNWCDVNKHDYEKLLSDKDTKLVHFIGKDIVYFHLLFWPAMLHAADIENIEEVFVHGFLTIEGMKMSKSRGNFILADEALEYANADFYRYYLSSKLNTDISDINFSVDDFVQKINSDLIGKYINIASRTQNFLTKHNNSEVKQNCQNETNKYKELYAEIVNQTNDREYSKALKNIMSIADEANSYISSMEPWNKAKEGDIASCIEICSEALNIFKDLTILLNPYIPNVAEDLFDLLN

SEQ ID NO: 184953 - protein, 265 aa, Unknown
  Bacterial polypetide isolated from the Sargasso Sea
MNEVFYITTPIYYVNSHPHIGHAYTTIVTDVLTRYMKLFGAETYFLTGTDEHGQKIAESAANSGIEPKEFVDKISQEFRELWPHLHIEHDQFIRTTDSNHKACVQAILQKIYDQGEIYLKEYEGLYCIGCERFFDESELENGNCPDHQTPPEFYKEQNYFFKMSSYQEWLTKELNQNVDWIYPGRYRNELIQLLKDPLQDLCISRPKSRVKWGIELPFDNKFVTYVWFDALLNYVSALDWPDGEKYKKFWPHVNHTIGKDILKTH

SEQ ID NO: 184954 - protein, 300 aa, Unknown
  Bacterial polypetide isolated from the Sargasso Sea
MGYTCSNSKNHVIYVWLDALTNYLSSLNYPNTDDDLFKKFWPASIHLIGKDILRFHAVYWPAFLLAARIDLPKRVYGHGWILSGEEKMSKSKGNILDPLEIIKKYGLDPLRYYLIKEVSFGNDGNISQERLEDCINSDLANNYGNLCQRVTAFTIKNCNGKIPLEIKFHDEDLLILNKYKDNLDNIRSQIDNQNINSYVDYIVNSLFEANKYFNDQEPWKKKDDTIRLNTIIYTTLEIVRKISFLLYPIIPESSLKALKIFDIEEKNIKLDSVSNNEYLTKGNNINKIDILFKKIEKNND

SEQ ID NO: 184955 - protein, 201 aa, Unknown
  Bacterial polypetide isolated from the Sargasso Sea
MNKNFYITTPIYYPSAKPHMGHAYSSIIADFFARFKRICGYKVFFLTGTDEHGQKILKASENANLEPLAFCDLISKNFQNLSKILNLTNDDFIRTTEKRHFDSVRALWKILEQNDEIYLSKYSGWYSVSDEAFYSDDEVETKDKKNVAITSGSNVEWVEEESYFFRLSKWQNKLLDFYNKNPNFILPEARRNEVLSFVKGG

SEQ ID NO: 184956 - protein, 283 aa, Unknown
  Bacterial polypetide isolated from the Sargasso Sea
FYLPSSRKNEVIKFVEKGLKDLSISRTSFTWGIPVPKNDKHIIYVWLDALTNYLSAINFPDTNEKKFKEFWPADIHIIGKDILRFHAIYWPAFLLAAKLPPPKKIFGHGWILSDEKKMSKSLGNILDPIEIIDKYGIDQLRYYLVKEVSLGNDGSISMENLKNCINNDLANNYGNLCQRVFSFIKKNCNNKIPENPNFINSDKKLLDNLDNNVPKLINLMNNQDLNEYIKIVVGFSFEANKYFNDSEPWAVKKTNPERMNTILHTITEQIKNISILLNPNNSP

SEQ ID NO: 184957 - protein, 333 aa, Unknown
  Bacterial polypetide isolated from the Sargasso Sea
MTKNFYITTPIYYPSGKPHMGHAYSSIIADIFARFKRLEGYNVLFLTGTDEHGQKIQKEADKHKKDPKKFCDEISKTFRSLTTTLNLSNDDFIRTTELRHFKSVKEIWNRLIKSGDIYLDKYSGWYSVSDEAYYDKDEIEEKNGKQVSKTSGSLVEWVEEESYFFKLSAFQSKLLEHYKKNIDFILPQSRRNEVVKFVEKGLKDLSISRTSFSWGIPVPDNKKHVIYVWLDALTNYLSALNFPDIEDKKYKSFWPADVHIIGKDILRFHAIYWPAFLFAADLPLPKKIFGHGWILSDDKKMSKSLGNILDPIEVIKDYGIDQLRYYLIKEVSL

SEQ ID NO: 184958 - protein, 469 aa, Unknown
  Bacterial polypetide isolated from the Sargasso Sea
KVFFLTGTDEHGQKIQRAAEKSNKDPLKFCDEISKTFRNLSSLLNLSNDDFIRTTEKRHASAVTNLWNILEKKKEIYLSKYSGWYSVSDEAFYNEDEIEDLDGKKISKLSGSPVEWVEEESYFFKLSKWQEPLLKFYSENPKFILPESRKNEVISFVKSGLKDLSVSRKSFSWGIKVPSNKDHVIYVWLDALTNYLSALNYPKETEKLYKDFWPANIHIIGKDILRFHAVYWPAFLLAAGIKPPQRVYGHGWILSGDEKMSKSKGNILDPIEIIDIYGLDALRYYLLKEVSFGNDGNISKEKLESCINSDLANNYGNLCQRVILFCEKNIGLKVPEKYDFINDDLKILNDFRENLENIEKEINEQNINYYVEYVVNQLFKANKYFNDQAPWTKKDDSLRLNTIVFVSLELIRKISILLYPIIPNTSLKVLNIFSIKEKDIKFDTISNNEYLKDKKEIIKLGILFEKIKK

SEQ ID NO: 184959 - protein, 497 aa, Unknown
  Bacterial polypetide isolated from the Sargasso Sea
MNKNFYITTPIYYPSAKPHMGHAYSSIVSDFFARLKKIQGYEVFFLTGTDEHGQKIQRAAEIEKKDPLKFCDEISKTFENLCKSLNLSNNDFIRTTEERHKKSVEHLWKVLEDKNEIYLSKYSGWYSVSDEAFYSNEEIEEIEGIKKSKSSGSKVEWVEEESYFFKLSKWQEPLLKFYKENPKFILPESRKNEVISFVKSGLKDLSISRKSFTWGIKVPSNTDHVIYVWLDALTNYLSALNYPDINDKFYKKFWPADVHIIGKDILRFHAVYWPAFLLAADINPPKRVYGHGWILSGDEKMSKSKGNILDPLEIIDQYGLDPLRYYLLKEVSFGNDGNISNEKLENCINSDLANNYGNLCQRVISFCEKNIGLKIPKIKDFDVEDLKILDNYKNNFEDLKMNIDNQNINFYLNFIVDQLFKANKYFNDQEPWKKKDDKKRLNTIVYVSLEIIRKISILLYPIIPQTALKVLNIFSIKEKDVEFATILNNKYLSSEDR

SEQ ID NO: 184960 - protein, 587 aa, Unknown
  Bacterial polypetide isolated from the Sargasso Sea
SPFDNYHSTHSEENRVLASDIYLKLRANGYIKSKSISQLFDPEKSMFLPDRFVKGTCPKCKSPDQYGDNCDACGATYSPTELINPKSAVSGATPVMKDTEHFFFDLPAFEDMLKEWTRSGALQTEMANKLDEWFEQGLQQWDITRDAPYFGFEIPDAPGKYFYVWLDAPIGYMGSFKNLCDKRPELSFDEFWAKDSKAEVYHFIGKDIVYFHSLFWPAMLHGSGYRQPNSVYAHGYVTVNGAKMSKSKGTFIKARTYLDHLDPEYLRYYYAAKLSSRIDDLDLNLEDFVQRVNSDLVGKLVNLASRTAGFITKRFDGKLAKIADTTLTDAFLAKQEQIAEFYETREYGKAMREIMALADIANGFVADAAPWQLVKQDDQQEAAHQVCSNALNLFRILVTYLKPVLPRLALDVEAFFQQTLTWDSLGQDMAGHKIAPFKAMMQRVELDKVNAMVADSKENLQATSEPEAPKGPLATVPISDTINFEDFAKIDLRIARIVKAEHVAEADKLLKLQLDIGGETRQVFAGIKSAYSPEDLEGKLTVMVANLAPRKMRFGMSEGMVLAAGPGGSDLWILEPHEGAQPGMRVK

SEQ ID NO: 184961 - protein, 417 aa, Unknown
  Bacterial polypetide isolated from the Sargasso Sea
MEKRHSKSVENLWSILEKKGEIYLSKYSGWYSVSDEAFYTESEIEDLDGTKKSISSGSKVEWVEEESYFFKLSNWQDKLIEFYNKNPDFILPETRKNEVISFVKSGLKDLSVSRKSFNWGIKVPSNKNHVIYVWLDALTNYLSALNYPNENDDLYKSFWPADLHLIGKDILRFHAIYWPAFLLAADIEPPKRVFGHGWILSGDEKMSKSKGNILDPLEIIEYYGLDPLRYYLIKEVSFGNDGNISQEKLESCINSDLANNYGNLCQRVLAFCDKNANLEVPDIDNLTEDDKIILDQYSKYYDDLIMYSDYQDVNSYINFIVEQLFSANKYFNDQEPWKKKNDKLRMNTIIYVALELIRKVTILLYPIIPSSSLKVLGIFGIKEEKINFETIKENNYLKKGLKLNKLDILFKKIEKND

SEQ ID NO: 184962 - protein, 275 aa, Unknown
  Bacterial polypetide isolated from the Sargasso Sea
YFFDLPAFEQMLKDWTRSGSLQDEMANKLQEWFTEGLQQWDISRDAPYFGFEIPGAPGKFFYVWLDAPIGYLASFKNYCDKTGVNFDQFWQKDSDAEIYHFIGKDIIYFHSLFWPAMLDGAGYRKPTSVYAHGFVTVNGAKMSKSRGTFIKARTYLEHLNPEYLRYYFASKLTSNITDLDLNLEDFAQKVNADLVGKVVNIASRCASFISKKFDGKLTADIAEPALLAEFTAAGETIAESFEKREFARAIREIMALADKANQYIDAKAPLGAGKK

SEQ ID NO: 184963 - protein, 513 aa, Unknown
  Bacterial polypetide isolated from the Sargasso Sea
MDKNYYITTPIYYPSAKPHMGHAYSSIIADFFARFKRIDGYKVYFLTGTDEHGLKIQRAAEKKGVEPLAFCDEISKTFKNLSKTLNLTNNDFIRTTESRHKKSVQYLWEELKKNDDIYLSKYSGWYSVSDEAFYNEDEIEDLDNKKVAISSKSPVEWVDEESYFFRLSKWEKALLEFYEKNPDFISPASRKNEVISFVKNGLKDLSVSRKSFSWGIKVPNDDDHVIYVWLDALTNYISALNYPNKDDELYKKFWPASVHLIGKDILRFHAIYWPAFLLAAKITPPKKVYGHGWILSNEEKMSKSKGNILDPLEIIKQYGLDPLRYYLIKEVSFGNDGNISQERLEDCINSDLANNFGNLCQRVSAFAIKNCDSKVPEKIKFENDDIKILDEYSKNLNNLRSEIDNQNINYYIDYIVNRLFEANKYFNDQEPWKKKDDKIRLNTIVYTTLEIVRKVTFLLYPIIPQSSIKALKIFNLEEKDVTFQSIGNNEFLKKGSAINKIDILFNKIEKEND

SEQ ID NO: 184964 - protein, 272 aa, Unknown
  Bacterial polypetide isolated from the Sargasso Sea
MSNNNNLLIVTSALPYANGPLHFGHLLEHIQTDIWVRTNRSLNKKCIYLCASDAHGTPIMLKAEEENTTPETLIKKITTEQKQSLINFNIVHDNYYTTHSEENKYFSELIFNKADTKKLILRKEIEQLFDDEKGLFLADRYVQGICPKCGAKEQYGDNCEVCGATYEATELIEPVSIFTGNTPSVKKSEHLFFDLESCSKSLKDWINKTGLQSAVKNKIKEWFTDGLKPWDISRDKPYFGFMIPGYEDKYFYVWLDAPHWLYCELRKLLETW

SEQ ID NO: 184965 - protein, 459 aa, Unknown
  Bacterial polypetide isolated from the Sargasso Sea
QKIERAAKQNNKEPITFCDEISQTFKNLSKTLNLSNNDFIRTTETRHKKAVQHLWNILEKKGEIYLSKYSGWYSVSDEAFYSEDEIEEVDNIKKSKSSGSLVEWVEEESYFFKLSNWQERLLDFYEKNKDFILPISRRNEVISFVKSGLKDLSVSRKSFKWGITVPTNENHVIYVWLDALTNYISALNYPDTSHDLYKKFWPANLHIIGKDILRFHAVYWPAFLLAADIKPPLRVYGHGWILAGDEKMSKSKGNILDPLEIIDKYGLDPLRYYLIKEVSFGNDGNISKEKLENCINSDLANNFGNFIQRVVSFNEKNLGLKIPEKGDFTNQDLKILSVFEKEYNNLVNFIDTQNLNLYINFIVDNLFAANKYFNDEEPWNKKNDLKRLNTIVYVALELIRKFALLLYPITPETSLKVLKIFDMNVNDIQLDTIKNHELNKKNAKINKIGILFKKIDKND

SEQ ID NO: 184966 - protein, 468 aa, Unknown
  Bacterial polypetide isolated from the Sargasso Sea
MDKNFYITTPIYYPSARPHMGHAYSSIIADFFARFKRIDGFNVYFLTGTDEHGLKIQRAAEKNGIETSKFCDEISKTFKDLSKTLNLTNTDFIRTTEQRHKESVQHLWNELKKNDDIYLSKYSGWYSVSDEAFYSDEEIEEIDGKKQSISSKSSVEWMDEESYFFRLSKWEKPLLDFYKENPDFISPESRKNEVISFVKSGLKDLSVSRKSFSWGIKVPNDNDHVIYVWLDALTNYISALNYPNKDDDLYKKYWPASVHLIGKDILRFHAIYWPAFLLAAKIEPPKKVYGHGWILSNDQKMSKSKGNILDPLEIINEYGLDPLRYYLIKEVSFGNDGNISQERLEDCINSDLANNYGNLCQRVITFAIKNCESKIPEKVKFEKEDLDILEKFSKNLALIRNKIDDQDINFYIDFIVNSLFEANKYFNDQEPWKKKDDITRLNTIVYTTLEIVRKISFLLYPIIPESTL

SEQ ID NO: 184967 - protein, 499 aa, Unknown
  Bacterial polypetide isolated from the Sargasso Sea
MNKKAIITSALPYSNGEIHLGHVASTYLPADVTTRFLKQNGVEAYYVCASDDFGTPILIQSEKLGKTPEEYVEHWNKRDYEDFTAFDIGFDFFYKTSSEENIAFVQDVFKKIEKNGHIYEKEIIQSFCTSCDKFLPDRFVKGTCPFCNAEDQYSDLCEKCGRIPEEIDNPHCSICGETPVQKSTNHYFFKLKNFSEPLLEYLENAPHLQKDVKKYVENWIKEGLVDWDITRDIPWGVPIPIDGLKDKVFYGWFDNHLAYISSTLKFLNDKNIDGKSFWNDADIYHFIGKDIVYHHYLFLPAMRLGLEKEFKLPDYIPTRGHLTLEGKKISKSRNWYIGLKDFLEKFPADYLRFYLISINPYSQDDLNFDWEQFSTKINSELIGNLGNLVNRALGFTNKTFDGVVPEPEKFDEKDSESEQKIKSLAEDIGKLMEENHLDRALKQLMEFSAHFNQYFQHKEPWKKGPGTNACIYLSVNAVRSIAICLHSFLPKFFTKNMVS

SEQ ID NO: 184968 - protein, 201 aa, Unknown
  Bacterial polypetide isolated from the Sargasso Sea
MKNFYLTTPIYYVNDKPHIGHAYTTILADVIARFHRNAGEKVLFLTGLDEHGQKVQQAAKDRNIKPKEHCDDMAPRFLDLWEKLHINYDDFLRTTEKRHEIVVKNILQKVYDSGDIYEDIYEGLYSVSEERFITDKEAESGDFRDIKKLKEKNYFFKMSKYQDRLIDYIKNNPKFIQPEHRKNEVLGFLNQPLADLCILDP

SEQ ID NO: 184969 - protein, 348 aa, Unknown
  Bacterial polypetide isolated from the Sargasso Sea
ESYFFKLSLWEKKLLDFYEKYPDSIQPKTRYNEVISFIKSGLKDLSISRTTFKWGIPVPNNSNHVMYVWIDALCNYLTSIGYPDVNDSNFVKYWPATHIVGKDILRFHAIYWPAFLMAADIEPPRKIFAHGWWTNEGQKISKSIGNVIDPYDIINKYGLDQIRFFLFREVPFGNDGDFSKNAIANRINADLSNNYGNLVQRICLFAVKNCNSLVDVSKKYTDSDNELLKFCEFNFSNYSNYMESQQIDKALKSIFEILSKTNYYVDEQAPWELKKTNANRMNDVLFITLNIIKFTSLMLIPIIPNSANKVLDILNINLNERNFSFMNIKNQNKFQILNPKPIFPRIDK

SEQ ID NO: 184970 - protein, 397 aa, Unknown
  Bacterial polypetide isolated from the Sargasso Sea
MISNDIDLIKRGTDEIIDEQSLKDKLNKGIPLTVKAGFDPTAPDLHLGHTILLNKMKQFQDLGHNVIFLIGDFTATIGDPTGKSELRPMMTDDEIKENCKTYKNQVFSILDRKKTKIEYNSKWLKKISASKLIEISSSYSVSRMLERDDFKKRFKQNISISIREFLYPILQGYDSVEMNADIELGGTDQKFNLLMGRHLQSIFSKTKEKQVVITLPLIEGLDGVKKMSKSLGNYIGIKDKPEEMYGKLMSINDELMWKYFELLSFKDLEYIDSLKKDVLSEKKNPKSAKMELAREIVDRFHGPSKAKKAEKNFISVFQNKANPSLDSIESFETAQLPLPNILRDAKVLASTSEARRLIQQKAIKVDDKVFNSPTELISQGTHLIKVGKKKFLKIKVK

SEQ ID NO: 184971 - protein, 480 aa, Unknown
  Bacterial polypetide isolated from the Sargasso Sea
MKRHLITSAIPYINGVKHLGNLVGSQLPADLFARYQRAKGNEVLFLCATDEHGTPAELAAEKAGIPITEYCDEMHTVQSNLAKGFRLSFDHFGRSSSQQNHRLTQHFAAKLAERGLVNEKTEKQVFSNQDQRFLPDRYIEGICPNCGFEEARGDQCDNCTKQLQPNELINPRSTISGSTDLEERETKHLHLRQSLMKEELESWIDSKSDWPILTTSIAKKWLNDGDGLQDRGITRDLNWGVPVKKGQENWPGMDGKVFYVWFDAPIEYIACAEEWVDAGKGEDWHRWWKIDKGADDVIYTQFMGKDNVPFHTLSFPATILGSGEPWKLVDYIKSFNYLNYDGGQFSTSRNRGIFMDQALEILPPDYWRWWLLSHAPESSDSEFTWENFQQTVNKDLADVLGNFISRVTKFCRSKFGEVVPTGGVWSQNEKKLVNEIEKRVMNYESYMESKEIRKSASELRAIWACGNEYLQSAEPWSTFK

SEQ ID NO: 184972 - protein, 514 aa, Unknown
  Bacterial polypetide isolated from the Sargasso Sea
MSGKNFYITTPIYYPSGKPHMGHAYSSIIADIFARFKRLENYNVRFLTGTDEHGLKIQREAEKNSKLPKAFCDELSLKFKSLSKTLNLSNNDFIRTTEKRHHKAVNEIWDRLVKSNDIYLSKYSGWYSVSDEAYYDNDEIESKNNIKVAKVSGSRVEWVEEESFFFKLSSWEKKLLEFYQSNPNFILPKSRRNEVVEFVKGGLKDLSVSRTSFSWGIPVPKNNKHVIYVWLDALTNYLSSLDFPDQKNIKYKNFWPADVHIIGKDILRFHAIYWPAFLMAAKLPLPKRVYGHGWILSDEKKMSKSLGNILDPLEIINEYGIDPLRYYLVKEVSLGNDGSISLKSLHDCINNDLANNYGNLCQRVFSFVEKNCDSKIPNYTNLSKEDEIITKNLIKKIPDLQNLMNKQDLNQYIKEVINFSFSANKYFNDLKPWDLKKVNIERMNAVIYTVLNQIKSISILLYPIIPDSTQKVLDCLRVPKNEFNLDCLLNFKYLKMDLSIKKPGILFKKIENDN

SEQ ID NO: 184973 - protein, 510 aa, Unknown
  Bacterial polypetide isolated from the Sargasso Sea
MTDSFYISTAISYTNGSPHIGHAYEVIAADVIARFKKLDGYDVFFLTGTDEHGLKVQQKAKELGINPKDFVDKVSKEFIELAKSLNCSYNDFIRTTDDRHKKNVHSIWKNLSDKGDIYLDQYSGWYSIRDEAFYNEEELVKSDNDSYLSPNGNPVEWIDEESYFFKLSKYEKQLLDLYEKNKSFILPNSRMNEIKNFVQSGLKDISISRKNISWGIPVEENNEHSIYVWLDALTNYISALDWCEGSKSFDKYWPADIHLIGKDITRFHAVYWPAFLFSAGLEVPKMIFSHGFLLNKGEKISKSVGNTVDPIKLLELYGVDQLRFYLLSATPFGNDGNYSHELIVNHSNALLSNDLGNLSQRCLKMVFSKCNGRIPNKGDLDNNDLSLLSNAYDLYQKSLECMADYQIHAYLNSIFDVISLANKYFSDQKPWELDKDNPDRMHTVLWVTCEILRITSILLQPVIVDGSNKLLDFLNIDSKERSFINLNSSFAVKSGLEIKEPEVIFPKINL

SEQ ID NO: 184974 - protein, 351 aa, Unknown
  Bacterial polypetide isolated from the Sargasso Sea
YFFRLSKWEKPLLEYYEANPDFIAPQSRKNEVISFVKSGLKDLSVSRKSFSWGIPVPNNKNHVIYVWLDALTNYLSALNYPNINDDLFKKFWPASIHLIGKDILRFHAVYWPAFLLAAKIALPKRVYGHGWILSGEEKMSKSKGNILDPLEIIKEYGLDPLRYYLIKEVSFGNDGNISQERLEDCINSDLANNYGNLCQRVTAFAIKNCNGKIPSEVNFHDEDLLILNKYKDNLDNIRSQIDNQNMNFYIDYIVNSLFEANKYFNDQEPWKKKDDKIRLNTIVYTTLEIVRKISFLLYPIIPESSLKALKIFNIEEKNIKLNSVSNNEYLTKGNNIHKIDILFKKIEKNND

SEQ ID NO: 184975 - protein, 252 aa, Unknown
  Bacterial polypetide isolated from the Sargasso Sea
MADPFYISTAISYTNGPPHIGHAYEVIAADAIARFKRLDGYDVFFLTGTDEHGLKVQKKAQELGIDPKKYVDEISKEFIQLSLSLNCSNDDFIRTTDERHVKNVQSIWKILFDKGDIYLDQYSGWYSITDEAFYNEEELIKTESNSFLSPDGNPVEWVDEESYFFKLSKYQNDLLELYERNKKFILPSSRMNEIKNFVRSGLKDISISRKNISWGIPVKGNKDHSIYVWLDALTNYISALDWCDNNESFKRF

SEQ ID NO: 184976 - protein, 676 aa, Unknown
  Bacterial polypetide isolated from the Sargasso Sea
MATSQRKILVTSALPYANGPIHLGHMLEYIQTDIWSRYQKLRGHECHYICADDAHGTPIMLKAQQLGMAPEEMIAQVNKEHQQDFADFNIAFDNYHSTHSDENRVLASDIYLKLRANGYIKSKSISQLFDPEKSMFLPDRFVKGTCPKCKSPDQYGDNCDACGATYSPTELINPKSAVSGATPVMKDTEHFFFDLPAFEDMLKEWTRSGALQTEMANKLDEWFEQGLQQWDITRDAPYFGFEIPDAPGKYFYVWLDAPIGYMGSFKNLCDKRPELSFDEFWAKDSKAEVYHFIGKDIVYFHSLFWPAMLHGSGYRQPNSVYAHGYVTVNGAKMSKSKGTFIKARTYLDHLDPEYLRYYYAAKLSSRIDDLDLNLEDFAQRVNSDLVGKLVNLASRTAGFITKRFDGKLAKIADTTLTEAFLAKQEQIAEFYETREYGKAMREIMALADIANGFVADAAPWQLVKQDDQQEAAHQVCSNALNLFRILVTYLKPVLPRLAQDVEAFFQQTLTWDGLGQDMAGHEIAPFKAMMQRVELDKVEAMVADSKENLQATSEPEAPKGPLATDPISDTINYDDFAKIDLRIARIVKAEHVAEADKLLKLQLDIGGETRQVFAGIKSAYSPEDLEGKLTVMVANLAPRKMRFGMSEGMVLAAGPGGSDLWILEPHEGAQPGMRVK

SEQ ID NO: 184977 - protein, 659 aa, Unknown
  Bacterial polypetide isolated from the Sargasso Sea
MRRIVVTSALPYANGSIHLGHLVEYIQTDIWARSQKMAENECLYICADDSHGTPIMLKAKELEVTPEELIKKTYDEHVKDFKDFQIEFDNFHTTHSDENKKISEEIYKSLKDKGNIISKEIEQFYDNEAKMFLPDRFIKGECPKCGAKDQYGDSCEECGATYSPTDVKNPISTVSNTTPVRKKTEHVFFQLSSYESFLKDWMQNNDIQREIKNKLSEWLEGGLVDWDITRDKPYFGFEIPDLKDKYFYVWLDAPIGYIASHKNYCDKNEKNYLDDWKEDSKTELYHFIGKDIAYFHGLFWPAMLEGAGLKKPNGVFCHGFLTIDGEKMSKSRGTFFNARTYLNHLQPDYLRYYFSSRLTSKIEDIDLSFDDFMTRVNSDLVGKIINIGSRCAKFINKDFNDQLSKEIGNKLLLDSLLSKKDEIIANYESRNFATNIRIITSLSDEVNKYLDEEKPWVKIKDQDTKESVQTICSDGINAFRMIMTYLKPVLPEIASKVESLLNADPFNYQNICNIILDHKINAFEPLITRIEKESIEKMKDENKQESTVSEGTDKITIDDFIKVDLRIAKVINVKEIEDSRKLLELEVDLGDETRTVFAGIKKSYSPDELIGKSVVVIANLKPRKMKFGVSNGMVLATQHDGEIIILQPEKDVPPGSKIS

SEQ ID NO: 184978 - protein, 356 aa, Unknown
  Bacterial polypetide isolated from the Sargasso Sea
MSKNVLVCVAWPYASGSRHLGHIGGAYLPADIFARYHRAVGNNVLMVSGSDVHGTPITVRADAEGVQPIDIVNKYHNEFLGYWEKLGISWDNYTTTMTDNHKEVTQEMFLKIKQNGFIEKNKSIQAFDPQEKKFLPDRYVEGTCPCPVAYSEARGDQCDSCGKTLDPEELINPISKISGNKAEFKETEHYFLKLSALNERLSDWLNSKEGWRPHVINFSKSFVEEGLQDRAITRDLDWGIDIPENELGDGKKIYVWFEAVIGYLSAAKEWAINNGTPDAWKDFWMNEDAESYYFVGKDNVPFHAIIWPAMLLAYGDLNLPTNVPANQYILIKGEKASASRGVGKTLNDYLDEWNPD

SEQ ID NO: 184979 - protein, 513 aa, Unknown
  Bacterial polypetide isolated from the Sargasso Sea
MGKNFYITTPIYYPSARPHMGHAYSSIIADFFSRFKTIDGYKVYFLTGTDEHGLKIQRSAEKEGLDPLNFCDQISKTFRDLSKTLNLSNTDFIRTTEERHKKTVQHLWKELENNDDIYLSNYSGWYSVSDEAFYNEDEIEEVEGKKISISSKSTVEWIEEESYFFRLSKWEKPLLDFYEKNPNFISPASRKNEVISFVKSGLKDLSVSRKSFSWGIKVPGNDKHVIYVWLDALTNYISALNYPNKEDELFKKFWPASIHLIGKDILRFHAVYWPAFLLAAKIELPKKVYGHGWILSGDEKMSKSKGNILDPLQIIDEYGLDPLRYYLIKEVSFGNDGNISQDRLEDCINSDLANNYGNLCQRVTAFAIKNCDGKIPEKIKFEVDDLNILNKFRDNLENIRSNIDQQNLNFYIDYIVNSLFEANKYFNDQEPWKKKDDIIRLNTIVFTALEIIRKISFLLYPIIPGSVLKALKIFNLGENDIKLEDISKNEFLIKGNSINKIDILFKKIEKDND

SEQ ID NO: 184980 - protein, 348 aa, Unknown
  Bacterial polypetide isolated from the Sargasso Sea
MPKTRRILITSALPYANGHIHLGHLVEYIQTDIFARFQRLRGNQAVYLCADDTHGTAIMIRAQTEGRTEHDLIASMRDAHLADFEGFHITFDHYGSTDSEENRWLCSHIWQSLRKHDLIVQREVSQLFDLKAGIFLADRFVQGSCPRCHAPDQYGDSCETCGATYSPAELINPVSTLSGTTPEIRKAEHLFVTLESLRPFLTKWTQESGSLDPKISNYLAGHFLNEPLRDWDISRPSPYFGFEIPDAPGHYWYVWFDAPIGYIATTEQWAKKHGGSFADWWCSGDTNQPNAEIHHFIGKDITYFHTLFWPAMLKIADMNLPTKVRVHGFLTVNGQKMSKSRGTFLLAR

SEQ ID NO: 184981 - protein, 499 aa, Unknown
  Bacterial polypetide isolated from the Sargasso Sea
MKPFYITTPIYYVNDKPHIGHAYTTILADVLARHYRNIGRDVFLLTGLDEHGQKVQQAAESRNINPKQHCDEMAPRFLKLWDKLHISYDDFIRTTEKRHTDIVKYFLQKVYDKGDIYEDSYEGLYSVSEERFITEKEAESGDFRDIKELKEKNYFFKMSKYQNKLIKHIEENPSFIQPKFRRNEVLGFLRSPLQDLCISRPKSRLSWGIEMPFDSNYVTYVWFDALINYVSAIGLNSDEKKYKTFWPVNYHLIGKDILTTHSVYWPTMLMSAGIKLPKSIFAHGWWLSDQSKMSKSLGNVIDPLKLIETYGVDPVRFYLMKEMVLGQDSNFSLDSFVKCYNSDLANDFGNLLSRVTNLINKFYDRKIPNGEDNSEAGKAVRKSAREMVACVLNLIDEMKINDAINHTFKFIREVNKYLEITAPWKLLKKDIDSAGKILYTAAESLRITALILSPIMPNRAQTIFDIFHIDSNEIEWGGLIAGTKIEVHKPLFPRIETNS

SEQ ID NO: 184982 - protein, 148 aa, Unknown
  Bacterial polypetide isolated from the Sargasso Sea
MSNNTEKRNILVTSALPYANAPLHLGHILEHTQTDIWVRYQKLIGNNCTYVCADDAHGTPIMLKAEELNKTPEELIEEIYVNHVNTFSSYNIGHDNFHTTHSEENRILSERIFNALDEKGLIEVKTIEQLYDTSRNMYLSDRYVKGKC

SEQ ID NO: 184983 - protein, 496 aa, Unknown
  Bacterial polypetide isolated from the Sargasso Sea
MNNSFYISTPIYYVNDKPHIGHAYTTILADVIARFYRQLNYDTFFLTGLDEHGQKVQEAASNRKVEPQDHCNEMAPRFTELWEKLHISNDDFIRTTEERHKKVVQEFLQLVFDKGDIYKDEYTGLYSVSEERFITEKEAESGIFRDIKELKEINYFFKMSNFQTQLIEHIENNNNFIQPAHRKNEILGFLKQPLSDLCISRPKSRLNWGIELPFDDEYVTYVWFDALINYLTATGYGEDDLSYNKWWPADCHLIGKDILTTHAVYWPTMLLSAGIPLPKTIFAHGWWLSDSSKMSKSVGNVVNPLDLIEEYGVDPVRYYLMREMVLGQDANFTMESFIKRYNSDLANDYGNLLNRVSTLIKKNYDGLIPDKGEQTSSEEEIIKSAEALLNGMSNKIKEMKINDSIEDIMKFVRSINKYMEEQKPWKLVKDDKVGAGTVLYTAGESMRVATILLSPVMPNRCAEVLHTFNSGKSLEWGGLKPGVKLNDHETLFPRIQ

SEQ ID NO: 184984 - protein, 538 aa, Unknown
  Bacterial polypetide isolated from the Sargasso Sea
MPKNILVSVAWPYASGSRHLGHIGGAYLPADIFARYNRMIGNNVIMVSGSDVHGTPITVRADDEGVEPIEIVNRYHAEFLSYWEKLNIQWDNYTTTMTDNHKEVTQEMFLKIKENGYIEKNKSIQAFDPKENKFLPDRYVEGECPKCNYLEARGDQCDSCGITLDPEELINPKSKINGNPAEFKETEHYFLKLSALNDKLADWLNTKNGWRPHVINFSKSFVDEGLQDRAITRDLDWGIEIPDNELGDGKKIYVWFEAVIGYLSASKEWAVNNGTPEAWKDFWLDENAESYYFVGKDNVPFHAIIWPAMLLAYGGLNLPTNVPANQYILIKGEKASASRGVGKTLNDYLDEWNPDSLRYSLASILPEQNDSEISEDEMIRRNNEELVAAWGNLVQRVFSQYINNFDDLDTTFEYEKIDVDLMEGAKNCFKTTGEMIEKVELKSSLQNVMAYVNSINAYLTETEPWKVIKEDKKRASGILHCAITSIDACATMFTPFMPTTSKIVSDAIQKEDQNSWGINEIKKGAPLKNIGHLFKKFD

SEQ ID NO: 184985 - protein, 418 aa, Unknown
  Bacterial polypetide isolated from the Sargasso Sea
MSKNKETFTITAALPYANGPIHIGHLAGVYIPADIFARYKRLTNNDVAFICGSDEHGVAISLASKKASISPKELIDKYDKMIKDSFDEFGILFDNYSRTSSKVHHETSLNFFENLKEKNLFSLIKSEQFFDVNENQFLADRYISGTCPVCGFDEAYGDQCEKCGSTLSPEELINPKSTISNSSPILKETKHYYIKLDEFEEFIRNWITVENKDKWKTNVVGQVKSWLDSGLKPRAVTRDLDWGIPVKIDDEDGKVLYVWFEAPIGYISSTIEWANANDKDWQQYWKNPETNLIHFIGKDNIVFHCIIFPIMLRMFGDFILPKNVPANEFLNLEGNKISTSKNWAVWLHEYLIDFPNMQDVLRYVLTSTCPETKDNDFTWKDFQIRNNSELVAIYGNFTNRVLSLINKYYHGKIPNPNQ

SEQ ID NO: 184986 - protein, 512 aa, Unknown
  Bacterial polypetide isolated from the Sargasso Sea
MSQGSEKRSILVTSALPYANAPLHLGHILEHTQTDIWVRFQRLLGNECIYVCADDAHGTPIMLKAEELDITPENLIEDIYKEHKSTFEDYRISHDNFHTTHSEENRILSERIFNALQKNDLIEQKKINQLFDTTKQMFLSDRYVKGSCPVCHEKDQYGDNCEKCSATYDAVELIDPVSVISGTKPIIKESDHLFFKLSSLKEQIINWLNNSNIQDPVRNKLNEWLEGDLRDWDISRDSPYFGFEIPNFQDKFFYVWLDAPIGYLASHLNYLKKNDQEAEFEEFWNSKSKGEVFHFIGKDIMYFHTLFFPVMLSESNLKTPNGVFVHGFLTLNGDKMSKSRGNFISAENYINTLDADYLRYFFASKLGTGVDDIDLNLEDFRQKSNSDLVNKYANIASRTAKFLNKNYDGVLSNELDQPELIQEFLDKSEIISGLFEDLEFSKAIKEIMSLADRANQYIDSKEPWVLVKDENNKDKVHSICTTSLNLFRIITIMLQPVIQGFTKKAFVFLNEK

SEQ ID NO: 184987 - protein, 718 aa, Unknown
  Bacterial polypetide isolated from the Sargasso Sea
MSASDLTSVQAAAPQGSRQILVTSALPYANGQIHIGHMVEYIQTDIWVRTLRMHGHEVYYIGADDTHGTPVMLRAEKEGLTPKQLIDRVWTEHKRDFDSFGVSFDNFYSTDSDENRVLSEKIYLALQEAGFIAEREIEQAYDPVKEMFLPDRFIKGECPKCHAKDQYGDSCEVCGSTYLPTELLNPYSVVSGATPVRKTSKHYFFRLSDPRCESFLREWVSGLAQPEATNKMREWLGDAGEAKLADWDISRDAPYFGFEIPGAPGKYFYVWLDAPVGYYASFKNLCDRNGIDFDAWIRPGSKAEQYHFIGKDILYFHTLFWPAMLEFSGHRTPTNVFAHGFLTVDGAKMSKSRGTFITAQSYIDTGLNPEWLRYYFAAKLNATMEDIDLNLDDFQARVNSDLVGKYVNIASRAAGFLIKRFDGRVQDSAMNHPLVAKLREAIPQIAASYEAREYGRALRHTMELADEVNAYVDGAKPWDLAKDPANAVALHETCSVSLESFRLLSLALKPVMPRVAEAVESFFGIAPLAWADAAKPLSSEQPIKAYQHLMTRVDPKQIEALLAANRDSLQAEATGAAAASANAAKEAKSNVKANAKQAAVNGADDAPISIDDFAKIDLRIAKIVACQAVEGSDKLLQLTLDVGEEKTRNVFSGIKSAYQPEQLVGKLTVMVANLAPRKMKFGLSEGMVLAASAADEKAEPGLYILEPHSGAKPGMRVK

SEQ ID NO: 184988 - protein, 275 aa, Unknown
  Bacterial polypetide isolated from the Sargasso Sea
MQHKQRQILVTSALPYANGPIHIGHMVEYIQTDIWVRFHKMRGHQCFYVCADDAHGTPIMLRAEEKNISPETLISEMQQEHQNDFNDFVINFDNYHTTHSSENQIFANTIYEKLDNDGHISKKTIKQFYDPNKEMFLPDRFIRGECPKCHAIDQYGDNCEVCGATYSPTDLKNPVSVISGEKPVEKESEHYFFKLSNFEEILHRWTRAGHLQKEVVNKLDEWFEAGLQEWDISRDVPYFGFEIPNAPNKYFYVWLDAPIGYLASFKNFCDKKELD

SEQ ID NO: 184989 - protein, 549 aa, Unknown
  Bacterial polypetide isolated from the Sargasso Sea
MNKKAIITSALPYSNGEIHLGHVASTYLPADVTTRFLKQNGVEAYYVCASDDYGTPILIQSEKLKQTPQEYVAHWNKRDFEDFTAFDIGFDFFYKTSSEENISFVQDVFKKIEKNGHIYEKEIIQAFCTSCDKFLPDRFVKGTCPFCDAEDQYSDLCEKCGRIPEEIENPHCSICGETPVQKSTNHYFFKLKNFSEPLLEYLENAPHLQKDVKKYVENWIKEGLVDWDITRDIPWGVPIPIDGLKDKVFYGWFDNHLAYISSTLKFLNDKNIDGKSFWNDADIYHFIGKDIVYHHYLFLPAMRLGLEKEFKLPDYIPTRGHLTLEGKKISKSRNWYIGLKDFLEKFPADYLRFYLISINPYSQDDLNFDWEQFSTKINSELIGNLGNLVNRALGFTNKTFDGVVPEPEKFDEKDSESEQKIKSLAEDIGKLMEENHLDRALKQLMEFSAHFNQYFQHKEPWKKGPGTNACIYLSVNAVRSIAICLHSFLPKSSQKIWSQLGLDGNVSDVHWNEMSNLELKSGHKIGTTEPIFSKIEQSVIDEEQSKLGN

SEQ ID NO: 184990 - protein, 676 aa, Unknown
  Bacterial polypetide isolated from the Sargasso Sea
MATSQRKILVTSALPYANGPIHLGHMLEYIQTDIWSRYQKLRGHECHYICADDAHGTPIMLKAQQLGMAPEEMIAQVNKEHQQDFADFNIAFDNYHSTHSEENRVLASDIYLKLRANGYIKSKSISQLFDPEKSMFLPDRFVKGTCPKCKSPDQYGDNCDACGATYSPTELINPKSAVSGATPVMKDTEHFFFDLPAFEDMLKEWTRSGALQTEMANKLDEWFEQGLQQWDITRDAPYFGFEIPDAPGKYFYVWLDAPIGYMGSFKNLCDKRPELSFDEFWAKDSKAEVYHFIGKDIVYFHSLFWPAMLYGSGYRQPNSVYAHGYVTVNGAKMSKSKGTFIKARTYLDHLDPEYLRYYYAAKLSSRIDDLDLNLEDFVQRVNSDLVGKLVNLASRTAGFITKRFDGKLAKIADTTLTDAFLAKQEQIAEFYETREYGKAMREIMALADIANGFVADAAPWQLVKQDDQQETAHQVCSNALNLFRILVTYLKPVLPRLALDVEAFFQQTLTWDALNQDMAGHEIAPFKAMMQRVELEKVNAMVADSKENLQATSETEAPKGPLATDPISDTINFEDFAKIDLRIARIVKAEHVAEADKLLKLQLDIGGETRQVFAGIKSAYSPEDLEGKLTVMVANLAPRKMRFGMSEGMVLAAGPGGSDLWILEPHEGAQPGMRVK

SEQ ID NO: 184991 - protein, 130 aa, Unknown
  Bacterial polypetide isolated from the Sargasso Sea
MATDPRTMLVTCALPYANGSIHLGHMLEHIQADIWVRYQRMRGHQVHFVCADDAHGTPIMLKAQQLGITPEEMIAAVSKEHQADFAGFNISFDNYHSTHSDENRELAELIYGRLQAGGKIKSRTISQLFD

SEQ ID NO: 184992 - protein, 331 aa, Unknown
  Bacterial polypetide isolated from the Sargasso Sea
MSAPATDLSAGAPSGRRQILVTSALPYANGQIHIGHLVEYIQTDIWVRTLRMHGHEVYYVGADDTHGTPVMLRAEKEGLTPKQLIDRVWQEHKRDFDNFGISFDNYYSTDSEENRVLSESVYLALKEAGLIDARDIEQAYDPVKEMFLPDRFIKGECPKCGAKDQYGDSCEVCGSTYLPTELINPYSVVSGATPIRKTSTHYFFRLSDPRCENFLRAWVSGLAQPEATNKMREWLGDAGEAKLADWDISRDAPYFGFEIPGAPGKYFYVWLDAPVGYYASFKNLADKRGLDFDAWIRKGSTAEQYHFIGKDILYFHTLFWPAMLEFSGHRT

SEQ ID NO: 184993 - protein, 175 aa, Unknown
  Bacterial polypetide isolated from the Sargasso Sea
MSETFYITTPIYYVNSHPHIGHAYTTIVTDVFVRYRKLFGEETYFLTGTDEHGQKIAESAQAANLKPQEFVDRMTSEFRDMWPHLHIQQDQFIRTTDFFHKSAVQAVLQKIYDQGEIYLKDYEGLYCVGCERFLDQEELTEEGNCPDHQKPPQVRQEKNYFFLNECIPGVAYWTP

SEQ ID NO: 184994 - protein, 313 aa, Unknown
  Bacterial polypetide isolated from the Sargasso Sea
MRYLITSALPYANAPLHIGHVLEIVQTDVWVRSLKLAGNEVFYYCASDTHGTPIMLKAQELNTTPEELSKKYKKLHSDTYKSYNVDLNNFHTTHSKENKELTEHFFNSAYEKGDIYTKEIEQLFDEQKNIFLSDRFVKGECPSCGAKDQYGDACEVCGKTYDALDLKNPYSTLSNSKPVIKKSKHYFFKLNNFKEFLNDTVSEISNQDPIKEKLKEWFDSGLKDWDISRDEPYFGFKIPNEDSKYLYVWLDAPIGYLSSIKNWCDSNDIDFNDFINDSKIVHFIGKDIVYFHLLFWPATLKAANFPIPNEVYV

SEQ ID NO: 184995 - protein, 328 aa, Unknown
  Bacterial polypetide isolated from the Sargasso Sea
QNSKEWFDVGLRDWDISRDAPYFGFLIPEEEDKYFYVWLDAPIGYFASLKNLSEKSDLQFEEYFKDGSDTHMVHFIGKDIIYFHALFWPAVLEGSDVKKPDAIYVNGFLTVNGEKMSKSRGTFIKARTYLDHLDPEYLRYYFAYKSSAGVDDFDLDTEDFQNRINADLIGKWINIASRSSKFIREHFENNLSADVDKDLMETFDSGADEIKAHYEKREFGQSMRKIMLLADNANQYLDQEKPWIMIKNEEKKDEVQKVCTNALNMFLKLTIMLKPVMPDVASNVESFMNLSDLNWSNIHDVINDHKINNYENLMYRIREEDIERIIKK

SEQ ID NO: 184996 - protein, 394 aa, Unknown
  Bacterial polypetide isolated from the Sargasso Sea
DILARYYKLKNFNVYFLSGTDEHGQKVEKASTVSKMDTQDFVDKMSVSFRELIPFLGCEIDDFIRTTESRHIKAAQALWNKLEENNQIYLSNYEGWYSIRDEAFYLESELVKKGDSFFTQSGDPVEWIKEESYFFKLSSWENKLLEYYKNNPNSIAPKSRFNEVISFIKGGLKDLSISRTTFKWGVKVPNNENHVMYVWIDALCNYLTSIGYPDLDNKTFKNFWPGFHMVGKDILRFHAVYWPAFLMAAEIDPPKRIFAHGWWTNEGKKISKSVGNVIDPYEIINKYGLDQIRFFLFREVPFGNDGDFSKDAISNRLNADLSNNYGNLVQRITTFCVKNCNSNIKVNSNFTKEDKNLIEYMNLKYDEYTKFMSEEKIDKSIKCVFELLSDTNAY

SEQ ID NO: 184997 - protein, 538 aa, Unknown
  Bacterial polypetide isolated from the Sargasso Sea
MSKNVLVCVAWPYASGSRHLGHIGGAYLPADIFARYNRLIGNNVIMVSGSDVHGTPITVRADDEGVEPIEIVNRYHNEFLGYWDKLNIQWDNYTTTMTDNHKEVTQEMFLKIKENGFIEKNKSIQAFDPQEKKFLPDRYVEGECPKCNYLEARGDQCDSCGTTLDPEELINPKSKINGNNAEFKETEHYFLKLSALNDKLSEWLNSKEGWRPHVINFSKSFVEEGLQDRAITRDLDWGIDIPENELGDGKKIYVWFEAVIGYLSAAKEWAVNNGTPDAWKDFWLNEDAESYYFVGKDNVPFHAIIWPAMLLAYGDLNLPTNVPANQYILIKGEKASASRGVGKNLNDYLDEWNPDSLRYALASILPEQNDSEISEDEMIRRNNEELVAAWGNLVQRVFSQYINNFENLEFDFELNDVDKKIINEGNDCFEKTGELIEKVELKSSLQSVMGYVNKINAYLNETEPWKVIKEDSSRATAILHTSLTAIEACASLFTPFMPTTSEIVKGAIEKNTNNNWSVNDIKKGAPLQDIGHLFKKFD

SEQ ID NO: 184998 - protein, 488 aa, Unknown
  Bacterial polypetide isolated from the Sargasso Sea
SIIADFFARFKRIDGYKVYFLTGTDEHGLKIQRAAEKKGVEPLAFCDEISKTFKNLSKTLNLTNNDFIRTTESRHKKSVQYLWKELKKNDDIYLSKYSGWYSVSDEAFYNEDEIEDVDNKKVAISSKSPVEWVDEESYFFRLSKWERPLLEFYEKNPAFISPASRKNEVISFVKNGLKDLSVSRKSFSWGIKVPNDDDHVIYVWLDALTNYISALNYPNKDDELYKKFWPASVHLIGKDILRFHAIYWPAFLLAAKITPPKKVYGHGWILSNEEKMSKSKGNILDPLEIIKQYGLDPLRYYLIKEVSFGNDGNISQERLEDCINSDLANNFGNLCQRVSAFVIKNCDSKVPEKIKFENDDIKILDEYSLNLDKLRSEIDNQNINYYIDYIVNRLFEANKYFNDQEPWKKKDDKIRLNTIVYTTLEIVRKVTFLLYPIIPQSSLKALKIFNLEEKDVILNSIGNNEFLKKGSAINKIDILFNKIEKEND

SEQ ID NO: 184999 - protein, 650 aa, Unknown
  Bacterial polypetide isolated from the Sargasso Sea
MDNSKKTKRKILVTQALPYANAPLHLGHILEAVQTDIWTRFQNFNDNECLFFCADDTHGTPVMLKANEMGIKPEELISDVYKDHKSSYELYGINFANFYSTHSDENRKYSEYIYECAKNNNLISKANIEQYYDEKEEMFLSDRFIKGTCPKCGAEDQNGDNCGVCGASYNVLDVKKPISIISNTVPIKKESEHIFFDLPQKNKMLKDFLKNVDLQESIKNKLNEWLNDDLKKWDISRDAPYFGFEIPGEENKYFYVWVDAPIGYLASISNWAEKNKLNMQDLWSENSKYEIYHFIGKDIAYFHGLFWPALLSAANLKLPSGINVHGFLTINGEKMSKSKGTGILAKEFAEITNPETLRYYFAAKLNNKVEDIDLNFDDYVQRINSDLVGKYLNIASRSASFLKKNNNILSTNIDKNILDNLASKKNEIVSFYESREYSKLVRIIMDLADDVNKYINEQTPWKKEKDEAVDISSTAIKAFYMLSLYLHPIIPSITNEAFKFLNIKKVSINNVDEAITKINDYKPLLNRLEKIIIPEEENMDNVNLINIDQFSAVDLRVAKIIKADDVEGADKLLQLTLDVGDLGTRNVFAGIKSAYKPEDLTDKYIVLVNNLEPRKMKFGISEGMVLASSNDEGIYLVSPDEGAKPGMKVR

SEQ ID NO: 185000 - protein, 397 aa, Unknown
  Bacterial polypetide isolated from the Sargasso Sea
MATDPRTMLVTCALPYANGSIHLGHMLEHIQADIWVRYQRMRGHQVHFVCADDAHGTPIMLKAQQLGITPEEMIAAVSKEHQADFAGFNISFDNYHSTHSDENRELAELIYGRLQAGGKIKSRTISQLFDPEKSMFLPDRFVKGTCPKCKSPEQYGDNCDSCGATYSPTELIDPKSAVSGATPVMKDSEHFFFDLPQFEKWLAEWVRGSGAIQEEMANKMQEWFESGLQQWDITRDAPYFGFEVPGAPGKYFYVWLDAPIGYMASFKNLCNKRGDIDFDSYWKADSEAELYHFIGKDIAYFHCLFWPSMLEGAGFRKPTKVNVHGYVTVNGAKMSKSKGTFIKASTYLNHLDPECLRYYYAAKLNSRIDDLDLNLDDFVARVHADVVNKLVNLASRN

SEQ ID NO: 185001 - protein, 108 aa, Unknown
  Bacterial polypetide isolated from the Sargasso Sea
MTNSFYISTAISYTNGSPHIGHAYEVIAADVIARFKRLDGYDVFFLTGTDEHGLKVQQKAKEVGVKPKDYVDKVSKEFIELAKYLNCSNNDFIRTTDDRHKKNVHSIW

SEQ ID NO: 185002 - protein, 491 aa, Unknown
  Bacterial polypetide isolated from the Sargasso Sea
MRKSNHEVLSFCADDAHGAPIMMKADELKIKPTDFIDQMKKDHQDSLKKFGIEYTNYHSTHSNENEKLVSEIFLDAKNSGHIYKEDVEQCFDEEKKMFLADRYVTGDCPKCGAENQYGDGCDSCGATYSATEIINPKSSLSGTKPITKISEHIFFDLKKSKSNLKKFLKTASIQDSVVGKLSEWLEGDLRSWDISRDAPYFGFKIPNEVDKYFYVWVDAPIGYIASAKNWAEKNNLNIDHLWGKSSEYEVHHFIGKDIIYFHGLFWPALLNNSNYKLPDSIHVHGFVSVNGEKMSKSKGTFITADQFADVCDPEILRYYFASKLNSKIEDLDLNLEDLAQKINSDLVGKFSNIFSRSAPFISKNNNRLSNSINEEHLSACMKDIDKILNYYENKEFSKAVKLIMQIADNANKFINENTPWKIDQNDALVIASTALNVFKNLCILLSPIMPNLCDQMLKMLKINSFSIDNLEDKMIDSEINEFKPIISRIEP

SEQ ID NO: 185003 - protein, 512 aa, Unknown
  Bacterial polypetide isolated from the Sargasso Sea
MSNSFYITTPIYYVNDIPHIGHAYTTILADVLSRYQKQVGNRPFFLTGLDEHGQKVQDAAKDRGIETQDHCDEMSKRFISLWERLHISNDDFIRTTEIRHKNVVREILKTVFDVGDIYEDEYQGLYSVSEERFITEKEADTGEFRDIKTLKEKNYFFRMSKYQDRLINHIEANPNFIQPDHRKNEILGFLNQPLNDLCISRPKSRLNWGIELPFDSEYVTYVWFDALINYITAAGYLDDKSLFKKFWPADIHLIGKDILTTHAVYWPTMLMSAGIELPKMIFAHGWWLMDKEKMSKSSGNVVNPMDLIDDYGVDPVRYYLMREMVLGQDANFTAKSFINRYNSDLANDLGNLLSRISTLIKKNYNSEIPEGCSPGNKEKEIKDESIELVKNFDKNMSSLSINDAIEETLQFVRSINRYFEHKAPWKLVKEDMKSAGTVLYTGAEALRICAILLSPIMPKRMKLLLSVLNAESSDRTWGNLEPGKILGQHKPLFPRINSKIFNDSRYSLSPLL

SEQ ID NO: 185004 - protein, 452 aa, Unknown
  Bacterial polypetide isolated from the Sargasso Sea
MNKNYYITTPIYYVNDKPHIGHAYTSIACDVLARFKRLDGYNVKFLTGTDEHGQKVEKAAKLKNKSPLEYANFISKDFKSLTKTLNLSNDDFIRTTEKRHILAAQSLWSKLYENKHIYLDKYAGWYALRDEAFYSEKEIINGKAPSGADVSWVEEESYFFDLSKWQDKLLEFYNKNPNFILPKSRMNEVKSFVKGGLRDLSVSRTSFEWGVKVPNNDKHIMYVWLDALTNYLSAIGYPDTLENEYVNFWPADIHMVGKDILRFHAVYWPAFLMAAELPLPKRIFAHGWWTNEGKKISKSEGNVIDPLEIISSYGLDQIRYFLLREVPFGSDGDFSKTALLARINGDLSNDLGNLCQRVISMIYKNCNGFIPNKCEKLNDRDIIFYNKSNALYEKVKNEIDKQSFHEAIKLIWAFISDANKYVDEQAPWKLRKTDGKRMNDVLWILADTIRKI

SEQ ID NO: 185005 - protein, 459 aa, Unknown
  Bacterial polypetide isolated from the Sargasso Sea
MNKNYYITTPIYYPSAKPHMGHAYSSIVVDFFARFKRIEGYKVFFLTGTDEHGLKIQRAAEKSKKKPLEFCDEISKTFKDLSKILNLSNNDFIRTTEKRHQKSVQNLWNVLEKKGEIYLSKYSGWYSVSDEAFYLNDEIETKNGIKVSKLSGSVVEWLEEESYFFKLSNWQNKLLEFYEKNPNFILPKSRKNEVVSFVKSGLKDLSVSRKSFSWGIKVPSNKEHVIYVWLDALTNYLSALNYPDIDSNMYKNYWPADVHMIGKDILRFHAVYWPAFLLAADLPAPKRVYGHGWILSGEEKMSKSKGNILDPIEIINEYGLDSLRYYLLKEVSFGNDGNISKDKLISCINSDLANNFGNLCQRVLAFTDKNLGLVVPKTESLNKDDLIILNYFSENYQNLIDFINDQNINSYMNFIVEQMFIANKYFNDQEPWKKKDDVKRLNEIIYTSLELIRKISILL

SEQ ID NO: 185006 - protein, 535 aa, Unknown
  Bacterial polypetide isolated from the Sargasso Sea
FLPDRYVEGTCPHCDYESARGDQCDNCGKTLDSKELKNPRSKLNPDAKIEFRETEHLFFKLSEFRDPLLEWLSSGKDHWRSSVINFTRNWLQEGLIDRPITRDLEWGIDIQREGYEKKRMYVWFEAVMGYYSASLHWAKNEGKPDLWKDWWENDSAEHYYFMAKDNIPFHTIIWPAMLSGCGLHLPHDVPANEYLLLDSTQFSKSRRHAVWMPDYLERYDPELLRYYLASIMPEQKDANFTWEDYVTRINNELIGNFGNLMHRVISFAHKNFPDGLSSSESTIPALNDKISEVHQRVAEALEACKFKRALQAIMELSQAGNIELNDAAPWKQVKDDRDACEASLVTFLNLCRSLSVMMTPFLPKSSQKAWEYLNQEGKIDSHGWDSALEFKTEFKLQQPLPLFSKLNMEEILEKEMPPEEENELANVKPEITFDDFKKLDIRIGTVEKVEEHPNADKLWLLDVNFGGPIRRIVTGLRGIYESDDLLGKKIAVLVNLAPAKFRGEESNGMLLAAEGNDIVSLLQPDKEIEDGSEVH

SEQ ID NO: 185007 - protein, 537 aa, Unknown
  Bacterial polypetide isolated from the Sargasso Sea
MTKNILVSVAWPYASGSRHLGHIGGAYLPADIFARYHRIVGNKVLMVSGSDAHGTPITVRADEEGVTPIDIVEKYHKEFLGYWDKLSISWDNYTTTMTENHKEVTHDIFLKLLEKEYIYKAKTLQAYDPSENRFLPDRYVEGKCPKCDYESARGDQCDSCSSTLDPEELIDPKSKISGNKAEFKETEHFFLKLSALGEDLIPWLETKEDWRPHVINWAKSFVKEGLQDRAITRDLDWGIDIPVDDLGDGKKIYVWFEAVIGYLSASIEWSNNDESRNWEDWWKNKDAESYYFIGKDNVPFHSVIWPAILAGYGDLNLPTNVPANQYILIKGEKASASRSVGKSLSEYLEEWEPDAIRYTLASVLPEQADSELSESEMIRRNNEELVATWGNLVQRVFTQIENNIDNINEASDETEVDTTLLKSGEEAFNNVGEHIEKVELKAALQEAMRYVSKVNIYLNETEPWKIIGEDSKRASRILYTSLTAIDACSNLLSPFMPSTSEKVSNAIPKESNNQWSLNSIKIGTQIETIGHLFKKFD

SEQ ID NO: 185008 - protein, 423 aa, Unknown
  Bacterial polypetide isolated from the Sargasso Sea
FFARFKSIDDYNVHFLTGTDEHGLKIQRSAEKAGKDPKEFCDQISQTFKDLSKTLNLSNTDFIRTTEDRHKKTVQHLWSLLEKNDDIYLSNYSGWYSVSDEAFYNEDEIEEIGGKKIAKSSKSTVEWIEEESYFFRLSKWQKPLLEFYENNPDFILPESRKNEVISFVKSGLKDLSVSRKTFKWGIPVPSNDKHIIYVWLDALTNYLSALNYPDTNNELFKKFWPASIHLIGKDILRFHAVYWPAFLLAAKIELPKKVYGHGWILSGEEKMSKSKGNILDPLKIIEEYGLDPLRYYLIKEVSFGNDGNISQDRLEDCINSDLANNYGNLCQRVTAFAMKNCDGKIPEKIDFQPDDLKILNKFQENLDTIRSKINDQNINFYIDFIVNSLFEANKYFNDQEPWKKKNNLIRLNTIVYTTLEIVR

SEQ ID NO: 185009 - protein, 306 aa, Unknown
  Bacterial polypetide isolated from the Sargasso Sea
MKKSKETFTITAALPYANGPIHIGHLAGVYIPADIYARFKRLTKNDVAFICGSDEHGVAISLASKKASISPKQLIDKYDKIIKSSFQEFGISFDNYSRTSKKIHHEMSLELFNLLKEKNLFSLNESEQYYDTKENQFLADRYITGTCPCKKFDEAYGDQCEKCGATLSPDELINPRSAISDSKPILKKTKHYYIKLDEFEEFIREWITVENKEKWKINVVGQVKSWLDSGLKPRAVTRDLDWGIPVKVDDEDGKVLYVWFEAPIGYISSTKEWAETNKKDWKNYWKSPNTNLIHFIGKDNIVFHCI

SEQ ID NO: 185010 - protein, 609 aa, Unknown
  Bacterial polypetide isolated from the Sargasso Sea
GNECLYFCADDTHGTPVMLKAKELGIDPEELIKRTREEHIKSYSRFNINFDNFYTTHSDENKKYAEDIYQKCKEGNLIFKKEIEQFYDSEEGLFLSDRFIKGTCPKCGAEDQYGDGCSVCGTTYTPDDLLNPVSSLSNSELTKKRTEHVFFDLPQMKDFLENYLKDLTLQDPIKNKLNEWIEDGLKPWDISRDKPYFGFEIPGEKDKYFYVWLDAPIGYLASAKNWAENNNMDMKDLWGESSDYEIHHFIGKDIAYFHALFWPALLKSSNIRLPESINVHGFLTIDGEKMSKSNGTFINADDFAENYDGELLRYYFADKFNNSIDDLDFNEDEFIQKINSDIVGKYLNIASRVSKFIEKNGNNLSANLDVDFIEKNLSMIDEVIEHYENLNLSKSVKIIMKMADEVNKYINENEPWKSSEEKAVEVSSTAINCFRVISILLNPVLPTITSKALEVFNDSATNDFNNIKDYLVDTKINPYKPLLKRLEKAKINEEIEMEDSNLINIKDFAKVELRVAKIVKAEGIEEADKLIKLHLDVGDLGERTVFAGIKSAYDPESLNGRHVVLVANLEPRKMKFGVSEGMVLASSNDEGSIYLISPDEGAKPGQLVK

SEQ ID NO: 185011 - protein, 292 aa, Unknown
  Bacterial polypetide isolated from the Sargasso Sea
GYLASFKISCEKQKIDFNYWCNPDTSTEMYHFIGKDIIYFHALFWPAMLQGSDFRKPSAIYAHGFLTVEGQKMSKSRGTYITARSYLNHLNPEYLRYYFAAKLSAGIDDIDLNLDDFLTRVNSDLIGKVINIASRCSGFINKNFDGKLSNNIHDLDIQSEIANASDVIADAYENREYSKAMREIMTLADKANQYIDHHKPWVIAKQENRDDELQSICTTGINLYRLLALYLKPVLPTIAKNTEEFLNIDPLEWKDSKKMLLNHKIEKYSPIMTRIEKKKIEDMITETKNNNQ

SEQ ID NO: 185012 - protein, 348 aa, Unknown
  Bacterial polypetide isolated from the Sargasso Sea
MGHAYTTIATDVFRRYMKLFGAETYFLTGTDEHGQKIAESAANSGVSPQKFADKISQEFRELWPHLHIENNQFIRTTDSKHKVCVQQILQKIYDQGEIYIKEYEGLYCIGCERFLDETELENGNCPDHQTPPEFHKEQNYFFRMSSYQAWLLEELNQNDNWIYPRRYRNELIQLLKNPLQDLCISRPKSRLKWGIELPFDNKFVTYVWFDALLNYVSALDWPNGLKFKKFWQNVHHTIGKDILKTHGIYWPCMLKAAGIPVFKKLIVHGHWVVEGNKMSKSLGNVVDPLAMKDKLGVDAMRYFLLRDMSFGEDSNFTEELAIVRYNGDLANNFGNLMNRSISMIRKNF

SEQ ID NO: 185013 - protein, 361 aa, Unknown
  Bacterial polypetide isolated from the Sargasso Sea
MSNSSFTVTAALPYANGPLHLGHVSGVYLPADIFVRYLRMNHQDVLFLCGSDEHGAAITLRAKKDKTSPQEIVDKYNQQISSSFTDFGISFDVFHRTSSSLHHQTARDFFKKLWDDNRFIEKTSEQYYDNDFNQFLADRYITGSCPKCNHDSAYGDQCENCGAVLSPLDLISPKSTLSGKVPVLKKTTHWYLPLDQHEKWLKDWVKDGILDGKKHHNPQEWRNQVVGQCLSWIEGGLRPRAMTRDLDWGVKVPIENAEGKVLYVWLDAPIGYISATKHWAEKEGKDWKKYWCKKEAGDRKLVHFIGKDNIVFHTIIFPILLKDHGEFILPDNVPSSEFLNLEGNKFSTSRNWAVWLHDFLE

SEQ ID NO: 185014 - protein, 420 aa, Unknown
  Bacterial polypetide isolated from the Sargasso Sea
MSEKRRILVTSALPYANGSIHLGHLLEHIQTDIWTRFQRLRGNECYSVCADDAHGTPVMLKAQELGITPEEMVARTRAEHHQDLVDFHVDYDNYYVTHSPENKALCEEIYTRLDNAGYISKRTINQLFDPEKEMFLPDRFVKGTCPSCGAEDQNGDSCDVCGATYSPTEVKNPRSVVSGATPVLRESEHFFFDLPKFEGMLKEWIRSGALQEEMANKLQEWFTEGLQQWDISRDAPYFGFEIPGAPNKFFYVWVDAPVGYMASFKNFCDQNNLEFDDFWKADSEAELYHFIGKDITYFHCLFWPAMLEGAGYRKPTGVNIHGFVTVNGAKMSKSRGTFIKGRTYLDHLNPEYLRYYFASKLGDGVTDIDLNFTDFAQKVNSDLVGKVVNIASRCASFITKRFDGKLSDNVIEPELIAKFQ

SEQ ID NO: 185015 - protein, 265 aa, Unknown
  Bacterial polypetide isolated from the Sargasso Sea
MNTPTVKSRNILITQALPYANAPLHLGHMLEAVQTDIWSRFQNFNGNKCYFFCADDTHGTPVMLKANELGIKPEELIADVLEDHKSTYDLYSINFNNYYTTHSDENKQFSEQIYESAKKNNLISKSSVEQYFDEKEEMFLSDRFIKGTCPKCGAEDQHGDNCGVCGASYDILDLKNPISIISNSVPVRKKSDHIFFDLPQKKEMLKEFIKNVELQTSIKNKLNEWLDDDLKKWDISRDAPYFGFKIPDEIDKYFYVWLDAPIGYL

SEQ ID NO: 185016 - protein, 313 aa, Unknown
  Bacterial polypetide isolated from the Sargasso Sea
MSNKYYITTPIYYVNDKPHIGHAYTSVATDFIARFMSLKGYDVRFQTGTDEHGLKIQKAAEAKKIEPIELCNQNSQIFRDLTVVLNLSNNDFIRTTEERHIDGASYLWKRLYERNQIYLGEYTGWYSISDETFYNEKDLVKQNDGSFKTITGGPVEWITEKSYFFKLSEWSNKLLDLYSSNPNFISPASKRNEVIKFVESGLNDLSVSRTSFKWGIKTPTDESHIMYVWLDALTCYTNGINYLNENENAMKEYWNNVVHIVGKDILRHHAVYWPAFLLAAELDLPKKIFAHGWWTNEGNKISKSLGNVIDPIE

SEQ ID NO: 185017 - protein, 119 aa, Unknown
  Bacterial polypetide isolated from the Sargasso Sea
MAQRKILITSALPYANGPTHLGHLLEYIQTDIWSRFQKLQGHETYYVCADDAHGTPIMLNAQKQGITPEEMVKNVSIERQRDFADFNIKFDNYHSTHSQENKEFSELIYNRLNDAGHIK

SEQ ID NO: 185018 - protein, 438 aa, Unknown
  Bacterial polypetide isolated from the Sargasso Sea
MDKNFYITTPIYYPSGKPHMGHAYSSIIADFFARFKSIDNYEVHFLTGTDEHGLKIQRSAEKVGKKPKEFCDQISQTFKDLSKTLNLSNTDFIRTTEDRHKKTVQHLWSLLEKNDDIYLSNYSGWYSVSDEAFYNEDEIEEIDGKKIAKSSKSNVEWIEEESYFFRLSKWQKPLLEFYENNPDFILPESRKNEVISFVKSGLKDLSVSRKTFTWGIPVPSNDKHIIYVWLDALTNYLSALNYPDTNDELFKKFWPASIHLIGKDILRFHAVYWPAFLLAAKIELPKKVYGHGWILSGEEKMSKSKGNILDPLKIIEEYGLDPLRYYLVKEVSFGNDGNISQERLEDCINSDLANNYGNLCQRVTAFAMKNCDGKIPTKIDFQADDLKILNKFQENLDNIRSKIDEQNINFYIDFIVNSLFEANKYFNDQEPWKKKDNL

SEQ ID NO: 185019 - protein, 334 aa, Unknown
  Bacterial polypetide isolated from the Sargasso Sea
MNSTMEDLDLNLDDFQARVNSDLVGKYVNIASRAAGFLIKRFEGRVQDSAMHHPLLATLRAAVPQIAANYEAREYNRALRQTMELADAVNAYVDTAKPWDQAKDPANAVALHETCSVSIEAFRLLSLALKPVLPKLAEAVEAFLGIEPLVWADANVPLSSTRPINAYKHLMTRVDPKQIEALIAANRESLQATPDAAAAPADAKTKSKAAKAAAAGKDETPGIISIDDFAKIDLRIAKIVDCKAVEGSDKLLQLTLDIGEEKTRNVFSGIKSAYQPEQLIGKLTVMVANLAPRKMKFGLSEGMVLAASATDEKAEPGLYVLEPDSGAKPGMRVK

SEQ ID NO: 185020 - protein, 421 aa, Unknown
  Bacterial polypetide isolated from the Sargasso Sea
MSKRPSYYITTAISYVNGLPHLGHAYEAISADAMARFKRLDGYNVFFLTGTDEHGQKVEKSAIQAGEDPLIFCDGNADAFRQMTHLLNISNDDFIRTTEQRHIRASQSIWNNLWDAGDIYLGKYAGWYSVRDEAYFEEAELIIDPDDPKKKIAPSGASVEWVEEPSYFFKLSSYTQPLLDYYEANPQFILPESRKNEIINFVKQGLRDLSISRTTFKWGVPVPSDEAHIMYVWLDALTNYITALGFPDKSQNINKDSEVFTMETHWPADLHIIGKDIVRFHAVYWPAFLMSANLPVPKRIFGHGFLNVEGEKMSKSLGNVISAQDLVEEFGLDEIRYFLLREVPYGQDGSFSRESIIQRINADLANDLGNLAQRCLSFIYKNCDGAIPFPGEFNGDDKKLLESSIILLSDIRNYFEKPGVS

SEQ ID NO: 185021 - protein, 320 aa, Unknown
  Bacterial polypetide isolated from the Sargasso Sea
DTIEVLSFIKGGLKDLSISRTTFNWGVPVPNNSKHVMYVWIDALCNYLTAIGYPDTNNNNYKKFWPATHIVGKDILRFHAVYWPAFLMAAGIEPPKRIFAHGWWTNEGQKISKSLGNVIDPYEIINEYGLDQIRFFLFREVPFGNDGDFSKKAIANRINADLSNNFGNLVQRISSFAVKNNDSLLKPTENLINADHDLINILQNKFDEYCNFMNNQQIDRAIKSVLELISAGNAYVDTQAPWTLKKTNKIRMEEVLYIVTNIIIKSAIMLYPIIPTSSKKILNIFNYNMDNNKFEDFTKLINQNIKINNPEPIFPRILND

SEQ ID NO: 185022 - protein, 468 aa, Unknown
  Bacterial polypetide isolated from the Sargasso Sea
MNEFFYITTPIYYVNSHPHIGHAYTTIATDVLTRYMKLFGAETYFLTGTDEHGQKIAESAANSGIEPKEFVDKISQEFRELWPNLHIEHDQFIRTTDSNHKACVQRILQKIFDQGEIYLKEYEGLYCIGCERFFDESELENGNCPDHQTPPEFYKEQNYFFKMSSYQKWLTKELNQNEDWIYPGRYRNELIQFLKDPLQDLCISRPKSRLKWGIELPFDNKFVTYVWFDALLNYVSALDWPDGEKYKKFWPHVNHTIGKDILKTHGIYWPCMLKAAGMPVFKKLVVHGHWVVEGSKMSKSLGNVVDPLAMRDQLGVDALRYFLLRDMSFGEDSNFTEELAVTRYNGDLANNFGNLMNRSISMSRKNFQGCVPPSGKTGDQEKELHQSFANGVKKCHEYIIKFQPHRTLEHVALLSSKVNKYIDTCKPWKLTKEEKDRERLGTVLYTALDMSRIIVGLLDPVMPKKMCE

SEQ ID NO: 185023 - protein, 565 aa, Unknown
  Bacterial polypetide isolated from the Sargasso Sea
MSEKNKTFTITAALPYANGPLHIGHLAGVYIPADIFSRYQRLINNDVAFICGSDEHGVAISLQAKRESITPKELIDRYDKLIRDSFEEFGISFDNYSRTSRKIHHETSIKMFNDLNKKNLFSSKITKQFYDEEAKQFLADRYIIGTCPCGKFDEAYGDQCEKCGATLSPDELKNPRSAISKSKPILKDAKHWYINLDKFEDFIRDWIIKEHKDDWKPNVLGQVKSWLDNGLKPRAVTRDLDWGIPINIDGEEGKVLYVWFEAPIGYISATKEWAEKNNKDWNKYWKDKDTKLVHFIGKDNIVFHCIIFPIILRMTGDHILPFNVPANEFLNLEGNKISTSRNWAVWLHEYLKDFPDMQDVLRYVLTVNAPETKDNDFTWKEFQMRNNSELVAIYGNFINRVLTLIIKYYDGILPNPESIDEENQKIINEAKTFPKLIGNFLDEFKFREAIKSLMNLARNGNKFLAESEPWKLQKSNPEKVKEILYVGYIISCYLSILSEPFLPFTSNKLKSQLNLGEIDSWSELENLDSKIDFSFKIKSEGVLFRKIEDDEIIKQVEKLNKMSSQ

SEQ ID NO: 185024 - protein, 504 aa, Unknown
  Bacterial polypetide isolated from the Sargasso Sea
MSFYITTPIYYTNDIPHIGHAYTTIACDIRARYNNIDNGEVFFLSGTDEHGQKVEKAAKDANIDPKLFVDNLSINFEKLIPSLGCEINDFIRTTETRHIKSAQALWSKLVENNQIYLSNYEGWYSIKDEAFYQESELQKVDGKFVTKDGSVVEWIKEESYFFKLSEWQDKLLEYYESYNRPISPESRRNEVISFVKSGLKDLSISRTTFKWGIPVPNNKDHVMYVWIDALCNYLSAIEYPDTNSNKFKKYWPAFHVVGKDILRFHAVYWPAFLMAADLEPPLKIFAHGWWTNEGKKISKSLGNVIDPYEIINEYGLDQIRYFLFREVPFGKDGNFSRNSISTRVNADLSNTYGNLIQRIATFVVKNCDSKITPSNNLTDKDRELQEIMQNTVVNYHHSMGEMLFDLSLKNIMGLLNEANAYVDSQAPWKLKTTDPERMKVVLYIVLNIIIKSSIMLYPFIPQSSEKALSFFNISKDQISFKDLELLIMSDIKINNPKPLFPRID

SEQ ID NO: 185025 - protein, 502 aa, Unknown
  Bacterial polypetide isolated from the Sargasso Sea
MTLENKKIFVTNALPYANGPIHIGHMVGYIQADIWSRFQRMQGHDVVFICASDAHGTPIMLSAEDLGVEPVELAAEYTRQHENDFNDFHVSFDNYHTTHSEENEELVGEIYQRLKENDCIRTEVIEQAYDDQENMFLPDRYVRGTCPKCNAPDQYGDNCEKCGATYKPTDLIDPISAISGKAPSLKESEHYFMKLTKFENMLEDWIETIDIHSSVKSKLKEWFDVGLRDWDISRDAPYFGFLIPGEEDKYFYVWLDAPIGYFASLKNLSEKSDLQFEEYFKDGSDTHMVHFIGKDIIYFHALFWPAVLEGAGVKKPDAIYVNGFLTVNGEKMSKSRGTFIKARTYLDHLDPEYLRYYFAYKSSAGVDDFDLDTEDFQNRINADLIGKWINIASRSSKFIREHFENNLSADVDKDLMETFDSGADEIKAHYEKREFGQSMRKIMLLADNANQYLDQEKPWIMIKNEEKKDEVQKVCTNALNMFLKLTIMLKPVMPDVASNVES

SEQ ID NO: 185026 - protein, 315 aa, Unknown
  Bacterial polypetide isolated from the Sargasso Sea
MESKRRYTITSALPYTNGKIHIGHLAGAYIPADIYARFKRVTDNDVAYICGSDEHGVAISIRAKKEEKTAKEIIDKYHDLIKKSFSDFGISFDNYSRTSAKIHHETASEFFKFLENKKVFEIKDSKQLYDPKENQFLADRFVEGECPKCNYEAAYGDQCENCGSSLSPEELINPISKISGTKPIEKETKHWYLPLGNYEEFLKEWFLEGKKNTAKTNVYGQVKSWVDQGLESRAITRDLDWGIPVPSEDGKGKVLYVWFDAPIGYISSTKEWAKRENKNWEPYWKDKNTKLVHFIGKDNIVFHCIIFPIILKAHG

SEQ ID NO: 185027 - protein, 111 aa, Unknown
  Bacterial polypetide isolated from the Sargasso Sea
MNFYITTPIYYTNDIPHIGHAYTSIACDIIARYNKLLGNNVFFLTGTDEHGQKVEKAAINSNLKPKEFVDKLSVNFINLIPFLGCEIDDFIRTTEERHLKASQELGHNRKK

SEQ ID NO: 185028 - protein, 331 aa, Unknown
  Bacterial polypetide isolated from the Sargasso Sea
MKNYFYITTPIYYVNDKPHIGHAYTTILADVLARYNRNIGRKTFFLTGLDEHGQKVQQAAEENGIDPKKHCDQMAPRFNELWKKLHISNDDFIRTTEERHQKVVKEFLQIVMDNGDIYEAEYEGLYSVSEERFITEKEAESGEFRDIKKLKEKNYFFKMSKYQQDLIEHIESNPNFIQPEHRKNEILGFLRQPLNDLCISRPKSRLSWGIELPFDSDYVTYVWFDALINYITAVGFKEDKDQFDSWWPVSYHLIGKDILTTHAVYWPTMLLSAGIQLPQSIFAHGWWLMGESKMSKSLGNVINPMDLIDDYGVDPVRYYLMREMVLGHESS

SEQ ID NO: 185029 - protein, 403 aa, Unknown
  Bacterial polypetide isolated from the Sargasso Sea
CTYVWFDALLNYVTALGWPEDSRYEQFWKHCHHVIGKDILKTHGIYWPCMLKAGGFPVFKKLAVHGHWVVRGSKMSKSLGNVVNPLEMKDLIGVDGLRYFLLREMSYGEDANFTEDLVFARYHGELSNNFGNLLNRSISMSRKNFGYEVPPRGEPGKQEIELYQMFEQETSQIKAWVQQFEPHRALERIAMMSSAVNKYLDENKPWKLAKEEDQNERLGTVLYTALDASAWLVCLLEPVMPEKMKAARIQLGLGESPMTLEMLKPGLVQSGTPLPLPEPLFPRIQLKQKEPEKPGPTPKAKPQSEEKQEAELENLVGIESFQKLDFRTGRILESKKVTGSDKLLVSQVDLGESKPRSIVSGVAEFYRPEDLPGMNVVVVANLKPVKLRGELSEGMILATDDGN

SEQ ID NO: 185030 - protein, 469 aa, Unknown
  Bacterial polypetide isolated from the Sargasso Sea
MTFVITTPLYYVNDKPHLGSIYTTIICDSIARYKRLAGEDVMFITGVDEHGLKIQRTANEKGIEPKSHCDEISEIFKNNWKNWNISFDKFIRTSSKNHEFVVNEFYERVKASDDIYMGVQKGWYCVGCEEFKDNPENSPTYKCPIHQKNLEWKNEENLFFRLSKYQKEIEKIINKPSFIEPIERKNEIINFVSRGLKDFSISRTNVSWGIPVPGNDNHTFYVWFDALLGYVSAISSDSTEHSLKKSIKCGWPADVHFIGKDILRFHAVYWPAMLISANMKVPQKVFGHGFLTREGQKMGKSLGNVLDPDLLLTKYGNDPVRWYLIKDISLGNDGDFQDKRFVDIINNDLANTIGNLLNRTSSMSRKWFDNKVPNNEKILSDNKLEKSVKIAVENYINNFDNYKLDLAANEILSLAINTNLYLNDNQPWLLIKDKDNLPLVKQIIYNVLESTRIIGLLLIPLLPELFYKN

SEQ ID NO: 185031 - protein, 491 aa, Unknown
  Bacterial polypetide isolated from the Sargasso Sea
DNCGVCGASYNVLDVKKPISIISNTAPIKKESEHIFFDLPQKNKMLKDFLKNVDLQESIKNKLNEWLNDDLKKWDISRDAPYFGFEIPGEENKYFYVWVDAPIGYLASISNWAEKNKLNMQDLWSENSKYEIYHFIGKDIAYFHGLFWPALLSAANLKLPSGINVHGFLTINGEKMSKSKGTGILAKEFAEITNPETLRYYFAAKLNNKVEDIDLNFDDYVQRINSDLVGKYLNIASRSASFLKNNNNILSTSIDKNILDNLVSKKDEVVSLYESREYSKLIRIIMDLADDVNKYINEQTPWKKEIDEAVDISSTAIKAFYILSLYLHPIIPSITNEAFKFLNIKKVSMNNVDEAITKINDYKPLLNRLEKIIIPEEENMDNVNLINIDQFSAVDLRVAKIIKADDVEGADKLLQLTLDVGDLGTRNVFAGIKSAYKPEDLTDKYIVLVNNLEPRKMKFGISEGMVLASSNDEGIYLVSPDEGAKPGMKVR

SEQ ID NO: 185032 - protein, 651 aa, Unknown
  Bacterial polypetide isolated from the Sargasso Sea
MDIPTKNNRKILVTQALPYANAPLHLGHILEAVQTDIWTRFQNLNGNDCHFFCADDTHGTPVMLKANEMGITPEKLIEDVYQDHKSTYELYDINFANFYSTHSDENKKYSEFIYKCAKENKLISKSVVEQYFDETEKMFLSDRFIKGTCPKCGAENQHGDNCGVCGASYNVLEIENPLSTISNTKPVKKESEHIFFDLPAKRDMLKEFIEKVDIQESIKNKLKEWLGDDLKKWDISRDAPYFGFEIPGEDNKFFYVWVDAPIGYIASISNWANSNQIEMEDLWSENSAYEIYHFIGKDIAYFHGLFWPALLSSAKLKLPSGINVHGFLTINGEKMSKSLGTGILAKDFAKITNPETLRYYFAAKLNNKVEDIDLNFDDYVQRINSDLVGKYLNIASRSASFLKKNKNNLSDDINAEIINSLLNKKDEIINLYEKREYSKVIRLIMDLADYVNKYINEETPWKKDEDEAVKISTTALNAFKILSIYLHPVIPNLTNEAFNFLNIIDLTFDSIEKPLTKKINNYKPLLNRLEKIIIPEEEDMDNVNLIDINHFSSVDLRVAKITKADDVEGADKLLQLTLDVGDLGTRNVFAGIKSAYKPDELTDRLVVLVNNLEPRKMKFGISEGMVLASSNNDGIYLVSPDEGAEPGMKVR

SEQ ID NO: 185033 - protein, 235 aa, Unknown
  Bacterial polypetide isolated from the Sargasso Sea
MDKNFYITTPIYYPSAKPHMGHAYSSIIADFFARFKKMDDFNVCFLTGTDEHGLKIQRAAEKQNIDTLEFCDQISQTFRDLSKTLNLTNTDFIRTTEERHKKTVQYLWKELEKNDDIYLSKYSGWYSVSDEAFYNDDEIESIEGNKVAISSKSKVEWIEEESYFFRLSKWEKPLLDYYQSHPNFIAPESRRNEVISFVKSGLKDLSVSRKSFSWGIKVPNNNDHVIYVWLDALTN

SEQ ID NO: 185034 - protein, 359 aa, Unknown
  Bacterial polypetide isolated from the Sargasso Sea
MNDLWSDKSDYEIHHFIGKDIAYFHGLFWPALLDSAGFRLPDGINVHGFLTINGEKMSKSKGTGILARDFVNITNPETLRYYFAAKLNNKVEDIDLNFDDYVQRINSDLVGKYLNIASRSASFLKKNKNVISEDINHNVLKNLVEKKNVIIDLYDSKQYSKLIRIIMDLADDINKYINEETPWKKDNQEAVTIASTAINAFKILSIYLHPIIPNITKEAFKFLNIDLSSIDDVDKILTNKINNYKPLLNRLDKIIIPEEEDMDNVNLINIDQFSAVDLRVAKIIDAKDVEGADKLLQLNLDVGDLGTRNVFAGIKSAYKPDELIDRLVVLVNNLEPRKMNLVFRKVWFWLSVTKMGFIW

SEQ ID NO: 185035 - protein, 416 aa, Unknown
  Bacterial polypetide isolated from the Sargasso Sea
SIQAFDPKENKFLPDRYVEGECPKCNYLEARGDQCDSCGITLDPEELINPKSKINGNPAEFKETEHYFLKLSALNDKLADWLNTKEGWRPHVINFSKSFVEEGLQDRAITRDLDWGIEIPENELGDGKKIYVWFEAVIGYLSASKEWAMNNGTPEAWKDFWLDKDSESYYFVGKDNVPFHAIIWPAMLLAYGDLNLPTNVPANQYILIKGEKASASRGVGKTLNDYLDEWNPDSLRYSLASILPEQNDSEISEDEMIRRNNEELVAAWGNLVQRVFSQYINNFDDLDTSFEYEKIDEELIEGAKNCFKTTGEMIEKVELKSSLQNVMAYVNSINAYLNETEPWKVIKEDKKRATGILHCAITSIDACATMFTPFMPTTSKIVSNAIQKEDENSWGINEIKKGAPLENIGHLFKKFD

SEQ ID NO: 185036 - protein, 248 aa, Unknown
  Bacterial polypetide isolated from the Sargasso Sea
MKDKQRQILVTSALPYANGPIHIGHMLEYIQTDIWVRFQKMRGNQCFYICADDSHGTPIMLKAQEKNVPPETLIEQMKNEHERDFHDFAIDFDNYYSTHSTENQMLANIIFEKLNERGHIKKRVIKQLYDPEKNMFLPDRFIRGTCPKCNATNQYGDNCEVCGATYSPTDLINPISAITGKEPIEKESEHYFFKLYDFNEILHKWTREGHLQNEVTNKLDEWFEAGLQEWDISRDEPYFGLKYLIQKI

SEQ ID NO: 185037 - protein, 405 aa, Unknown
  Bacterial polypetide isolated from the Sargasso Sea
DILKRFYDCRGLNSYFLTGTDEHGQKVERAAQEKNIDPQKFTDMVSENFKDLSNLLNLSNDDFIRTTEERHKKSVQNLWRVLLEKDEIYLSKYSGWYSVRDEAFVADNEIVEKNGKKYNSFGSELSWVEEESYFFRLSKWQDKLLDFYKNNPNFIVPKSRSNEVIKFVESGLKDLSVSRTTFKWGIDVPTDEKHIVYVWLDALTNYISALDYPNKNSDLYKKYWPGIHVVGKDIIRFHAIFWPAFLMAAELDPPKQIVAHGWWTNEGQKISKSLGNVIDPKELIDEYGLDSVRYFLFREVPFGNDGDFSKMAIKNRINGELANNYGNLIQRILSFICKNLEQNIDLTKDNFNFEILKQINDSEKELFDYMENYKYDEYLKKLFLFMNDLNNYVDKSAPWVLKKTD

SEQ ID NO: 185038 - protein, 534 aa, Unknown
  Bacterial polypetide isolated from the Sargasso Sea
MKYLITSALPYANAPLHLGHILEIIQTDVWVRHLNLKGLEAHYFCASDTHGTPVMLKSKEENITPEKLIENIYGIHKNTFTNYNVNLANFHSTHSDENKQLTIEIFKKALDKGFVYTKKIKQLFDNEENMFLSDRFVKGTCPACGAADQYGDACEVCGSTYDALDLSDPISTLSDSKPSIKESEHYFFKLNELSGYLSSKVDELSNQSPIKHKLKEWLDGELKDWDVSRDEPYFGFKVPGEENKYIYVWMDAPVGYLSSIKNWCDKNKYDYEKLLSDKDTKLVHFIGKDIVYFHLLFWPAMLHAADIENIEEVFVHGFLTIEGMKMSKSRGNFILADKALEYANADFYRYYLSSKLNTDISDINFSVDDFVQKINSDLIGKYINIASRTQNFLTKHNNSEVKQNCQNETNKYKDLYAEIIGQTNDREYSKALKNIMSIADEANSYISSMEPWSKAKDGDIDSCIEICSESLNLFKDLTILLSPYIPNITESLFELLNLKQTDYDQISKDCLTEVKPFKAIITRLEKSEFEGILN

SEQ ID NO: 185039 - protein, 511 aa, Unknown
  Bacterial polypetide isolated from the Sargasso Sea
MTFVITTPLYYVNDKPHLGSVYTTIICDSIARYKRLAGEDVIFITGVDEHGLKIQRTANEKGIAPKSHCDEISEVFNNNWKDWNISFDKFIRTSSKNHEFVVNEFYERVKASDDIYMGVQKGWYCVGCEEFKDNPENSSTYKCPIHQKNLEWKNEENLFFRLSKYQKEIEKIINEPSFIEPIERKNEIINFVSRGLKDFSISRTNVTWGIPVPGYDNHTFYVWFDALLGYVSAISSDATEHSLEKSINGGWPADVHLIGKDILRFHAVYWPAMLISAKMKVPKKVFGHGFLTREGQKMGKSLGNVLDPDLLLTKYGNDPVRWYLIKDISLGNDGDFQDKRFVDIINNDLANTIGNLLNRTSSMSRKWFDNKVPNNEKILSENKLENFAKIAVEKYIYNFDNYKLDLAANEVLSLAINTNLYLNDNQPWLLIKEKDNLPLVKEIIYNVLESTRIIGLLLLPLLPELSTKINEQLGSTYNKNVPWQQQLKWGLLIGDSCLPKPFPIINKLEYE

SEQ ID NO: 185040 - protein, 171 aa, Unknown
  Bacterial polypetide isolated from the Sargasso Sea
MGETLSWDGVAQPLTNHQLAPFKALFSRIEPAKIEAMIDASKEDLAKEQAPKASGPLVDDPISETISYDDFAKIDLRVALIKKAEAVPEADKLLKLQLDIGGETRQVFAGIKSAYNPEDLEGKLTVMVANLAPRKMRFGMSEGMVLAAGPGGKDLWILEPQDGAQPGMRVK

SEQ ID NO: 185041 - protein, 266 aa, Unknown
  Bacterial polypetide isolated from the Sargasso Sea
MNFYITTPIYYTNDIPHIGHAYTSIACDIIARYNKLLGNNVFFLTGTDEHGQKVEKAAINSNLKPKEFVDKLSVNFINLIPFLGCEIDDFIRTTEERHIKAAQELWKQLEKNNQIYLSNYEGWYSVRDEAFYLENELKKIDGKYVTDNGSPVEWVKEESYFFKLSEWQNKLIDYYEKNPESILPKTRYNEVLSFIKSGLKDLSISRTTFNWGVPVPNNSKHVMYVWIDALCNYLTAIGYPDINNKNYKQFWPATHIVGKDILRFHA

SEQ ID NO: 185042 - protein, 425 aa, Unknown
  Bacterial polypetide isolated from the Sargasso Sea
MKPWDISRDKPYFGFEIPGEKDKYFYVWLDAPIGYLASAKNWAENNNMDIKDLWGESSDYEIHHFIGKDIAYFHALFWPALLKSSNIRLPESINVHGFLTIDGEKMSKSNGTFINADDFAENYDGELLRYYFADKFNNSIDDLDFNEDEFIQKINSDIVGKYLNIASRVSKFIEKNGNNLSANLDEGFIEKNLSMIDEVIEHYEDLNLSKSVKIIMKMADEVNKYINENEPWKSSEEKAVEVSSTAINCFRVISILLNPVLPTLTSKALEVFNESSTNDFNNIKGYLVDTKINPYKPLLKRLEKAKINEEIEMEDSNLINIKDFAKVELRIAKIVKAEAIEEADKLIKLHLDVGDLGERTVFAGIKSAYDPESLNGRHVVLVANLEPRKMKFGVSEGMVLASSNDEGSIYLISPDEGAKPGQLVK

SEQ ID NO: 185043 - protein, 378 aa, Unknown
  Bacterial polypetide isolated from the Sargasso Sea
WPAMLHGAGFRTPTAVFTHGFLTINGQKMSKSRGTFITARTYLDHLDPDYLRYYFAAKLNNRVEDLDFSVEDFVTRVNADLVGKVVNIASRCSGFIEKHFSGQLSGIEPEVALNEQFRERHGVICQHFEHREYSRAVREIMSLADMANQYINDLKPWIIAKDPDRRDELQAVCTHGLNLFRMLITWLAPVVPDLAERSAQFLRHPVSAREAFSQIQSPLLNHQIGPFSRLLDRIDLDQAQAMMEETQLMNSDATDSAAGKHLRDEPLSPQITIDDFSKVDLRIVRIIAAEHVEGADKLLKFTLDLGSETRDVFAGIKSAYDPQDLVGRQVVMVANLAPRKMRFGVSNGMILAASGVDDDGGIFVLSPDAGAQPGMRVR

SEQ ID NO: 185044 - protein, 550 aa, Unknown
  Bacterial polypetide isolated from the Sargasso Sea
MSNNTEKRNILVTSALPYANAPLHLGHILEHCQTDIWVRYQKLIGNHCTYVCADDAHGTPIMLKAEELNIKPEELIKDIYDNHINTFNAYNISHDNYHTTHSEENRILSERIFNALDEKGLIEVKVIEQLYDTSRNMFLSDRYVKGTCPKCNAVDQYGDNCEVCSSTYEATELIDPISVLSNTTPIIKESEHLFFKLSELKSEINDWLETSKIQKPVHNKLSEWLEEDLKDWDISRDSPYFGFEIPGHKDKFFYVWLDAPIGYLASHSNYLNKQNSGQFEEFWDADADSEIYHFIGKDIMYFHTLFFPVMLSNANFKMPSGVFAHGFLTLDGEKMSKSRGNFISADDFVKVVDPEYLRYYFATKLGTGVEDIDLNLEDFKQKVNSDLVNKVVNIASRSANFLNKYFENELSKKIHNKDLIESFVDKSELIAEHYENLELSKAMKEIMSCADKANQYVDKMEPWVLIKNEENRELVHEICSTALNLFRMLVIMIEPVTPELSRNSFLFLNEEPTWKDINKPLLSHKIESFQPLLSRIEDDQINQLMEFKNA

SEQ ID NO: 185045 - protein, 72 aa, Unknown
  Bacterial polypetide isolated from the Sargasso Sea
MRKILVTSALPYANGSIHLGHLVEYLQTDIWVRNQKMSGNTCYYICADDAHGTPIMLKAKELDIRPEELIQK

SEQ ID NO: 185046 - protein, 107 aa, Unknown
  Bacterial polypetide isolated from the Sargasso Sea
TISIDDFAKLDLRVARIINAEHVEGADKLVKLQLDLGNEQRQVFAGIKSAYQPEQLIGRLTVMVANLAPRKMRFGMSEGMVMAAGPGGSDIFLLTPDDGATPGMRVK

SEQ ID NO: 185047 - protein, 279 aa, Unknown
  Bacterial polypetide isolated from the Sargasso Sea
NYLSALNYPNTDDDLFKKFWPASIHLIGKDILRFHAVYWPAFLLAAKIDLPKRVYGHGWILSGEEKMSKSKGNILDPLEIIKEYGLDPLRYYLIKEVSFGNDGNISQERLEDCINSDLANNYGNLCQRVTAFAIKNCDGKIPSEVKFNDEDLFILNKYKDNLDNIRSQIDNQNINFYIDYIVNSLFEANKYFNDQEPWKKKDNIIRLNTIVYTTLEIVRKISFLLYPIIPDSSLKALKIFNIEENDIKLDTVSNNDYLKKGININKINILFKKIEKNYD

SEQ ID NO: 185048 - protein, 378 aa, Unknown
  Bacterial polypetide isolated from the Sargasso Sea
RDEAFYTESELIKKENNFFTVSGSPVEWVKEESYFFKLSSWSEKLIEYYQNNPNSILPKSRYNEVLSFIKSGLKDLSISRTTFKWGVPVPNNPNHVMYVWIDALCNYLTSIDYPNINSDKFKKFWPATHIIGKDILRFHAVYWPAFLMAANLEPPKTIFAHGWWTNEGKKISKSIGNVIDPYEIINEYGLDQIRFFLFREVPFGNDGDFSKKAISQRINADLSNNYGNLVQRITSFAVKNSNSFIEKTEDFTNDDKNLLNLLNEKFLEYSNFMYTYQIDKALKSIFDLLSKTNSYVDNQAPWNLKKTDIKRMNVVLFVALLIIRNSSLMLMPIIPESANKVLDILSIKKDDRNFSILEKSILHDFIIKNPKPIFPRID

SEQ ID NO: 185049 - protein, 339 aa, Unknown
  Bacterial polypetide isolated from the Sargasso Sea
WEKPLLEFYEKNKNFILPESRRNEVISFVKNGLKDLSVSRKTFTWGINVPNDEKHVVYVWLDALTNYLSSLKYPDENNDLFKNYWPADIHIIGKDILRFHAIYWPAFLLAANIKPPKRVYGHGWILSGEEKMSKSKGNILDPLEIINIYGLDPLRYYLLKEVSFGNDGNISEEKLESCINSDLANNFGNLCQRVLSFAEKNCSSIITDYKFNKDDLIILESLTDIEKIRAFIDIQDINQYMSFIVDRLFASNKYFNDQEPWKKKNDKLRLNTIVYTTLELIRKITILLYPVMPQTSIKVLNIFNIKEDQIDFSSLKNNEILKKGIKINKLDILFKKILK

SEQ ID NO: 185050 - protein, 105 aa, Unknown
  Bacterial polypetide isolated from the Sargasso Sea
MKPFYITTPIYYVNDKPHIGHAYTTILADVLARHYRNIGRDVFLLTGLDEHGQKVQQAAESRNINPKQHCDEMAPRFLKLWDKLHISYDDFIRTTEKRHTDIVKY

SEQ ID NO: 185051 - protein, 166 aa, Unknown
  Bacterial polypetide isolated from the Sargasso Sea
MLNKYFTTPIYYVNDKPHIGHAYTSIAVDILKRFYKCRGLNSYFLTGTDEHGQKVEKAALEKNIDPQQFTDTVSENFRDLSSLLNLSNDDFIRTTEDRHKKSVQNLWKVLLEKNEIYLSKYSGWYSVRDEAFVADNEIIEKDGKKYNGFGSELSWVEEESYFFRLS

SEQ ID NO: 185052 - protein, 453 aa, Unknown
  Bacterial polypetide isolated from the Sargasso Sea
MSETFYVTTPIYYVNSHPHIGHAYTTIVTDVFVRYRKLFGEETYFLTGTDEHGQKIAESAQAANLKPQEFVDRMTAEFRDMWPHLHIQQDQFIRTTDAFHKSGVQAVLQKIYDQGEIYLKDYEGLYCVGCERFLDQEELTEEGNCPDHQKPPQVRQEKNYFFRMSAYQEWLIGLLEENKDLVQPARYRNELLSFLKAPLQDLCISRPKSRLEWGIDLPFDNDFVTYVWFDALLNYVTALGWPEDSRYEQFWKHCHHVIGKDILKTHGIYWPCMLKAAGFPVFKKLAVHGHWVVKGSKMSKSLGNVVNPLEMKDLIGVDGLRYFLLREMSYGEDANFNEDLVFARYHGELSNNFGNLLNRSISMSRKNFENEVPPRGEPGKQEIELYQMFERETSQIKAWVQQFEPHLALERIAMMSSAVNKYLDENKPWKLAKEEDQKEPLGTVLYTALDASA

SEQ ID NO: 185053 - protein, 244 aa, Unknown
  Bacterial polypetide isolated from the Sargasso Sea
ESREFSRAIREIMALADKANRYVDDKAPWVIAKQEGADAELQAVCSVGINLFRVLMAYLKPVMPLLAERAEAFLGETLSWDGVAQPLTNHQLAPFKALFSRIEPAKIEAMIDASKEDLAKEQAPKASGPLVDDPISETISYDDFAKIDLRVALIKKAEAVPEADKLLKLQLDIGGETRQVFAGIKSAYNPEDLEGKLTVMVANLAPRKMRFGMSEGMVLAAGPGGKDLWILEPQEGAQPGMRVK

SEQ ID NO: 185054 - protein, 178 aa, Unknown
  Bacterial polypetide isolated from the Sargasso Sea
MSKNFYITTPIYYPSAKPHMGHAYSSIVADFFARIKRIQGYNVFFLTGTDEHGQKIQRAAEKANKDPLKFCDEISKTFKDLSSILNLSNDDFIRTTEKRHFVSVENLWNILEKKGEIYLSKYAGWYSVSDEAFYNDDEIDTVDGKKICKSSGSPVEWVEEESFFFKLSKWQDKLLKFY

SEQ ID NO: 185055 - protein, 238 aa, Unknown
  Bacterial polypetide isolated from the Sargasso Sea
MTLENKKIFVTNALPYANGPIHIGHMVGYIQADIWSRFQRMQGHDVVFICASDAHGTPIMLSAEDLGVEPVELAAEYTRQHENDFNDFHVSFDNYHTTHSEENEELVGEIYQRLKENDCIRTEVIEQAYDDQENMFLPDRYVRGTCPKCNAPDQYGDNCEKCGATYKPTDLIDPISAISGKAPSLKESEHYFMKLTKFENMLEDWIETIDIHSSVKSKLKEWFDVGLRDWDISRDAPY

SEQ ID NO: 185056 - protein, 265 aa, Unknown
  Bacterial polypetide isolated from the Sargasso Sea
MNNYFYITTPIYYVNDKPHIGHAYTTILADVLTRYNRNIGRKTFFLTGLDEHGQKVQQAAEENGIDPQEHCDQMAPRFKELWQKLHISNDDFIRTTEDRHKKVVKDFLQIVMDNGDIYESEYEGLYSVSEERFITEKEAESGEFRDIKKLKEKNYFFKMSKYQDKLISHIESNPKFIQPEHRKNEILGFLRQPLNDLCISRPKSRLNWGIELPFDKDYVTYVWFDALINYITAVGFNQGTKLFDSWWPVSYHLIGKDILTTHAVY

SEQ ID NO: 185057 - protein, 577 aa, Unknown
  Bacterial polypetide isolated from the Sargasso Sea
ELIKDVLNDHKETYDLYGIKFTNFYTTHSEENKKYSEKIYLEAKKNNLISKEIVEQLYDENEQMFLSDRFIKGSCPKCGAADQHGDNCGVCGASYDVLEIKDPISILSGTTPIKKKSEHIFFDLPQKLETLSKFLHESKLQKPIKNKLKEWLSDDLKKWDISRDEPYFGFKIPEENNKYFYVWVDAPIGYIASMDNWFKKNNLDTDTIWSNKSNYEIYHFIGKDISYFHGLFWPALLSSANLKLPDGIFVHGFLTINGEKMSKSKGTGILAKDFAKICDPETLRYYFAAKLNDKVEDIDLNFDDYVQRINSDLVGKYLNIASRSASFLKKNKNNLSDNINKELITLLINEKQNIINLYEEREYSKLIRLIMDLADNVNKYINVQTPWKKDLNDAVDICSTALNAFKIITIYLTPIIPNLAENAYKFLNLKNCSFDDVDTLLNGQINNYESLLNRLEPLIIPEEDNMENKNIIDIKQFSSIDLRVAKIIKAEDVDGADKLLRLTLDVGELGTRNVFAGIKSSYKPEDLTDRMVVLVNNLAPREMKFGVSEGMVLASSNDNGIYLISPDKGAEAGMKIK

SEQ ID NO: 185058 - protein, 369 aa, Unknown
  Bacterial polypetide isolated from the Sargasso Sea
NTVPIKKESEHIFFDLPQMNKMLKDFLKNVDLQESIKNKLNEWLNDDLKKWDISRDAPYFGFEIPGEENKYFYVWVDAPIGYLASISNWAEKNKLNMQDLWSENSKYEIYHFIGKDIAYFHGLFWPALLSAANLKLPSGINVHGFLTINGEKMSKSKGTGILAKEFAEITNPETLRYYFAAKLNNKVEDIDLNFDDYVQRINSDLVGKYLNIASRSASFLKKNNNILSTNIDNNILDNLASKKDEVVSLYESREYSKLVRIIMDLADDVNKYINEQTPWKKDIDEAVDISSTAIKAFYILSLYLHPIIPRITNEAFKFLNIKKVSINNVDEAIIKINDYKPLLNRLEKIIIPEEENMDNVNLINIDQFS

SEQ ID NO: 185059 - protein, 487 aa, Unknown
  Bacterial polypetide isolated from the Sargasso Sea
MKKNFYITTPIYYVNDKPHIGHAYTTILADVLARFHRDSGYDTFFLTGLDEHGQKVQEAAEQKDIDPQKHCDAMAPRFIKLWQKLHISNDDFIRTTEDRHKRIVQYILQRVMDNGDIYEAEYEGLYSVSEERFITEKEAESGEFRGIKKLKEKNYFFKMSKYQDQLIDHIQSNPKFIQPEHRKNEILGFLRKPLNDLCISRPKSRLEWGIELPFDKQYVTYVWFDALINYVTAVGFNQSSENFKKWWPASYHLIGKDILTTHAVYWPTMLFSAGVSLPLSIFAHGWWLTGESKMSKSLGNVINPMDLIKDYGVDPVRYYLMREMVLGHDSSFTIESFIQRYNSDLANDFGNLLSRVTTLIKKNYDGVIPEPGDLSDLDLSIKRKGEALSKTVHQYVDDMRLNDAIEEIMQFIRGVNKYMEENAPWKMVKEDKDGAGRILYTAGEALRLGAVLLSPIMPNRTKTLLDALNVKENNFSWGTLKAGTRIK

SEQ ID NO: 185060 - protein, 506 aa, Unknown
  Bacterial polypetide isolated from the Sargasso Sea
MNFYITTPIYYTNDIPHIGHAYTSIACDIIARYNKLLGNNVFFLTGTDEHGQKVEKAAINSNLNPKEFVDKLSVNFINLIPFLGCEIDDFIRTTEERHIKASQELWKQLEKNNQIYLSNYEGWYSVRDEAFYLENELKKIDGKYVTDNGSPVEWVKEESYFFKLSEWQDKLIDYYEKNPESILPKTRYNEVLSFIKGGLKDLSISRTTFNWGVPVPNNSKHVMYVWIDALCNYLTAIGYPDTNNNNYNKFWPATHIVGKDILRFHAVYWPAFLMAAGIEPPKRIFAHGWWTNEGQKISKSLGNVIDPYEIIDEYGLDQIRFFLFREVPFGNDGDFSKKAIANRINADLSNNFGNLVQRISSFAVKNNDSILKPTENLTNDDQDLIKILQNKFDEYCKFMNNQQIDRAIKSVLELISAGNAYVDTQAPWTLKKTNKIRMEEVLYIITNIIIKSAIMLYPIIPTSSKKILNIFNYNMDNNKFENLTQLINQNIKINNPEPIFPRILND

SEQ ID NO: 185061 - protein, 534 aa, Unknown
  Bacterial polypetide isolated from the Sargasso Sea
MKYLITSALPYANAPLHLGHILEIIQTDVWVRHLNLKGIEAHYFCASDTHGTPVMLKSKEENITPEELIDNIYSIHKNTFKNYNVNLANFHSTHSDENEQLTTEIFKKALDKGFVYTKKIKQLFDDKENMFLSDRFVKGNCPACGAADQYGDACEICGSTYDALDLSDPISTLSDSKPSIKESEHYFFKLNELSDYLSSKVDELSKQSPIKHKLKEWLDGDLKDWDVSRDEPYFGFKVPGEENKYIYVWMDAPVGYLSSIKNWCDKNKHDYEKLLSDKDTKLVHFIGKDIVYFHLLFWPAMLHAADIENIEEVFVHGFLTIEGMKMSKSRGNFILADQALEYANADFYRYYLSSKLNTDISDINFSVDDFVQKINSDLIGKYINIASRTQNFLTKHNNSQVKQNCQNETNKYKDLYAEIVSQTNDREYSKALKNIMSIADEANSYISSMEPWNKAKDGDIDSCIEICSEALNLFKDLTILLNPYIPNVAEDLFDLLNIEQTHYDQLGKDCLKEIKPFKPIITRLEKSEFEGILD

SEQ ID NO: 185062 - protein, 536 aa, Unknown
  Bacterial polypetide isolated from the Sargasso Sea
MNDVFYITTPIYYVNSHPHIGHAYTTIATDVLTRYLKLFGNETYFLTGTDEHGQKIAESAANSGIEPQEFVDKISQEFRELWPHLHIEHDQFIRTTDSKHKACVQQILQKIYDQGEIYLKEYEGIYCIGCERFLDEAELENGNCPDHQTPPEFYKEQNYFFRMSSYQEWLTEELKENENWVYPGRYRNELIQFLKDPLQDLCISRPKSRLKWGIEMPFDKNFVTYVWFDALLNYASALDWPDGEKFKKFWPHVHHTIGKDILKTHGIYWPCMLKAAGMPVFKKLLVHGHWVVGGSKMSKSLGNVVDPLTMKDQLGVDALRYFLLRDMSFGEDSNFTEELAVTRYNGDLANNFGNLMNRSISMSRKNFQGCVPPSGKAGDQEKELHETFAKGVQKFREYIFKFQPHRALEHVALLSSKVNKYIDECKPWTLTKEGKDSERLGTVLYTALDMTRIIVGLLDPVMPKKMHEARKNLGLGEKILPFPSLSPGLLMPGTELPKPSPLFPKMQVSHADEENEKNQKKDKSSNNSATEENQWI

SEQ ID NO: 185063 - protein, 390 aa, Unknown
  Bacterial polypetide isolated from the Sargasso Sea
MDKKKCILVTSALPYANGPIHLGHLVEYIQTDIWVRLNKFLCHDVTYICADDAHGTPIMLKAKEDGISPEELINKSLAEHKKDFEDFLIKFDHYSSTHSETNEKSCIEIFQRLTDEKYIYKKNIDQYFDEKVNIFLPDRYIKGTCPKCGAEDQYGDSCEKCGATYNSTEIINPISSISGSKPIIKSTEHFFFELKKFEKFLSEWLENTDIQPSIKNKLNEWLSSGIQDWDITRDSPYFGFKIPGENNKYFYVWMDAPIGYIASLNEYKNINSEVKAINYWNEDIEIYHFIGKDIAYFHCLFWPAILRGIDYNLPTNIFCHGFLTINGMKMSKSRNTFIRASDFVKKFDPEFLRYYFASKLSNTIEDIDLNFEDFRKKINSDLIGKVINLL

SEQ ID NO: 185064 - protein, 134 aa, Unknown
  Bacterial polypetide isolated from the Sargasso Sea
EDSKESLAPAAPAIDPDSRFAKDPISDTISFDEFAKVDLRIARIAKAEHVEKADKLLRLELDLGGETKQVFAGIKSAYSPEALIGKHTVMVANLAPRKMRFGMSEGMVLAAGPGGDELYILEPHEGAKPGMRVK

SEQ ID NO: 185065 - protein, 544 aa, Unknown
  Bacterial polypetide isolated from the Sargasso Sea
MSLENKKIFVTNALPYANGPIHIGHMVGYIQADIWSRFLRMQGHDVVFVCASDAHGTPIMLSAEDLGVEPEELASEYTRQHENDFKDFHVSFDNYHTTHSNENESLVKEIYEKLKENDCIRTEVIEQAYDEEEGMFLPDRYVRGICPKCNAPDQYGDNCEKCGATYKPTDLIDPISVLSGKAPSLKESEHYFMKLGMFESMLKKWIETIDIHSSVNSKLKEWFEVGLRDWDISRDDPYFGFLIPGEEKKYFYVWLDAPIGYFASLKNLSDNSDLEFEEYIYDDANTHMVHFIGKDIIYFHALFWPAVLDGAGLKKPDAIYVNGFLTVNGEKMSKSRGTFIKARTYLDHLDPEYLRYYFAYKSSSGIDDFDLDTEDFENRINADLIGKWINIASRSSKFIREHFENRLSKDIDQDLLKTFDLKADEIKAHYQNREFGQSMRKIMLLADKANQYLDQEKPWIMIKNEEEKEDVQRVCTNALNMFLKLSIMLKPVMPDVADNVESFMNLSDLDWSNISDVIKDHEINDYENLLYRIREEDIERIIKK

SEQ ID NO: 185066 - protein, 336 aa, Unknown
  Bacterial polypetide isolated from the Sargasso Sea
ENKEYSSYIYEKLKEKGDIVTKTIEQFYDNEAKMFLPDRYIKGECPKCGAKDQYGDSCEECGATYSSTEIINPVSVVTNSPPITKETEHFFFKLSNYDDFLKNWISEETTQSEIKNKLSEWLSEGLADWDITRDKPYFGFNIPDAKDKFFYVWLDAPVGYIASFKNYCMKHNVNFEEFWDKETTTELYHFIGKDIAYFHALFWPAMLEGADFRKPNAIYCHGFLTIDGEKMSKSRGTFFNARTYLDFLEPEYLRYYYASRLTSKIEDIDLNFDDFQSRVNSDLIGKIINIGSRCAKFINKDFNDSLAISSENNSLIEECLSHKEEIFRIMNSEILY

SEQ ID NO: 185067 - protein, 470 aa, Unknown
  Bacterial polypetide isolated from the Sargasso Sea
HIQQYFADTISRFRALVGEKPTFLTGLDEHGLKVQQAAEKNGKAPQDHCDSMAPAFIDLWKKLNINYSDFIRTTEHRHTKIVQKILTKVHESGDIYMDEYEGWYSISEERFITEKELDSGQFGQVKQIKEKNYFFRMSKYQATLIDKIEKDELLIQPKSRKNEVLGFLKNELSDLCISRPKSRLEWGIELPFDDNFVTYVWFDALINYISAIGAYSNDEQFSSLWPADVHLIGKDILTTHSVYWPTMLLSLGLPLPQRIFAHGWWLTDDQKMSKSLGNVVSPLMLIDDFGVDSVRYYLMSEMVLGMDATFSSESFEKKYNSDLANDFGNLVSRVSTLIKNNFDEKIPECSLAESDLSTNFQKIVLKEQLDNLEIDKVINDIMTFIRSINVFMEQNEPWKLVKSDKVQAGNILYHCAESLRLAAVMLSPVMPSKTKDILDILGTNDVELVWGKLESGSKISISKPIFPRIS

SEQ ID NO: 185068 - protein, 140 aa, Unknown
  Bacterial polypetide isolated from the Sargasso Sea
MVSIVEKENCLEELERMTNCATDILDKLELPYRKVILCSGDMGFSAEKTYDIEVWLPSENKYREISSCSSCSTFQAQRMKSRYKNKNKETVFVGTLNGSGLAVGRTLIAVLENHQQKDGSIIVPKVLRPYMNNLELISVK

SEQ ID NO: 185069 - protein, 247 aa, Unknown
  Bacterial polypetide isolated from the Sargasso Sea
FDFNPKLHLEIGEITNSMNFETATKLSGSRFVILKGQLSKLERAIANFMIDKHTSINGYIEMHVPYLVKEDTLYGTGQLPKFSDDLFTAGDDHWLIPTAEIPLTALHSNEILNVDQLPMRVTSYTPCFRSEAGAAGKDTRGMLRQHQFTKVELVSLVEPQQSKDELERMLNCAEGILQDLDLHYRVMTLCTGDMGFNANKTYDIEVWLPGEDKYREISSCSNCGDFQARRMNTRYKQKMIQILIYIL

SEQ ID NO: 185070 - protein, 326 aa, Unknown
  Bacterial polypetide isolated from the Sargasso Sea
FIKLNKEVQKIKESISKNDVTRAEIELELNGILSSLPNIPSKDLPIGNDDSSNLEIKKEGEVAKNKTPHHYEIGEEMNALDFETAAELSGSRFVISSGSIARLERALANFMIDVHINEHGYKEINIPYLVKEDSMYGTGQLPKFSDDQYKTDNDLWLIPTAEVPLTNLVRKKILDEEDLPLRFTAFSQCFRKEAGAAGRDTRGMIRLHQFPKVELVSVTKPDESEDELERMLSCAEKILQLLELPYRVVLLSTGDIGFSAHKTYDLEVWFPSEEKYREISSCSNCLDFQARRMNSKFKSKNDNKNIFLHTLNGSGVAVGRALAAIL

SEQ ID NO: 185071 - protein, 171 aa, Unknown
  Bacterial polypetide isolated from the Sargasso Sea
PTVPPVLVRENALYGTGFFPDDAEQVYEIPNDDLYLVGTSEVPLAALHTNEIINMEELPVRYAGFSTCFRREAGTYGKDTTGIFRVHQFDKVEMFSFCSPEKSEEEHEFILSVEEELLQSLEIPYRVVDVCSGDLGASAAKKYDIEAWIPSQNTYREVTSCSNTTSFQARR

SEQ ID NO: 185072 - protein, 291 aa, Unknown
  Bacterial polypetide isolated from the Sargasso Sea
NMVEIISTNTLDHLEITKKIDTELAAKLSGSRFAVLEGDLAKLQRSLITFMLDCAIQNGYKEYYVPFMANEESLTGTGQLPKFEEDLFKTSDKLYLIPTAEVPLTNLFRNEFLNEKDFPIKVTSHTPCFRSEAGSYGKDTRGLIRQHQFEKIELVQITHPNDSMDCLENLLNNACEILNKLELPYQIVELCTGDLGFSSAKTFDIEVWMPSQNKYREISSCSNFTDFQARRSNIKFKSKEGNSFAHTINGSGLAVGRCLIALIENNFDGKDTINIPNCLEQYFGSNEIKIS

SEQ ID NO: 185073 - protein, 173 aa, Unknown
  Bacterial polypetide isolated from the Sargasso Sea
ELPKRFVAATPCFRKEAGSYGKDTKGMMRQHQFYKVELVSIVEAENCLTELDRMLNCAEEILKRLEIPYQVVLLSSGDMGFSAEKTFDLEAWIPSEKKYREISSCSSCGSFQARRMGAKYKTSDGNKYVGTLNGSGLAVGRLMIALLENYQNADGSISIPTILKKYMNNLDKI

SEQ ID NO: 185074 - protein, 71 aa, Unknown
  Bacterial polypetide isolated from the Sargasso Sea
CSNCTDFQARRTSLRYKPDAKARPQFVHTLNGSGLAIPRILIAILENYQQEDGTILIPEVLRPYTGFDTIS

SEQ ID NO: 185075 - protein, 107 aa, Unknown
  Bacterial polypetide isolated from the Sargasso Sea
VVLLSTGDIGFSAHKTYDLEVWFPSEEKYREISSCSNCLDFQARRMNSKFKSKNDNKNIFLHTLNGSGVAVGRALAAILENYYDEKGHINIPKALQPYMNDETTIKI

SEQ ID NO: 185076 - protein, 273 aa, Unknown
  Bacterial polypetide isolated from the Sargasso Sea
MHNLKEIRKDFDTFKKALKKRNIDIDFSKLEKLDHQNRELIQKKENLEKEKKDISKSKDKSLFKKSKKISIEIEKLSEEQKTIKSELDKILFNIPNIPHPDVPIGIDENNNIEVSKAGKIPTFDFKPKTHYELGENLKMLDFDLATKTSGSRFVFVKDKLALLERALSNFMLDTHILKNSYKEISPPLLASADTMFGTGQLPKFENDQFEIKLEEGSDRKFLIPTAEVILTNIVKDKIIDKKDLPMRFVASTPCFRKEAGSYGKDTKGRLDNI

SEQ ID NO: 185077 - protein, 371 aa, Unknown
  Bacterial polypetide isolated from the Sargasso Sea
QKKMHNIKDIRNDFENFKEKLKNRNIDISLDNIISLDEENRKLIQEKEKSEMEKKTISKSKDQSLFEKSKELSLKIEEINKNQIKLQRQITDILSSIPNIPLSDVPIGQDENSNKEIEKKGEIKDFNFKPKSHYELGDKLNMLDFDLATKTTGSRFVFVKKELAQLERAISNFMIDTHTQKNGYTEISPPLIATAETMFGTGQLPKFENDQFEIKLDEGEERKFLIPTAEVILTNIVKNRILDKKELPIRVVAATPCFRKEAGSYGKDTKGMIRQHQFYKVELVSIVENDKCLEELERMSNSATMILDALKLPYRKIVLCTGDMGFSAEKTYDIEVWLPSENKYREISSCSSCGSFQARRMKARYKGQNNS

SEQ ID NO: 185078 - protein, 224 aa, Unknown
  Bacterial polypetide isolated from the Sargasso Sea
MANEESLTGTGQLPKFEEDLFKTSDKLYLIPTAEVPLTNLFRNEFLNEKDLPIKVTSHTPCFRSEAGSYGKDTRGLIRQHQFEKIELVQITHPNDSMDCLENLLNNACEILNKLELPYQIVELCTGDLGFSSAKTFDIEVWMPSQKKYREISSCSNFTDFQARRSNIKFKSKEGNIFAHTINGSGLAVGRCLIALIENNFDGKDTINIPNCLEQYFGSNKIKIR

SEQ ID NO: 185079 - protein, 318 aa, Unknown
  Bacterial polypetide isolated from the Sargasso Sea
DPEKVKNILTIKNYNLDSVLFTEIDSNRKSLQTEVEDLKSLKNNLSKDFGELKKNNQDTSKLSKQLDKIKKNLSEKEELFNKTLSRLNDFLLDIPNIPHQDVEPGNSEEDNKVIKTFGEVQKKDSIDHLEITSDIDTESAVKLAGTRFAVLNDDIAKLHRALISFMLDVAEKNGYEERYVPFMANSQSLTGTGQLPKFEEDLFKITEDLFLIPTAEVPLTNLYADSILEQGSLPIKVTSHTPCFRSEAGSYGKDTKGLIRQHQFEKVEIVQIVHPDKSDSALEGLLNNAEEILQLLGLPYQVVQLCGGDLGFSSAKTY

SEQ ID NO: 185080 - protein, 145 aa, Unknown
  Bacterial polypetide isolated from the Sargasso Sea
QHQFTKVELVSIVEPQHSEKELERMLECAESILKDLNLHYRVMTLCTGDMGFSANKTYDIEVWLPGENAYREISSCSNCDSFQARRMNTRYKHDNKNIFVHTLNGSGLAVGRTLIAILENYQTEDNNIEIPQVLRKYLNNKKTLL

SEQ ID NO: 185081 - protein, 276 aa, Unknown
  Bacterial polypetide isolated from the Sargasso Sea
MHNLKEIRKDFSKFEKDLEKRSVKIDFNNLKKLDELNRDLIQKKENLEKEKKDISKSKDESLFKKSKEISTELEKITEQQKNTKNELDNILSSIPNIPHQDVPTGKDENDNVEVLKAGKVPEFEFKPKSHYELGENLGMLDFDLATKTTGSRFVFVKKELALLERALSNFMLDTHIAQNDYQEISPPLIASDNTMYGTGQLPKFENDQFEIKFDGGSDRKFLIPTAEVILTNIVKDKIVDQKDLPMRFVASTPCFRKEAGSYGKDTKGMIRQHQFY

SEQ ID NO: 185082 - protein, 194 aa, Unknown
  Bacterial polypetide isolated from the Sargasso Sea
AEVILTNMAKDKIFQLNELPLRLVASTPCFRKEAGSYGKDTKGMIRQHQFYKVELVSIVEQENCLSELDRMTNCATKILDLLKLPYRKIILSSGDMGFSAEKTFDIEVWLPSENKYREISSCSSCGSFQARRMKARYKNKINETVFVGTLNGSGLAVGRTLIAILENYQESDGSIKIPSALKPYMNNLDKIAKK

SEQ ID NO: 185083 - protein, 317 aa, Unknown
  Bacterial polypetide isolated from the Sargasso Sea
MHNLKDLRKNLESFKKRLKDRNTDFDIKNFSLKDTLNRDLISKKEKLEQEKKSLSKSKDKSNFDKSKKISKEISELTKKQNFTQKELDKIIFSLPNLAHDDVPIGKDDKSNKIIKKKGDIKNFSFNIKTHVELGAKNGNIDFDTSIKLSGSRFVVLKDKIALLERALINFMLDTHVNNFQYTEISPPLIVNEDVMFGTGQLPKFEEDQFEIKFDNSDQRKFLIPTAEVVLTNLVRKSIIEKNTLPKRYVASTPCFRKEAGSYGKDTKGMIRQHQFYKVELVSIIEPNKCLEELERMLSCAESILEKLEIPYQVVLLS

SEQ ID NO: 185084 - protein, 193 aa, Unknown
  Bacterial polypetide isolated from the Sargasso Sea
EVILTNIVREKILNRNELPLRFVASTPCFRKEAGSYGKDTKGMIRQHQFYKVELVSIVEKENCINELERMTNCAMMILDKLKLPYRKILLCTGDMGFSAEKTYDLEIWLPSESKYREISSCSSCGSFQARRMNARYKNEKNISEYVGTLNGSGLAVGRTLIGIMENYQNSDGSITIPDVLRPYMNNLEKISKN

SEQ ID NO: 185085 - protein, 298 aa, Unknown
  Bacterial polypetide isolated from the Sargasso Sea
LDDIVELDKENRKLIQEKEKYEMEKKTISKSKDESLFKKSKEISIKIDELTKKQKIVKDNLDNILSLIPNLPIKDVPHGKDEKNNKEIIKVGNINKFNFKPKSHYEIGEKLNMLDFDLATKTTGSRFVFVKDKLASLERAISNYMIDTHTKFNGYLEISPPLMATENTMFGTGQLPKFENDQFEIKLDDKNDRKFLIPTAEVILTNMVKNKIVNINSLPMRLVASTPCFRKEAGSYGKDTKGMIRQHQFYKVELVSIVENDKCLDELERMTNCATKILDDLKLPYRKIILSTGDMGFS

SEQ ID NO: 185086 - protein, 300 aa, Unknown
  Bacterial polypetide isolated from the Sargasso Sea
MPVEKEKEELLNKASDLSNEVKLLFEQVDEKDEEFLNLWIKIPNLISNTSPDGKSDQDNLEIKKVGNVKDISNPKNHLEIASKLNLIDVEKASEVSGSRFAYLFGDLVKIEFNLVSWALDKLSEKGFTPTVPPVLVRENALYGTGFFPDDAEQVYEIPNDDLYLVGTSEVPLAALHTNEIINMDELPIRYAGFSTCFRREAGTYGKDTTGIFRVHQFDKVEMFSFCNPEKSEEEHEFILSVEEELLQSLEIPYRVVDVCAGDLGASAAKKYDIEAWIPSQNTYREVTSCSNTTSFQARKL

SEQ ID NO: 185087 - protein, 283 aa, Unknown
  Bacterial polypetide isolated from the Sargasso Sea
KLLISRNIKLDFDEILSLDKNNRNLIQKKENLEKEKKNISKSKDKSLFAKSKKISLEIEKLVNEQNNFKNKLDSIMSSLPNLPLTDVPIGENENFNKEIEKFGEINKFSFKPKSHYEIGEKLKMLDFDLATKTTGSRFVFVKEHLASLERAISNFMIDVHIRENGYTEISPPLMASDSTMFGTGQLPKFENDQFEVKLDGDDRKFLIPTAEVILTNMVRNQILNLQDLPMRLVASTPCFRKEAGSYGKDTKGMIRQHQFYKVELVSIVENSKCEEELERMTNC

SEQ ID NO: 185088 - protein, 289 aa, Unknown
  Bacterial polypetide isolated from the Sargasso Sea
MEIGEKLKMLDFDLATKTTGSRFVFVKDQLALLERALSNFMLDKHITKNGYHEVSPPLIASENTMFGTGQLPKFENDQFEIKLEEGSDKKYLIPTAEVILTNIVKDKILDIKELPMRFVASTPCFRKEAGSYGKDTKGMIRQHQFYKVELVSIVEKDKCLEELERMTNCASEILDDLKIPYRKMILCTGDIGFSAEKTYDLEVWLPSENKYREISSCSSCSTFQAVRMKTRYKNQSKEIVNVGTLNGSGLAVGRALIAVLENYQQKDGSVIVPEVLRPYMNNLEKISSN

SEQ ID NO: 185089 - protein, 191 aa, Unknown
  Bacterial polypetide isolated from the Sargasso Sea
NYLGSRFVVLSGAIPRLHRALAQFMLDVHINEHGLTETMTPVLVREEAMFGTNQLPKFSDDSYQTTNGWWLIPTSEVTLTNICANEVTPEENLPLRMTAHTQCFRSEAGSAGKDTAGMLRQHQFEKVEMVSITHPDQSIQEHERMTNCAKAILEKLELPYRVVMLCSGDTGFGAKKTYDLEVWLPGQKSFR

SEQ ID NO: 185090 - protein, 266 aa, Unknown
  Bacterial polypetide isolated from the Sargasso Sea
MIDIKKLRDNPEFVKQALKKRGYDLDVSSFSKLDSSRKSLQVNVENLQAERKKLSAEFGKLKSSGDSIDELKKIIDSKNDELSSKDLELQEIMTQIDSLMLDMPNIPDNSVPEGKDESENVVIKEYGKIISKNELDHLEIAADIDTDLASKLAGSRFSVLKGDMAKLQRSLISFMLDNAIKNGYQEYYVPFMANSESLTGTGQLPKFEEDLFKTSEKLYLIPTAEVPLTNLFRNEFVIEEELPIKVTSHTPCFRSEAGSYGKDTKG

SEQ ID NO: 185091 - protein, 278 aa, Unknown
  Bacterial polypetide isolated from the Sargasso Sea
ILFDNIMKQRGENISSKKILEIDAEKRNTQTIHQSLLAEKNLLSKTIGQLKSKKQDSSKELKQVENLKTKISSLKELETLKDEELYSILSRLPNIPDESIPIGNNENDNILYKDWGNKPKFTFNPKKHFEVGENINLMNFDIASKLSGSRFVVLKGQLSRLERAITNFMLDKHTAENGYTEMNVPILVKNNALFGTGQLPKFSEDLFTAGDEHWLIPTAEVPLTNLVADQILNINSLPMRVTSYTPCFRSEAGAAGKDTRGMLRQHQFTKVELVSIVE

SEQ ID NO: 185092 - protein, 207 aa, Unknown
  Bacterial polypetide isolated from the Sargasso Sea
EDLFKTSDKLYLIPIAEVPLTNLFRNEFLNEKDFPIKVTSHTPCFRSEAGSYGRDTRGLIRQHQFEKIELVQITHPNDSMDCLENLLNNACEILNKLELPYQIVELCTGDLGFSSAKTFDIEVWMPSQNKYREISSCSNFTDFQARRSNIKFKSKEGNSFAHTINGSGLAVGRCLIALIENNFDGKDTINIPNCLEQYFGSNEIKIS

SEQ ID NO: 185093 - protein, 235 aa, Unknown
  Bacterial polypetide isolated from the Sargasso Sea
MIDINFIKEYPEKFSKLMQQRNTNISIENILKLDKDKKLKIFELQKLQTERNSMSKLIGLYKRDKKDTIDLEKKVTDIKRTTIDIEKSLKAIEEKLNEIMLRLPNIPDEDVPIGENESHNKEILKKFTPIDFKFNPVSHDILGKNLNKMMDFDLGSLISGARFVVLKSDLALLERALINFMLDLHIHKHNYTEVSAPHIVKKDALIGTGQLPKFEGDLFKVGDEKWLIPTAEVTL

SEQ ID NO: 185094 - protein, 310 aa, Unknown
  Bacterial polypetide isolated from the Sargasso Sea
DNVKVLKAGKVPEFNFKPKSHYELGEKLGMLDFDLATKTTGSRFVFVKKELALLERALSNFMLDTHIVQNGYQEISPPLIASDNTMYGTGQLPKFENDQFEIKFDEGSDRKFLIPTAEVILTNIVKDKIVDQKDLPMRFVASTPCFRKEAGSYGKDTKGMIRQHQFYKVEMVSIVEKENCLEELERMTNCATDILDKLELPYRKVILCSGDMGFSAEKTYDIEVWLPSENKYREISSCSSCSTFQAQRMKSRYKNKNKETVFVGTLNGSGLAVGRTLIAVLENYQQKDGSIVVPKLLRPYMNNLELISAK

SEQ ID NO: 185095 - protein, 253 aa, Unknown
  Bacterial polypetide isolated from the Sargasso Sea
EEDNKVIKTFGNVQKKDSIDHLEITSDIDTESAVKLAGTRFAVLKDDIAKLQRALISFMLDVAEKNGYEERYVPFVANSRSLTGTGQLPKFEEDLFKITEDLFLIPTAEVPLTNLYADSILEQSSLPIKVTSHTPCFRSEAGSYGKDTKGLIRQHQFEKVEIVQIVHPNESEAALESLLSNAEEILQLLELPYQVVQLCGGDLGFSSAKTYDIEVWIPSQNKYREISSCSNFTDFQSRRSKIRLNEDENKILP

SEQ ID NO: 185096 - protein, 179 aa, Unknown
  Bacterial polypetide isolated from the Sargasso Sea
VDAAELPKRYVSHTPCFRSEAGAAGKDTRGIMRQHQFYKVELVSLASEENSADEHERMLSCAEEVLKRLGLHYRVVILSTQDMGFSAQKTYDIEVWLPGQNAYREISSCSNCGDFQARRMNSRYKENDAIKYLHTLNGSGLAVGRTLIAIMENYQNQDGSINIPEVLIPYMSGITKISN

SEQ ID NO: 185097 - protein, 284 aa, Unknown
  Bacterial polypetide isolated from the Sargasso Sea
GNKLNLMDFDTASKVSGSRFVFLKGDLAKLERAISNFMLDTHVKEFGYQEISPPLIVSDKTMFGTGQLPKFENDQFELLLKKEENDRKFLIPTAEVVLTNIVRETNVKKNLLPLRFVASTVCFRKEAGSYGKDTKGMIRQHQFYKVELVSIVEKEKCSEELERMTNCAEKILKEIKLPYRQVLLSTGDMGFSAEKTYDLEVWVPSENKYREISSCSSCGQFQARRMKAKYKNGKESDFVGTLNGSGLAVGRTLIAIIENYQQKDGTIKVPDVLKPYMNNVQYIK

SEQ ID NO: 185098 - protein, 286 aa, Unknown
  Bacterial polypetide isolated from the Sargasso Sea
MIDVNLLKNQGDLIAKKIHSRGENINISSLVTLNEQKNKLQAELDVLKNEKNQLSDTIGKLAKTGRDISDKKNLSLELNQKIETLLKSYEQISGEFKQKLLEIPNIPDNDVPEGSSEQDNIELNRKIFNQDQGLDHIEIGNRLGCLDIETASKLSGSRFMILKGRLAQLHRALINFMLDEAKDNGYEENYVPYIVNRDALINTGQLPKFEDDQFKLTNEKFLIPTAEVPLTNFFSNSTINSKQLPINVCAHTPCFRAEAGSYGKDTKGIIRQHQFDKIELVKLVDP

SEQ ID NO: 185099 - protein, 244 aa, Unknown
  Bacterial polypetide isolated from the Sargasso Sea
MEKKQNIIQSEIDKIIFSLPNLAHIDVPVGKDAKSNKFIKKKGDIKKFSFVAKSHVKLGARDQNIDFETSTKLSGSRFVVLKDKYAMLERALINFMLDTHVNEFKYTEISPPLIVNEDVMFGTGQLPKFEEDQFEIKFDNSDQRKFLIPTAEVVLTNLVRESIIEKKLLPKRFVASTPCFRKEAGSYGKDTKGMIRQHQFYKVELVSIVEPNKCLEELERMLSCAERILEKLEIPYQVVLLSTG

SEQ ID NO: 185100 - protein, 163 aa, Unknown
  Bacterial polypetide isolated from the Sargasso Sea
LFRSEAGSAGKDTKGMLRQHQFNKVELVSITTPEQSEKELERMLSCAESILQDLNIHYRVVTLCTGDMGFSAKKTYDIEVWLPGENAYREISSCSNCGDFQSRRMNSKFKRDKSNLYVHTLNGSGLAVGRTLISILENYQTQDGNIIIPKVLRKFFDNKEKLI

SEQ ID NO: 185101 - protein, 299 aa, Unknown
  Bacterial polypetide isolated from the Sargasso Sea
PNLAKNDVPIGKDEKANKLIKKVGKIKNFTFDIKSHVELGKKNNGIDFDTSTKLSGSRFVVLRDKFALLERALINFMLDTHINEFKYTEISPPLIVSDEVMFGTGQLPKFEDDQFEIKLSDTSERKFLIPTAEVVLTNLVRKSNLEKNELPLRFVASTPCFRKEAGSYGKDTKGMIRQHQFYKVELVSIVEEKNCTSELNRMLNCAEEILKKLEIPYQVILLSSGDMGFSAEKTFDIECWIPSEKKYREISSCSSCGTFQSRRMGAKCKTSNGNEFVGTLNGSGLAVGRLMVALLENNQ

SEQ ID NO: 185102 - protein, 270 aa, Unknown
  Bacterial polypetide isolated from the Sargasso Sea
MGESNGGIDFESAAKLSGSRFVVMKDGYARLHRALKQLMLDVQTEENGYTEMYVPNIVRSDCLEGTGQLPKFAEDQYKIENEEGLYLIPTAEVPLTNLIRESILEENELPIKMTAHTPCFRQEAGSYGKDTKGMIRQHQFEKVELVHIVKPDESYEALEELTKNAESILQKLKLPYRLMLLCSGDTGFSAAKTYDLEVWLPSQETYREISSCSNCESFQSRRMKARYKNSKSKQTDYPHTLNGSGVGYGRTLIAVLENYQNEDGSVTILM

SEQ ID NO: 185103 - protein, 228 aa, Unknown
  Bacterial polypetide isolated from the Sargasso Sea
MHNIKDLRNNLNIYKKKLSDRNFDFKINIFDDLDKNNRKLISEKENLEQEKKSLSKTRDKTNFDKSKKITEQIIKISKDQTIAQNKLDQLMHILPNLARDDVPVGKDEKSNKIINKFGKIKKFTFKTRTHVEIGSKTKDIDFDTASKISGSRFVILKNKIALLERALINFMLDIHTTKFEYIEISPPLIVNEDVMFGTGQLPKFEEDQFEIKFENADQRKFLIPTAEV

SEQ ID NO: 185104 - protein, 246 aa, Unknown
  Bacterial polypetide isolated from the Sargasso Sea
ALDDVPVGKDEKANKIIKKVGNIKKINFKPKSHIEIGEKNNDIDFETSIKLSGSRFVVLKNKIALLERALINFMLDIHTINFNYSEVSPPLIVNEDVMFGTGQLPKFEEDQFEIKFENSEQRKFLIPTAEVVLTNLVRKTILNKDQLPLRFVAATPCFRKEAGSYGKDTKGMIRQHQFYKVELVSIVNPRECDSELKRMLNCAEEILKKLDLPYQVILLSSGDMGFSAEKTFDIEVWIPSENKFRE

SEQ ID NO: 185105 - protein, 295 aa, Unknown
  Bacterial polypetide isolated from the Sargasso Sea
HELTVRKKDIDIQISSLQSESKKLSKLIGQEIRKSKNNDSPELISLKKKGNEYRIKISELEEKQRILDKEVDDEIYNLPNFPSKDAPIGKDESDNVHIKSWGDPLTEENLKSHWEIGENLNLFDSINSTKISKSRFITLIGNGARLERALINFMLDIHSKNGYLELMPPALVNSESLQGSGQLPKFSNESFKCSNDDLWLSPTAEVPITAFHKHQIIDSKQLPLKYVAYSPCFRREAGSYGRDTKGLIRLHQFNKVELYWFCDPSKSIEAHEKITSDAESILKKLNLPYRLVDIC

SEQ ID NO: 185106 - protein, 210 aa, Unknown
  Bacterial polypetide isolated from the Sargasso Sea
PDDAEQVYEIPNDDLYLVGTSEVPLAALHANEIINMEELPIRYAGFSTCFRREAGTYGKDTTGIFRVHQFDKVEMFSFCNPEKSEEEHEFILSVEEELLQSLEIPYRVVDVCAGDLGVSAAKKYDIEAWIPSQNTYREVTSCSNTTSFQARRLNIRAKSEGETSILHTLNGTAIAVGRILISLIENNQTEDGKVEFSDKVAEIIGFKNLG

SEQ ID NO: 185107 - protein, 174 aa, Unknown
  Bacterial polypetide isolated from the Sargasso Sea
LPIKVTSHTPCFRSEAGSYGKDTRGLIRQHQFEKIELVQITHPNNSMDCLENLLNNACEILNKLELPYQIVELCAGDLGFSSAKTFDIEVWMPSQKKYREISSCSNFTDFQARRSNIKFKSKEGNSFAHTINGSGLAVGRCLIALIENNFDGNDTIKIPSCLEQYFESNKIKIS

SEQ ID NO: 185108 - protein, 266 aa, Unknown
  Bacterial polypetide isolated from the Sargasso Sea
ITELIDTDLAAVLAGARFSVLKNQIAKLQRSLIAFMLDQAIEKGYEEYYVPFVANTQSLIGTGQLPKFEEDLFKVSDNQYLIPTAEVPLTNINRDKVIPLSELPSKLTSHTPCFRSEAGSYGKDTKGLIRQHQFEKIELVQITDSKSSFDCLETLLSDAENILKLLELPYQVVELCAGDLGFSSCKTYDIEVWIPSQEKYREISSCSNFSDFQARRSNIKIDTGKNKEFAHTINGSGLAVGRTLVALNENNYDHDTNTISIQKFLE

SEQ ID NO: 185109 - protein, 234 aa, Unknown
  Bacterial polypetide isolated from the Sargasso Sea
NQYEEIDPPFLVKEETMIGSGNLPKFKENLYMDSETDLWLIPTAEVALNGMNQGQIIKPGELPIKYVAKTSSFRKEHTAAGRDVRGIKRVHQFEKVEIFRFVEPADSIIAHEEMLEEVVDLCKRLGLIYRVLKLSTGDIGFQSAKTYDIEVWSKGTGEWLEVSSVSNCLDFQTRRNNTRFKSSQNSSTNFPHTLNGSGLALPRIWIAVLENGLQKDGSIIIPEELVKYTGWEKI

SEQ ID NO: 185110 - protein, 224 aa, Unknown
  Bacterial polypetide isolated from the Sargasso Sea
MANEDSLIGTGQLPKFEEDLFKTSDKLYLIPTAEVPLTNLFRDEFLNEKDLPIKVTSHTPCFRSEAGSYGKDTRGLIRQHQFEKIELVQITHPNNSMDCLENLLDNACEILNKLELPYQIVELCTGDLGFSSAKTFDIEVWMPSQKKYREISSCSNFTDFQARRSNIKFKSKEGNIFAHTINGSGLAVGRCLIALIENNFDGKDTINIPICLEQYFGSNEIKIS

SEQ ID NO: 185111 - protein, 235 aa, Unknown
  Bacterial polypetide isolated from the Sargasso Sea
MHNIKLLRENLERFKQKLSERNFEFNPKEFDDLDKKNRKLISQKEKLEQEKKILSKSQDKSNFEKSKKISNEIEKLLEEQLVIQKKLNKILYFLPNLALDDVPVGKDEKANKLIGQFGTIKKFSFKPKSHIEIGSNNRQIDFDTSIRLSGSRFVILKDKIALLERALINFMLDIHTTEFDYTEISPPLIVNEDVMFGTGQLPKFEQDQFEIKFDNSEKRKFLIPTAEVPLTNLVR

SEQ ID NO: 185112 - protein, 285 aa, Unknown
  Bacterial polypetide isolated from the Sargasso Sea
NKEIMKSGQIAKFDFDPLSHYEIGEKLGMLDFDLATKTTGSRFVFVKNKLALLERAISNFMLDTHVLKNGYEEISPPLLASESTMFGTGQLPKFENDQFEVKLDNETDRKFLIPTAEVILTNIVKDKIVNQKDLPMRFVASTPCFRKEAGSYGKDTRGMIRQHQFYKVEMVSVVEQEKCLDELERMTKCATSILDLLELPYRKIILCSGDMGFSAEKTYDIEVWLPSENRYREISSCSSCSTFQAVRMKARYKNEKKETLFVGTLNGSGLAVGRTLIAILENYQQ

SEQ ID NO: 185113 - protein, 234 aa, Unknown
  Bacterial polypetide isolated from the Sargasso Sea
GYLELMPPALVNSESLTGSGQLPKFSNESFKCSNDDLWLSPTAEVPLTAFHRNELIDPKQLPIKYVAYSPCFRREAGSYGRDTKGLIRLHQFNKVELYWFCDPSKSLEAHKKITSDAESILKKLNLPYRLVDICTGDLGFSSSRTFDLEVWLPSSKCYREISSCSNCLDFQARRSSIRSKIDKKNTYIHTLNGSGLAIGRTMAAILENGQQTDGSVKIPDALVPYFGSNFLKTA

SEQ ID NO: 185114 - protein, 212 aa, Unknown
  Bacterial polypetide isolated from the Sargasso Sea
FENDQFQIQMDGNQKKYLIPTAEVILTNMFKENIINIKNLPQRLVASTPCFRKEAGSYGKDTKGMLRQHQFYKVELVSIVEPNKCNEELNRMVTCAEEILKRLKLPYRQVLLCTGDMGFSAEKTIDLEVWIPSENKYREISSCSSCGQFQSRRMRAKYKDSKNKSDYLGTLNGSGLAIGRTLIAIMENYQNSDGSITIPKVLRGYMKNLDKI

SEQ ID NO: 185115 - protein, 94 aa, Unknown
  Bacterial polypetide isolated from the Sargasso Sea
FFGSKTYDIEVWLPGENTYREISSCSNCGEFQARRMNTRYKIDNKNVFVHTLNGSGLAVGRTLIAILENYQMRDGNIRIPDVLKKYFNNLDTLI

SEQ ID NO: 185116 - protein, 146 aa, Unknown
  Bacterial polypetide isolated from the Sargasso Sea
YKVELVSIVEQHDCLNDLERMTSCATSILDKLNLPYRKVILCSGDMGFSAEKTYDIEIWLPSEKKYREISSCSSCGTFQSRRMNSRYKNSKNENVFVGTLNGSGLAVGRTLIGIMENYQDEEGNITIPEALRPYMNNMEKISSISS

SEQ ID NO: 185117 - protein, 269 aa, Unknown
  Bacterial polypetide isolated from the Sargasso Sea
LDKKRRSTQSKLDELFSQQNKLSKKIGEYYQSGDHASGNQLKKEVEALKPDQKKLEEDLNKIKVDLFENLNNVPNVPHGLVRKGKNEEDNEIIYQSDDINKLSPKAKPHWKLASDYNLISFELGNKISGSGFPAYIDKGAKLERSLINFFLDYNIKAGYTEVQPPILINESSGHGTGQLPDKEGQMYKIENENLYLIPTAEVPITNFYRNKTISKNNLPIMLTGYTPCFRREAGSYGSDVRGLNRLHQFDKVEIVRIEEPSKSYEVLDE

SEQ ID NO: 185118 - protein, 204 aa, Unknown
  Bacterial polypetide isolated from the Sargasso Sea
NLKLKSKGLAEELDTVKNKISDLITTVPNILDSKVPDGLSEENNIEIFRSSNFKESGYNLKNHWNLSKEYDIIDFELGSKITGSGFPVYKDKGAKLQRALINFFLDRNSSAGYNESQVPHLVNSDSAYATGQLPDKDGQMYHVTNDDFYLIPTAEVPLTNIYRDKILAVDQVPIMMTGYTPCFRREAGSYGSDVRGLNRLHQFV

SEQ ID NO: 185119 - protein, 295 aa, Unknown
  Bacterial polypetide isolated from the Sargasso Sea
KEKLEKEKKEISKSKDKSLFAKSKELSVKIEDLSKKQGQTQDELDNILSSLPNLPLDDVPIGEGESSNKEINKFGNLPKFDFKPKSHTELGNNLNMLDFDLATKTTGSRFVFVKDKLALLERALSNFMLDIHTKINGYKEISPPLIASDNTMFGTGQLPKFENDQFEIKFDDNGRKFLIPTAEVILTNMVKNQILSVNDLPIRLVASTPCFRKEAGSYGKDTKGMIRQHQFYKVELVSIVENDKCIEELERMTKSAVMILDKLNLPYRKIILSTGDIGFSAEKTYDIEVWIPSEN

SEQ ID NO: 185120 - protein, 247 aa, Unknown
  Bacterial polypetide isolated from the Sargasso Sea
RAIANFMLDKHTNENGYTEYNLPFLVKDDSLFGTGQLPKFGEDLFTAGENHWLIPTAEVTLTNMVREEILNQNQLPMRFTSYTPCFRSEAGASGKDTRGMLRQHQFTKVELVSVVEPQNSEQELERMLESAESILKDLNIHYRVMTLCTGDMGFSACKTYDIEVWLPGENNYREISSCSSCSDFQARRMNTRYKVENKNIFVHTLNGSGLAVGRTLIAILENYQMPNGNIKIPEVLKKYLNNSDTLI

SEQ ID NO: 185121 - protein, 162 aa, Unknown
  Bacterial polypetide isolated from the Sargasso Sea
CFRKEAGSYGKYTKGMIRQHQFYKVELVSIVEPDKCLKELERMLSCAESILKKLDIPYQVVLLSSGDMGFSAEKTYDIEAWIPSEKKYREISSCSSCGSFQARRMGAKYKSDSGIEYVGTLNGSGLAVGRLMIALLENNQNEDGSISIPDVLKKYMNNLEKI

SEQ ID NO: 185122 - protein, 175 aa, Unknown
  Bacterial polypetide isolated from the Sargasso Sea
VLSNQLDVIKKNLSEKEVLLSKTLSHLNDFLLDIPNIPHQDVEEGNSEDDNRVIKTFGEVQKQDSINHLKITSSIDIESAVKLAGTRFAVLKDDIAKLHRALISFMLDVAEKNGYQERYVPFIANSRSLTGTGQLPKFEEDLFKITDDLFLIPTAEVPLTNLYADSVLEQSNLPN

SEQ ID NO: 185123 - protein, 97 aa, Unknown
  Bacterial polypetide isolated from the Sargasso Sea
MQIQYWNKAISLIKVTSHTPCFRSEAGSYGKDTKGLIRQHQFEKVEIVQIVHPDQSDNALEDLLSNAEEILQLLELPYQVVQLCGGDLGFSSAKTYD

SEQ ID NO: 185124 - protein, 146 aa, Unknown
  Bacterial polypetide isolated from the Sargasso Sea
MRQHQFYKVELVSIVEPKNCTSELDRMLNCAEEILKKLEIPYQIVLLSSGDMGFSAEKTFDIEVWIPSEKKYREISSCSSCGSFQARRMGAKYKTSKGNDYVGTLNGSGLAVGRLMIALLENNQNEDGSINIPTILKKYMNNLDKI

SEQ ID NO: 185125 - protein, 252 aa, Unknown
  Bacterial polypetide isolated from the Sargasso Sea
MHDITFIRENPDFFDELLKKRFIDPKSNEIISLDKKKRDILTKSQELRAERKNLSSSFANLNEGDKADLQKKVQLIKNKIDELENDISIIDEQLKNNLSSLPNLPHKDVPVGKDETSNKLIKQVGKIPSFSFTPKSHYELGENLEMIDFEQAGKVSGTRFVYLKKKMAQLERAIANFMLDKHTNEFNYTEINPPNLVRDAAAYGTGQLPKFSEDLFKTNTNHWLIPTAEVPLTNLVLDTIVSDKNLPLRYTA

SEQ ID NO: 185126 - protein, 276 aa, Unknown
  Bacterial polypetide isolated from the Sargasso Sea
EKLGLIDVEKASSVSGSRFSYLFGDLVKMQFNLVSYAMNKLSERGFNPTIPPVLVRENALFGTGFFPDDSDQVYEIPNDDLFLVGTSEVSLAALHGDEILDFDKLPIRYAGYSTCFRREAGTYGKDTTGIFRVHQFDKVEMFSFCTPEKSEEEHEFILSVEEEILQELEIPYRVVDVCTGDLGSSAAKKFDIEAWIPSQNTYREVTSCSNTTDFQARRLNIRTKVDKDSALLHTLNGTAIAVGRILIALLENNQTEDGVIEFSDSLGNILGVEKLS

SEQ ID NO: 185127 - protein, 132 aa, Unknown
  Bacterial polypetide isolated from the Sargasso Sea
PDHSEEAHQQITADAEAVLQALELPYRVLDLCTADLGFSARRTYDLEVWLPGAGAYREISSCSVCGDFQARRSSIRTKEGKATKLVHTLNGSGLAVGRTMAALLENGQQPDGSVLLPKALVPYVGRERLQPE

SEQ ID NO: 185128 - protein, 44 aa, Unknown
  Bacterial polypetide isolated from the Sargasso Sea
EETYVPYLVNRQALEGTGQLPKFEEDLFKIPQAQGDKDLYTIPT

SEQ ID NO: 185129 - protein, 237 aa, Unknown
  Bacterial polypetide isolated from the Sargasso Sea
DRFALLERALINFMLDIHTTEFNYKEISPPLIVNEDVMFGTGQLPKFEDDQFEIKFEKSDQRKFLIPTAEVVLTNLVRKSLLTKDQLPQRYVASTPCFRKEAGSYGKDTKGIIRQHQFYKVELVSIVEPKDCELELNRMLKCAREILERLKIPYQIILLSSGDMGFSAEKTFDIEAWIPSEKIYREISSCSSCGSFQARRMGAKYKSQNGNDFVGTLNGSGLAVGRLMIALLENNQN

SEQ ID NO: 185130 - protein, 250 aa, Unknown
  Bacterial polypetide isolated from the Sargasso Sea
KSKEISVELEKISEQQKKTKTELDNILSRIPNIPHQDVPNGKDENDNVEVLKDGKVPEFDFKPKSHYELGEKLGMLDFDLATKTTGSRFVFVKKELALLERALSNFMLDTHIVQNGYQEISPPLIASDNTMYGTGQLPKFENDQFEIKFDEGSDRKFLIPTAEVILTNIVKDKIVDQKDLPMRFVASTPCFRKEAGSYGKDTKGMIRQHQFYKVEMVSIVEKENCLEELERMTNCATDILDKLELPYRKV

SEQ ID NO: 185131 - protein, 284 aa, Unknown
  Bacterial polypetide isolated from the Sargasso Sea
LEHEKKNISKSKDEKLFSKSKEITKNIEQISKEQIQCKIDLDKILSSIPNLPLNDVPLGKDESSNKEIKKLGEIKNFDFTPKSHFEIGEKLKMLDFELASKTTGSRFVFVKDQFAALERAISNFMIDTHTQKNGYKEISPPIIASEHSMYGTGQLPKFENDQFEIKFDEKSDRKFLIPTAEVILTNMVRDQILNHKDLPIRLVASTPCFRKEAGSYGKDTKGMIRQHQFYKVELVSVVENHKCLDELERMTDCATMILDKLKLPYRKIILSTGDMGFSAEKTYD

SEQ ID NO: 185132 - protein, 231 aa, Unknown
  Bacterial polypetide isolated from the Sargasso Sea
WSEMKQCMDQINYPKFAEDSYKTTNGWWLIPTSEVTLTNTVSGQNLNETDLPIRLTAHTLCFRSEAGSAGKDTSGMLRQHQFEKVEMVSITHPDQSLEEHSRMTKCAQAILEKLGLPYRTVVLCTGDMGFGARKTHDLEVWLPGQGKYREISSISVCGDFQARRMLARFKPAEGGKLQFVHTLNGSGVAVGRCLIAVLENGQNEDGSVSLPPVLSPYLGNCTRINSTGGLE

SEQ ID NO: 185133 - protein, 257 aa, Unknown
  Bacterial polypetide isolated from the Sargasso Sea
LIGNGARLERALINFMLDMHTKNGYLELMPPALVNSESLTGSGQLPKFSNESFKCSNDDLWLSPTAEVPLTAFHRNELIDPKQLPIKYVAYSPCFRREAGSYGRDTKGLIRLHQFNKVELYWFCDPSKSLEAHKKITSDAESILKNLNLPYRLIDICTGDLGFSSSRTFDLEVWLPSSKCYREISSCSNCLDFQARRSSIRSKIDKKNTYIHTLNGSGLAIGRTMAAILENGQQSDGSVKIPDALVPYFGSNFLKTA

SEQ ID NO: 185134 - protein, 301 aa, Unknown
  Bacterial polypetide isolated from the Sargasso Sea
QNKLNDQINPIINFIPNIALDEVPVGKDEKSNKELKIVGNVPKFDFKIKSHYEIGKNLALMDFDTATKTSGSRFVFLKGKLAQLERAISNFMLDIHTKEFGYNEISPPLIVTEDTMFGTGQLPKFENDQFEVKLDSEQRKYLIPTAEVILTNMVKDNLINKKDLPLRLVASTACFRKEAGSYGKDTKGMLRQHQFYKVELVSIVESTKCLDELERMISCAEEILKRLKLPYRTVLLSTGDMGFSSEKTVDLEVWIPSENKYREISSCSSCGQFQSRRMKGKYKDEKNKLDFLGTLNGSRLA

SEQ ID NO: 185135 - protein, 170 aa, Unknown
  Bacterial polypetide isolated from the Sargasso Sea
IRYAGYSTCFRREAGTYGKDTTGIFRVHQFDKVEMFSFCNPEKSEEEHEFILSVEEEILQELEIPYRVVDVCTGDLGSSAAKKFDIEAWIPSQNTYREVTSCSNTTDFQARRLNIRTKVEKDTALLHTLNGTAIAVGRILIALLENNQTEDGGVEFSDSLGNILGIEKLS

SEQ ID NO: 185136 - protein, 250 aa, Unknown
  Bacterial polypetide isolated from the Sargasso Sea
MHNIKDLRKNIQLFKKKFLDRNLNFDEKLFEKLDTLNRKLIFDKEKLEQEKKILSKNKDSSNFSKSSEISQKIENVSNEQMDVQNKLNNILFLLPNIALDDVPVGKDDKMNKNIKKIGEIKKFPFKIKSHVDIGLINKSIDFDISIKLSGSRFVVLKDKIALLERALINFMLDVHTKEFKYTEISPPLIVNEDVMFGTGQLPKFEDDQFEINFENSEIRKFLIPTAEVVLTNLVRKTLLPKDQLPLRYVA

SEQ ID NO: 185137 - protein, 250 aa, Unknown
  Bacterial polypetide isolated from the Sargasso Sea
MEKKNISKNKDEKLFAKSKEISSKIDDLDKKQSLIKKQLDDILSTIPNIPLNDVPVGKDENDNKEILKSGEIKNFSFNPKSHYEIGEKLNMLDFDLATKTTGSRFVFVKDKLASLERAIANFMIDTHTKINGYTEISPPLLATDETMFGTGQLPKFENDQFEIKLDDKEGRKFLIPTAEVILTNMVKNQIINLNLLPIRVVASTPCFRKEAGSYGKDTKGMIRQHQFYKVELVSIVENSKCLDELERMTN

SEQ ID NO: 185138 - protein, 263 aa, Unknown
  Bacterial polypetide isolated from the Sargasso Sea
ISSKIKKLSNEQVKTKSELDNILSSIPNIPNSDVPEGSNEEFNKVIKTSGEIKAKNFKEKSHYELGEKLKMLDFDLATKTTGSRFVFVKDKLAMLERALSNFMLDIHILENGYKEISPPLMASENTMYGTGQLPKFENDQFEIKLDKDDDRKFLIPTAEVILTNVVKNQILNLSDLPLRLVASTPCFRKEAGSYGKDTKGMIRQHQFYKVELVSIVENSNCLDELERMTNCATKILDKLILPYRKIILCTGDMGFSAEKTYDI

SEQ ID NO: 185139 - protein, 267 aa, Unknown
  Bacterial polypetide isolated from the Sargasso Sea
KSHYELGEKLGMLDFDLASKTTGSRFVFVKDQLALLERALSNFMLDTHISENGYKEISPPLMASEETMYGTGQLPKFENDQFEIKLDKNDERKFLIPTAEVILTNVVKNQIIDQNDLPLRLVASTPCFRKEAGSYGKDTKGMIRQHQFYKVELVSIVQNDKCLDELERMTNCATKILDKLQLPYRKIILCSGDMGFSAEKTYDIEVWLPSEKKYREISSCSSCGSFQARRMNSRYRNANNEKIFTGTLNGSGLAIGRTLIAIRKTSR

SEQ ID NO: 185140 - protein, 97 aa, Unknown
  Bacterial polypetide isolated from the Sargasso Sea
GDMGFSAEKTYDIEAWIPSEDKFREISSCSSCGTFQARRMGAKYKSDNGNEFVGTLNGSGLAVGRLMISLLENNQNEDGSINIPNVLKKYMNNLEKI

SEQ ID NO: 185141 - protein, 162 aa, Unknown
  Bacterial polypetide isolated from the Sargasso Sea
GFRKEAGSYGKDTKGMIRQHQFYKVELVSIVEPKDCNVELDRMINCAKYILEKLEIPFQIVLLCTGDMGFSAEKTYDIEAWIPSENKYREISSCSSCGTFQARRMGAKYKSQKGNDFLGTLNGSGLAVGRLLIALIENNQNEDGTITIPNVLKKYMHNQDKI

SEQ ID NO: 185142 - protein, 313 aa, Unknown
  Bacterial polypetide isolated from the Sargasso Sea
KDKINRELINKKELLEQEKKALSKSKEKSNFEKSKKLSNEIEKIISNQKNTQREINQIIFNLPNIATEDVPVAKDQTGNKLIRKFGNIKKFDFKLKSHVELGQKNKGIDFDTSTKLSGSRFVLLRDNFAKLERALINFMLDIHVNQFKYIEISPPLIVNEDVMFGTGQLPKFEEDQFELKLNNSDERKFLIPTAEVVLTNIVKNSNLNLKDLPMRFVASTPCFRKEAGSYGKDTRGIMRQHQFYKVELVSIVEPNNCKDELERMLNCAEEILKKLEIPYQVMLLSSGDMGFSAEKTFDIEVWIPSENNYREIQ

SEQ ID NO: 185143 - protein, 243 aa, Unknown
  Bacterial polypetide isolated from the Sargasso Sea
MHNLKELRKNLDVTKKKLKDRNANFDIKRFNEKDKLNRDLINKKEKLEQEKKLLSKSKDKSNFEKSKKISNDIIDLSKKQNIIQNELDKIIFSLPNLALDDVPIGKDESFNKLIKKKGDKKKFLFKVKSHVELGAKENNIDFETSSKLSGSRFVVLKGNYALLERALINFMLDTHVNNFKYIEISPPLIVNEDVMFGTGQLPKFEEDQFEIKFDNSEQRKFLIPTAEVVLTNLVRKSIIEKKE

SEQ ID NO: 185144 - protein, 243 aa, Unknown
  Bacterial polypetide isolated from the Sargasso Sea
YSNDENLENMTKNTFVDHSEIGKLLNLYDQDIAVKMSSSRFSLLFGSFAQLHRALGSFMIDEHINNHGYTEVNVPLIVNSDSLLGTGQLPKFKDDLFELKNKKNFFLIPTAEVPLTNIFQNKIFDEDELPTKYTSLSYCFRSEAGSYGKDTKGLIRQHQFEKVELVNAVMPCKSDEALDSLLNCAEKILQLLDLPYRKVLLCSGDTGFSSYITYDLEVWMPSQNSYREISSCSNFGDFQARRL

SEQ ID NO: 185145 - protein, 114 aa, Unknown
  Bacterial polypetide isolated from the Sargasso Sea
MPYRKVLLCTGDMGFGACKTYDLEVWLPAQNTYREISSCSNMLDFQARRMQARFRNPETNKTELLHTLNGSGLAVGRTLVAILENNQQADGSVTIPKALVPYMAGQEVITANSV

SEQ ID NO: 185146 - protein, 301 aa, Unknown
  Bacterial polypetide isolated from the Sargasso Sea
AVDEAKAQVADALQTIDTELDKEVASAKAIQDEIREYLMGIPNVPQEAVPAGNDEDDNVEVRRWGTPKTLPFEPKDHVDIGEALEGGLDFERAAKLSGARFAVMSGGLARMHRALIDFMLDIHSDEHGYQEVYVPFLVGPEALRGTGQLPKFAEDLFKIEGERELYLIPTAEVPVTNLAADEILEANTMPRRYTCHTPCFRSEAGSHGRDTRGMIRQHQFEKVELVQMVRPEESDAALEALTGHAEAILQKLDLPYRVVILCGGDLGFSSSKTYDIEVWLPSQQCYREISSCSNFRDYQSR

SEQ ID NO: 185147 - protein, 225 aa, Unknown
  Bacterial polypetide isolated from the Sargasso Sea
MFGTGQLPKFENDQFEIKLEEENDRKFLIPTAEVILTNMVKNQILNTQDLPMRLVASTPCFRKEAGSYGKDTKGMIRQHQFYKVELVSIVENSQCINELERMTNCARMILDKLKLPYRQIILSTGDMGFSAEKTYDIEVWLPSENKYREISSCSSCGTFQARRMKARYKNSNSETLFLGTLNGSGLAVGRTLIAILENYQTQDGSVIIPDVLKPYMGNIDKIGIN

SEQ ID NO: 185148 - protein, 192 aa, Unknown
  Bacterial polypetide isolated from the Sargasso Sea
VILTNIVKDKIIDIKNLPMRFVASTPCFRKEAGSYGKDTKGMIRQHQFYKVEMVSIVEQEKCFEELERMTNCATGILDLLELPYRKMILCSGDMGFSAEKTYDIEVWLPSENKYREISSCSSCATFQAVRMKARYKGPNNETLYAGTLNGSGLAVGRTLIAILENYQQKDGSITIPKILRPYMNNLEKISLN

SEQ ID NO: 185149 - protein, 294 aa, Unknown
  Bacterial polypetide isolated from the Sargasso Sea
GNKPTFDFIPKPHFEIGENANSMNFETATKLSGSRFVILKGQLAKLERAIANFMIDKHTSINGYIELHVPYLVKEDTLYGTGQLPKFADDLFTAGEDHWLIPTAEIPLTALHSNEILNVEQLPMRVTSYTPCFRSEAGAAGKDTRGMLRQHQFTKVELVSLVEPKQSKDELERMLSCAEGILQDLDLHYRVMTLCTGDMGFNANKTYDIEVWLPGENKYREISSCSNCGDFQSRRMNTRYKQNDKNTYIHTLNGSGLAVGRTLIAILENYQTTDGNVQIPRVLKKYFDNQDNLF

SEQ ID NO: 185150 - protein, 234 aa, Unknown
  Bacterial polypetide isolated from the Sargasso Sea
SPPLLATENTMYGTGQLPKFENDQFEIKLDGNDKKYLIPTAEVILTNMVKNQILNINDLPMRLVASTPCFRKEAGSYGKDTKGMIRQHQFYKVELVSIVEINSCIAELERMTECATDILDQLKLPYRKIILSTGDMGFSAEKTYDLEVWLPSENKYREISSCSSCGSFQARRMKARYKNKDNKTIPVGTLNGSGLAVGRTLIAIIENYQTEDGSVIIPDVLKPYMNNIDKISNN

SEQ ID NO: 185151 - protein, 181 aa, Unknown
  Bacterial polypetide isolated from the Sargasso Sea
GDEILEHDSLPLRYAGFSTCFRREAGTYGKDTTGIFRVHQFDKVEMFSFCDPEKSKEEHEYLLSLEEEILNDLEIPYRVVDVCSGDLGASAAKKYDIEAWIPSQNNYREVTSCSNTTDYQARRLNIRTKKDKEVSLIHTLNGTALAVGRILIALIENNQQEDGTVNFSDNLTKIIGVEKLS

SEQ ID NO: 185152 - protein, 268 aa, Unknown
  Bacterial polypetide isolated from the Sargasso Sea
YRFRFVFVKSKLALLDLALSNFMLDIHIQKNGYEEISPPLLASENTMFGTGQLPKFENDQFEVKLDKETERKFLIPTAEVILTNIVKDKILDVKSLPLRFVASTPCFRKEAGSYGKDTKGMIRQHQFYKVEMVSVVEQNKCLEELERMTNCATGILDLLELPYRKMILCSGDMGFSSEKTYDIEVWLPSENKYREISSCSSCSTFQAVRMKTRYKDSNKETLYVGTLNGSGLAIGRTLIAILENYQQKDGSITIPKVLKPYMNNLEKI

SEQ ID NO: 185153 - protein, 281 aa, Unknown
  Bacterial polypetide isolated from the Sargasso Sea
EKIKLEINTLKELENLKNDELKSILSRLPNIPHETTPIGISENDNQLYREWGQKPQFDFKPKQHFQIGEDINMMNFEIAAKLSGSRFVVLKNKLSKLERAISNFMLDKHTTENGYSEFSLPYLVKDDALYGTGQLPKFSEDLFTAGENHWLIPTAEVPLTNLVRENNLNINSLPMRVTSYTPCFRSEAGAAGKDTRGMLRQHQFTKVELVSIVEPEQSNQELERMLESAESILKDLNLHYRVMTLCTGDMGFAAQKTYDIEVWLPGENNYREISSCSNCGD

SEQ ID NO: 185154 - protein, 78 aa, Unknown
  Bacterial polypetide isolated from the Sargasso Sea
MVKDSALFGTGQLPKFGEDLFTAGEDHWLIPTAEVPLTNMVREEILNQNQLPIRVTSYTPCFKSEAGAAGKDTRGMLR

SEQ ID NO: 185155 - protein, 305 aa, Unknown
  Bacterial polypetide isolated from the Sargasso Sea
MHNLKEIRKDFSKFENDLEKRSVKINFNHLKKLDQLNRDLIQKKENLEKEKKDISKSKDENLFKKSKEISLELEKISEQQKNSKNELDNILSSIPNIPHQDVPNGKDENDNVEVLKAGKVPEFDFKPKSHYELGENLGMLDFNLATKTTGSRFVFVKKELALLERALSNFMLDTHIVQNGYEEISPPLIASDNTMYGTGQLPKFENDQFEIKFDEGSDRKFLIPTAEVILTNIVKDKIVDQKDLPMRFVASTPCFRKEAGSYGKDTRGMIRQHQFYKVEMVSIVEKENCLEDLERMTNCATDILG

SEQ ID NO: 185156 - protein, 103 aa, Unknown
  Bacterial polypetide isolated from the Sargasso Sea
KKTYDLEVWLPGQNNGKGAYREISSCSNCGDFQARRMNAKFKDKESNKIDFLHTLNGSGLAIGRTIIAILENYQQIDSSILIPEVLVPYMKGITKIENPFNSK

SEQ ID NO: 185157 - protein, 274 aa, Unknown
  Bacterial polypetide isolated from the Sargasso Sea
WDSEKSSVIAKSRFVTLFNHAAKLERSLINFMLDLHVKKGYLEVLPPALINTASLTGSGQLPKFAEESFRCADDDLWLTPTAEVPITSLHRGEIIPRDLLPLKYAAYSPCFRREAGSYGRDTRGLIRLHQFNKVELYWFSTPEKSSEALEQITSDAESVLQELELPYRVIQLCTGDLGFSSKKTYDLEVWLPGANTFREISSCSNCGDFQARRSSIRTKDNNKKNILLHTLNGSGLAIGRTMAAVLENGQQSDGSINLPKALIPYFGSNKLQPE

SEQ ID NO: 185158 - protein, 271 aa, Unknown
  Bacterial polypetide isolated from the Sargasso Sea
AQKNKLSKNFGELKKSGQSTDELALELEEIKSQTTDLEKNLSALQIEISSFLMDIPNLISEDTPIGTSEDDNKLIEEYLKPQILKSDSHLEITDQISLELGNKLSGSRFSVLKGNVAKLHRSLCTYMISEAINNGYEETYVPYIVNYDALEGTGQLPKFEEDLFKLSNDQYLIPTAEVPLTNLFRDQIIDQDLLPIKLTAHTPCFRSEAGSYGKDTNGLIRLHQFDKVEIVQIVKPQDSSKALEDITSHAKSVLEKLELPHRVVQLCSGDV

SEQ ID NO: 185159 - protein, 321 aa, Unknown
  Bacterial polypetide isolated from the Sargasso Sea
YLQFQNLPLSDVPVGADENSNKEVNKSGAIKGFNFNPKSHYELGENLKMLDFDLATKTTGARFVFVNDKLALLERAIANFMLDTHTQVNGYKEISPPLMANDNSMFGTGQLPKFEDDQFEIKIEEKSGRKFLIPTAEVILTNIVRDKILNIKDFPMRFVALTPCFRKEAGSYGKDTKGMIRQHQFYKVELVSIVENYKCIDELERMTNCATMILDKLKLPYRKIILSTGDMGFSAEKTYDIEVWLPSENKYREISSCSSCGTFQARRMKARYKNKNNETEFVGTLNGSGLAVGRTLIAILENYQNSDGSISIPDGSKTLHE

SEQ ID NO: 185160 - protein, 218 aa, Unknown
  Bacterial polypetide isolated from the Sargasso Sea
LNKDQIKIKNEIDSLLASLPNLALEDVPIGKDEKTNKEVNKVGEIIKFDFKPDSHEQIGKKINQMDFDVATKTSGARFVFLKDQLALLERAISNFMLDIHTKEFGYHEISPPLIVNDSTMFGTGQLPKFESDQFEIKSDDKNSRKFLIPTAEVILTNIVKDSFVQEKELPLRLVASTACFRKEAGSYGKDTKGMIRQHQFYKVELVSIVDPKKSLEEL

SEQ ID NO: 185161 - protein, 302 aa, Unknown
  Bacterial polypetide isolated from the Sargasso Sea
DNSSLFDEILKKRNISSSSKAILLLYEDYLENLKKTQNLQEKKNYFSKKFSPKLSQKDLEKIKNDVAKIKTELDELKKITAEKQKKLNQVLLEIPNLVDERVPVGQSENDNVILKESGKIDKPKFDVKNHVEILEKHNLLDYHKASKLSGSRFSILRSSLATLHRALVNFMIDINVTEFQYEECIVPELVKSDCLIGTGQLPKFDEDLFKTDFNDLWLIPTAEVPLTNFHREEIIDSTLLPLRYTSFTNCFRSEAGAAGKDTRGLMREHQFGKVELVSITEPINSMSEMERMIGCVEMILEK

SEQ ID NO: 185162 - protein, 156 aa, Unknown
  Bacterial polypetide isolated from the Sargasso Sea
KDTKGMIRQHQFYKVELVSIVENDKCSEELERMSNSATMILDALKLPYRKIVLCTGDMGFSAEKTYDIEVWLPSENKYREISSCSSCGSFQARRMKARYKGQNNSKEFVGTLNGSGLAVGRTMIAIMENYQTEDGSILIPDVLKPYMPNIDKISIN

SEQ ID NO: 185163 - protein, 228 aa, Unknown
  Bacterial polypetide isolated from the Sargasso Sea
TIPPVLVRENALFGTGFFPDDSDQVYEIPNDDLFLVGTSEVTLAALHGDEILDFDKLPIRYAGYSTCFRREAGTYGKDTTGIFRVHQFDKVEMFSFCNPEKSEEEHEFILSVEEEILQELEIPYRVVDVCTGDLGSSAAKKFDIEAWIPSQNTYREVTSCSNTTDFQARRLNIRTKVEKDTALLHTLNGTAIAVGRILIALLENNQTEDGGVEFSDSLGNILGVEKLS

SEQ ID NO: 185164 - protein, 246 aa, Unknown
  Bacterial polypetide isolated from the Sargasso Sea
MHNLKEIRNDVALFEKKIKERNSTVDIKSLIKYDKENREIIQKKEKLEQEKKTLSKKKDPQNFNKSKSLTEQIGSLEASHQKLHEKINSILYSIPNIASDDVPIGADESSNKIIKKIGEIKKFSFNVKSHTDLGLKYMDFDTATKLSGSRFVVLKDKLALLERALINFMIDIHTKKFGYVEISPPLIVNEKTMFGTGQLPKFEKDQYEIHSEKSEGRKFLIPTAEVPLSNLFRETIIDQKNLPLRF

SEQ ID NO: 185165 - protein, 313 aa, Unknown
  Bacterial polypetide isolated from the Sargasso Sea
KGNEYRTKISELEEKQRIIDKQVDDEIYNLPNFPSKDAPIGKDESDNVQIKTWGDPLKKENLKSHWEIGESLNLFDSVKSTKISKSRFITLLGNGARLERALINFMLDIHIKNGYLELMPPALVNSESLQGSGQLPKFSNESFKCSNDDLWLSPTAEVPLTAFHRNEIIDPEHLPIKYVAYSPCFRREAGSYGRDTKGLIRLHQFNKVELYWFCDPSKSLEAHKKITSDAESILKKLNLPYRLVDICTGDLGFSSSRTFDLEVWLPSSRCYREISSCSNCLDFQARRSSIRSKINKKNIYLHTLNGSGLAIGR

SEQ ID NO: 185166 - protein, 285 aa, Unknown
  Bacterial polypetide isolated from the Sargasso Sea
LIGEHASNGKKDEAGLLKNEVSSIKDKMQELENNQRIAKEELNSLLESLPNIPDDSVPIGDESVNKEIKVEGKKKEFSFTPKEHFDLGEDLGKMSFDQAAKISGARFVIQKGELARLERAIANFMLDLHTNEFGYEETNVPILVRDQAAFGTGQLPKFKDDLFKTTDDYWLIPTAEVPLTNMTRESVVDVVELPRRYVSHTPCFRSEAGAAGKDTRGIMRQHQFYKVELVSLTSEENSDDEHERMLSCAEEVLKRLGLHYRVVILSTQDMGFSAQKTYDIEVWLP

SEQ ID NO: 185167 - protein, 295 aa, Unknown
  Bacterial polypetide isolated from the Sargasso Sea
MHSLKEIRKDFSKFEKDLEKRSVKIDFNNLKKLDELNRDLIQKKENLEKEKKDISKSKDESLFKKSKEISSELEKISEQQKNTKNELDNILSNIPNIPHQHVPIGKDENDNEEVLKAGNIPEFAFKPKSHYELGENLGMLDFDLATKTTGSRFVFVKKELALLERALSNFMLDTHTIQNGYQEISPPLIASDNTMYGTGQLPKFENDQFEIKFDEGSDRKFLIPTAEVILTNIVKDKIVDQKNLPMRFVASTPCFRKEAGSYGKDTKGMIRQHQFYKVELVSIVEKENCLEELER

SEQ ID NO: 185168 - protein, 246 aa, Unknown
  Bacterial polypetide isolated from the Sargasso Sea
MIDPKRIRNDEVSVRQGLQNRGCDLQLLDRFVDLDRNWRQKQTELDKLINYRSTMMPKGKPSPEILIELKEVSEKIKSTQIEVNDCYDKMREVSLLLPNIPVQGVPIGVSEEDNKLVRQEGVVPSFSFQPKAHEEIGEALGILDFETGAKLAGSRFVLYKGWGARLERALINFMLDVHTSEHGYEEILPPVIVNQDSLIGTGQLPKFADDCFKISESEYWLSPTAEVQMTNIARDTVIDESELPIN

SEQ ID NO: 185169 - protein, 262 aa, Unknown
  Bacterial polypetide isolated from the Sargasso Sea
EKKLNELLNILPNIAHDDVPIGKDEKSNKLIKKFGNIKKHKFKPKSHNDIGLKYNEIDFDTASKLSGSRFVILKNKMALLERALINFMLDIHTSEFKYTEISPPLIVNEDVMFGTGQLPKFEDDQFEIKFENSDQRKFLIPTAEVVLTNMVRNSLINKDQLPQRFVASTPCFRKEAGSYGKDTKGMIRQHQFYKVELVSIVEPENCITELERMLKCAQHILDRLEIPYQVVLLSTGDMGFSAEKTYDIEAWIPSENKYREIS

SEQ ID NO: 185170 - protein, 309 aa, Unknown
  Bacterial polypetide isolated from the Sargasso Sea
MHDIKKIRNDPKEFDQKLKKRNVNPLSSSILKIDSKRRKNIESLEILKASVNSLSKEFGKNKSLGKSINEKKFKNEIKEKKIKISKLEDESQKLETDLKTLLENIPNICSLDVPVGVGEEDNVEVYKWGNIKKMTFEPKQHFDVLAANDIDFKSAAKISGSRFSVLLGGIATLHRAISQFMIDKHIKDHELKEVSVPVLVKDNIMYGTGQLPKFSTESYKTSNGWWLIPTAEVPLTNLMANSILNYEELPIRLCAVTQCFRSEAGSAGKDTTGMLRQHQFEKVEMVTFSSPENSAKEHLRMTDCAENIL

SEQ ID NO: 185171 - protein, 315 aa, Unknown
  Bacterial polypetide isolated from the Sargasso Sea
RGYDLDINLWEKMESSRKELQGSTEELQSELNTISKEIGIKKSQKEDSSELESKASGLTQKIKKRNKELEAVLKGIEEFLLDIPNLPDKDCPVGKNELDNVEIRTWGDVTNFSFEPKDHQTLGEEIKLLDMAAAAKVAGARFSVLKGDLAKMHRSLTQFMVDVHVENGYEELYVPYIVNKDSLIGTGQLPKFEEDLFKLNDERELYLTSTAEVPVTNLIRNEILESKELPKKWVCHTPSFRSEAGSYGKDTRGIMRQHQFEKVELVQIVEAQDSSDALEALTSDAEMILQQLELPYRVVSLCTGDLGFSSSKTMT

SEQ ID NO: 185172 - protein, 209 aa, Unknown
  Bacterial polypetide isolated from the Sargasso Sea
IQETLFTDKDNDLWLIPTGEVSLNNMFGNEIIKHELPLKYVTHTPCFRDEKSSAGRDTRGIKRVHQFEKVELYRFEHPSNSMNAFDEMVSEVSRLCEALNFTYRIVELCTGDIGFQSAKTYDIEVWSPGCEEWLEVSSISICTDFQSRRTNTRFRDQLDGKIKFPHTLNGSGLALPRVIIAILENNLLEDGTIEIPEVLREYTRFDSIS

SEQ ID NO: 185173 - protein, 240 aa, Unknown
  Bacterial polypetide isolated from the Sargasso Sea
WFIRIWTPVLVNSQSMLGTGQLPKFSTDSYSTNRDHWLIPTSEVSLTNMFSETILDEQELPKRLTCLSQCFRSEAGSAGRDTAGMLRQHQFEKVEMVSITKPEQSLFELNRMTECAQNILEVLNLPYRTMLLSSGDIGFSAAQTHDIEVWLPGQQKYREISSCSTCEDFQARRMNARYRPSNGSKPEYLHTLNGSGLAVGRCLIAVIENFQEKDGSINIPDPLKPYLNNASKISATGEFQ

SEQ ID NO: 185174 - protein, 285 aa, Unknown
  Bacterial polypetide isolated from the Sargasso Sea
KIKTNLDKILSNLPNIPHKDVPNGKDENDNVEISKSGKIPKFDFNPKSHYELGENLGMLDFDLATKTTGSRFVFVKKELALLERALSNFMLDTHTLKNGYEEISPPLLASDDTMFGTGQLPKFENDQFEVKLDEGSGRKFLIPTAEVILTNIVKDQIIDQKVLPMRFVASTPCFRKEAGSYGKDTKGMIRQHQFYKVEMVSVVEQENCLDELERMTNCATGILDLLELPYRKMILCSGDMGFSAEKTYDIEVWLPSENKYREISSCSSCSTFQAVRMKARYKNQK

SEQ ID NO: 185175 - protein, 151 aa, Unknown
  Bacterial polypetide isolated from the Sargasso Sea
MIRQHQFYKVELVSVVENDKCLDELERMTNCATMILDKLKLPYRKIILSTGDMGFSAEKTYDIEVWLPFENKYREISSCSSCGSFQARRMKSRYKNNKNETLFVGTLNGSGLAVGRTLIAILENYQSKDGSVIIPDVLRPYMNNLNKISNN

SEQ ID NO: 185176 - protein, 284 aa, Unknown
  Bacterial polypetide isolated from the Sargasso Sea
DDKNRKLISEKEKLEQERGVLSKSKDKSNFEKSKKISEKISKLSQEQLIAQNKLNELIHILPNIAHSDVPIGKNEKSNKLINKFGKIKEFSFMPKSHIEIGSKFNEIDFDIATKLSGSRFVILKNNIAKLERALINFMLDIHTNEFNYVEISPPLIVNEDVMFGTGQLPKFEEDQFEIKFENSDQRKFLIPTAEVVLTNLVRKSLINKDKLPQRFVASTPCFRKEAGSYGKDTKGMIRQHQFYKVELVSIVEPKNCITELDRMLKCAKTILDKLEIPHQSSIII

SEQ ID NO: 185177 - protein, 241 aa, Unknown
  Bacterial polypetide isolated from the Sargasso Sea
LDVHTKENGYIEHSMPVIVNSQSMFGTSQLPKFENDQYNLGDDLWLTPTSEVSLTNIVAGKIIEYDNLPLRLVSSTQCFRKEAGAAGKDTKGMIRQHQFTKVELVSIIQPEKRLEELERLLSCAESILKKLEIPYRVILLCSGDMGFSAEKTYDIEVWLPSQKNYREISSCSSCGIFQSVRMNSKYKTVDGKKEYLSTLNGSGLAVGRTIVAILENYQNSDGSITIPKVLVPYMDGCTKIN

SEQ ID NO: 185178 - protein, 225 aa, Unknown
  Bacterial polypetide isolated from the Sargasso Sea
MLDPKLIRTDLNILADRLKVKNFDLDVALLEGLEDARKVFQLETEKLQNERNTKSKSIGKAKALGEDVGEILNDMESLKSLLETKKNQLNEVQEKLKSYLLTIPNIPDDEVPEGYDESDNKIISSWGELPEFTFDVKDHADLGEALDQGLDFSKAVKLSGSRFVVLHGRLAKLHRALAQFMLDVHTLEHEYVEFNLPLIVNDDSLIGTGQLPKFEEDLFKLHKDG

SEQ ID NO: 185179 - protein, 206 aa, Unknown
  Bacterial polypetide isolated from the Sargasso Sea
YEIKNFNDEKKYLIPTAEVVLTNIIRNKILKQEELPIRYVASTPCFRKEAGSYGKDTKGLMRQHQFYKVELVSIVKPEETDKELIRMISCAEEILKILNLSFRKVLLSSGDMGFSAEKTIDLEVWIPSENKYREISSCSSCGTFQARRMNAKFKNNEKKEFLATLNGSGLAVGRLIIALLENNQNEDGTINIPKELQKYIDNKEKI

SEQ ID NO: 185180 - protein, 241 aa, Unknown
  Bacterial polypetide isolated from the Sargasso Sea
NGYEEISPPLLASEDTMFGTGQLPKFENDQFEVKLEKGSDRKFLIPTAEVILTNIVKDKIIDQKMFPMRFVASTPCFRKEAGSYGKDTKGMIRQHQFFKVEMVSIVEQDKCLDELERMTNCATGILDLLELPYRKVILCSGDMGFSAEKTYDIEVWLPSENRYREISSCSSCSTFQSVRMRARYKNQNKETLYAGTLNGSGLAIGRTLIAILENYQQKDGSITIPKILRPYMSNLEKISIN

SEQ ID NO: 185181 - protein, 225 aa, Unknown
  Bacterial polypetide isolated from the Sargasso Sea
WYGTNQLPKFAEDSYKTTNGWWLIPTSEVTLTNTVAGQNLNETDLPIRLTAHTLCFRSEAGSAGKDTSGMLRQHQFEKVEMVSITHPSQSLEEHSRMTKCAQAILEKLGLPYRTVVLCTGDMGFGARKTHDLEVWLPGQGKYREISSISACGDFQARRMLARFKPTEGGKLQFVHTLNGSGVAVGRCLIAVLENGQNEDGSVSLPPVLSPYLGNCTRINSTGGLE

SEQ ID NO: 185182 - protein, 209 aa, Unknown
  Bacterial polypetide isolated from the Sargasso Sea
FEIKLENEKSRKFLIPTAEVVLTNIVRDTFLKYEELPLRFVASTACFRKEAGSYGKDTKGMIRQHQFYKVELVSIVDPEKCMVELDRMLNCAQEILKKLKLPYRVVLLSSGDMGFSAEKTYDLEVWIPSENKYREISSCSSCGQFQARRMKSKYKNKKNESDFLGTLNGSGLAVGRTLIAIMENYQQKDGTITIPDVLKPYMDGENSIK

SEQ ID NO: 185183 - protein, 94 aa, Unknown
  Bacterial polypetide isolated from the Sargasso Sea
FFSRTFDIEVWLPSSKCYREISSCSNCLDFQARRSSIRAKIDKKNTYLHTLNGSGLAIGRTMAAILENGQQTDGSVKIPDALVPYFGSDILKTA

SEQ ID NO: 185184 - protein, 146 aa, Unknown
  Bacterial polypetide isolated from the Sargasso Sea
LHQFNKVELYWFCDPNKSIEAHKKITLDAESILKKLNLPYRLVDICTGDLGFSSSRTFDLEVWLPSSKCYREISSCSNCLDFQARRSSIRTKIEKKNTYLHTLNGSGLAIGRTMAAILENGQQSDGSVKIPDALVPYFGSNILKTS

SEQ ID NO: 185185 - protein, 303 aa, Unknown
  Bacterial polypetide isolated from the Sargasso Sea
ITVKIEELTKKQKVVKDKLDSYLSSIPNVPLKDVPIGKEESDNKELIKVGNITKFSFKPKSHYEIGEKLNMLDFDLATKTTGSRFVFVKDKLASLERAISNYMIDTHTKINGYTEISPPLLASENTMFGTGQLPKFENDQFEVKLDDKNDRKFLIPTAEVILTNMVKNQIINIKSLPMRLVASTPCFRKEAGSYGKDTKGMIRQHQFYKVELVSVVENNKCLDELERMTNCATKILDDLKLPYRKIILSTGDMGFSAEKTYDIEVWLPSEEKYREISSCSSCGTFQATRMKARYKNANNNIEF

SEQ ID NO: 185186 - protein, 274 aa, Unknown
  Bacterial polypetide isolated from the Sargasso Sea
ERAAKLSGSRFTVLTGAFARLERALGQFMIDMHTSEHGYLEVSPPLLVRDEALYGTGQLPKFSEDLFKASEDRWMIPTAEVPLTNLVAGEILPAEELPLRYSALTYCFRSEAGSAGRDTRGMLRQHQFLKCEMVSITDADSSLDELERMTSAAEDVLKKLGLHYRVMALSTGDMGFSARKTYDIEVWLPGQNTYREISSCSVCGDFQARRMNARYRGKEEKQTRFVHTLNGSGVAVGRALIAVVENYLNEDGSVTVPEALVPYMGGMTRIEKAK

SEQ ID NO: 185187 - protein, 218 aa, Unknown
  Bacterial polypetide isolated from the Sargasso Sea
PKFENDQFEIKLESETERKFLIPTAEVILTNIVKDKIVNLDSLPMRFVASTPCFRKEAGSYGKDTKGMIRQHQFYKVEMVSIVEQNKCIEELERMTNCATGILDLLELPYRKMILCSGDMGFSAEKTYDIEVWLPSENKYREISSCSSCSTFQAVRMKARYKDKKQETQFVGTLNGSGLAIGRTLIAILENYQQKDGSIIIPKILRPYMNNLEKISLN

SEQ ID NO: 185188 - protein, 290 aa, Unknown
  Bacterial polypetide isolated from the Sargasso Sea
MISLKILRNETELCKRLIASKQGEVDLDHVLSLDKKLRQLKTISNEMRAERNSASEAIGKLKKEGEDASDSIKKTRELGDDLKNIEKELHTVSKDLESYLYTLPNLPHESVPEGLDENFNVEIRSYGSKPEFNFEPKSHLDLGEALGLFDFQKGAKLSGSGFPLYIGKGATLERYLINAMIEHHIQEFSFKEVFPPVLMKKESMITTGQLPKFEEDMYHTEVDNLYLAPTAEVPVTNIHRNEIISEDELPIYYVAYSPCFRRESGSYGKDTRGLLRVHQFNKVELVSYNT

SEQ ID NO: 185189 - protein, 253 aa, Unknown
  Bacterial polypetide isolated from the Sargasso Sea
ISNFMIDTHTKKNGYTEINPPLIANESTMFGTGQLPKFESDQFEIKLDSESDRKFLIPTAEVILTNMVRDQILNASNLPIRLVASTPCFRKEAGSYGKDTKGMIRQHQFYKVELVSIVDESKCEEELERMTNCATDILNQLELPYRKVILSTGDMGFSAEKTYDIEVWIPSENKYREISSCSSCGTFQAKRMKARYKNSKNEIKFPGTLNGSGLAIGRTLIAILENYQNSDGSISIPNKLKPYMNGLDKISVK

SEQ ID NO: 185190 - protein, 310 aa, Unknown
  Bacterial polypetide isolated from the Sargasso Sea
KLIQEKEKFEMEKKTISKSKDQSLFEKSKELSLKIEEINKNQIKLQSRINDILSSIPNIPLSDVPVGKDENSNKEIEKKGEIKEFNFKPKSHYELGDRLNMLDFDLATKTTGSRFVFVKKELAQLERAISNFMIDTHTQKNGYTEISPPLIATAETMFGTGQLPKFENDQFEIKLDEGDGRKFLIPTAEVILTNIVKNQILEKNELPIRVVASTPCFRKEAGSYGKDTKGMIRQHQFYKVELVSIVENDKCPEELERMSNSATMILDALKLPYRKIVLCTGDMGFSAEKTYDIEVWLPSGNKYREISSCS

SEQ ID NO: 185191 - protein, 98 aa, Unknown
  Bacterial polypetide isolated from the Sargasso Sea
DTGFSAAKTYDLEVWLPSQETYREISSCSNCESFKSRRMKARYKNSKSKQTDYPHTLNGSGLAIGRTLIAVLENNQNEDGSVTIPDVLRPYMQNRERI

SEQ ID NO: 185192 - protein, 188 aa, Unknown
  Bacterial polypetide isolated from the Sargasso Sea
NMVKDQILNVKNLPIRLVASTACFRKEAGSYGKDTKGMIRQHQFYKVELVSIVENNKCIDELERMTKCATMILDLLKLPYRKVILCTGDMGFSAEKTYDIEVWLPSEKKYREISSCSSCGTFQSRRMKARYKNSNNETVFVGTLNGSGLAIGRTLIAILENYQQKDGSILVPEVLKPYMNNIDKIIKI

SEQ ID NO: 185193 - protein, 280 aa, Unknown
  Bacterial polypetide isolated from the Sargasso Sea
MDKENRELIQKKEKLEQEKKIISKQKDKKLFEKSKQISKNILSLEESQKKTKKKISEILDFLPNIALEDVPVGKDDNSNKELSKVGNIPNFKFIPKSHYEIGQKSGLMDFETATKTSGSRFVFLKGNLAKLERAISDFMLDTHTKEFDYQEISPPLLVSEETMFGTGQLPKFETDQFEIKLDGEKNRKFLIPTAEVILTNMVREKTLAHNQLPLRFVASTACFRKEAGSYGKDTKGILRQHQFYKVELVSIVEPKKCLEELKRMTSCAESILKKLKLPYR

SEQ ID NO: 185194 - protein, 302 aa, Unknown
  Bacterial polypetide isolated from the Sargasso Sea
NVDYSNEINKVIELDEQRKKIQTNLDSLLSESNTIAKSIGNLFKSGKIKEANSLKEKSTQIKPRIKELQENLSSIKLDLESVLYTIPNIPHPLVKQGKDDSNNEIVFESEAVDQNVNNLLPHWELAKNLDIIDFELGNKITGAGFPLYKGKGAKLQRGLINYFLDKNTDAGYHEIQPPILINENSGFGTGQLPDKEGQMYHVTNDNLYLIPTAEVPITNIYRDTIVDKNELPIKLTGYTPCFRREAGSYGSHVRGLNRLHQFDKVEIVRIESSENSYEILDEMVDHVKSLLSELNLPFRILR

SEQ ID NO: 185195 - protein, 245 aa, Unknown
  Bacterial polypetide isolated from the Sargasso Sea
MYNLKDIRNDFDTFVKTLKKRNIDIDLNNIKKLDDENRKLIQEKENLEKEKKIISKTKDEKLFKKSKEISNQLELIIKKQKKISSSLNNILALIPNIPHKDVPEGKDENDNIEKSKTGIIPNFDFSPKSHYELGEKLNMLDFDLATKTTGSRFVFVKHELALLERALSNYMLDKHINHNGYKEISPPLIASENTMFGTGQLPKFENDQFEIKLEKETDRRFLIPTAEVILTNIVKDKIIDLKSLP

SEQ ID NO: 185196 - protein, 249 aa, Unknown
  Bacterial polypetide isolated from the Sargasso Sea
MLDTHININEYQEISPPLIASDNTMFGTGQLPKFENDQFEIKFDQGSDRKFLIPTAEVILTNIVKDKIIDKKNLPMRFVASTPCFRKEAGSYGKDTKGMIRQHQFYKVELVSIVEKENCLKELERMTDCATDILDKLKLPYKKIILCSGDMGFSAEKTYDIEVWLPSENKYREISSCSSCSTFQAQRMKTRYKNENKETVFVGTLNGSGLAVGRTLIAVLENYQQKDGSIIVPEVLRPYMNNLEIISLK

SEQ ID NO: 185197 - protein, 103 aa, Unknown
  Bacterial polypetide isolated from the Sargasso Sea
DICTGDLGFSSSRTFDLEVWLPSSNSYREISSCSNCLDFQARRSSIRTKIDKKNTYLHTLNGSGLAIGRTMAAILENGQQTDGSVKIPDALVPYFGSNCLKTA

SEQ ID NO: 185198 - protein, 280 aa, Unknown
  Bacterial polypetide isolated from the Sargasso Sea
LDFDLATKTTGARFVFVKNKLALLERAISNFMLDTHILKNGYEEISPPLLATENTMFGTGQLPKFENDQFELKLDEGTDRKFLIPTAEVILTNIVKDTILDLKSLPMRFVASTPCFRKEAGSYGKDTKGMIRQHQFYKVEMVSIVEQEKCFEELERMTNCATGILDLLELPYRKMILCSGDMGFSAEKTYDIEVWLPSENKYREISSCSSCSTFQAVRMKARYKDQKKEILHVGTLNGSGLAVGRTLIAILENNQQKDGSISIPKVLRPYMNNLEKISIN

SEQ ID NO: 185199 - protein, 273 aa, Unknown
  Bacterial polypetide isolated from the Sargasso Sea
MQPPYFMNKDIMAGVAQLEQFDEELYHVKGDDEKYLIATSEQPICGFHKDEWIQAGDLPKRYAGVSTCFRKEAGSSGRDVWGIFRVHQFEKVEQFMIVDSDLETSRAAQEEMLAVAEEFYQSLGLSYRVINIVSGELNNAAIKKYDLEAWFPGYEEYRELVSCSNCTDYQSRAMNIRTGAKDDKKFVHMLNSTLCATTRTLSCLIENYQTPHGVHVPEVLVPFMGGITHIPFVRELRASGKGDKKAKAAKGKGGGGSGAAKKKGGGADEKKSS

SEQ ID NO: 185200 - protein, 264 aa, Unknown
  Bacterial polypetide isolated from the Sargasso Sea
FDTASKISGSGFPLYIGEGAKLERALINYMLDFQTKNHDYKEIFPPFMVRSQSPLTTGNLPKFSEDMYFIESDNLWMIPTAEVPITNIHHDEILLEDQLPIKYAAYSACFRREAGSHGKETKGLLRLHQFNKVELVQFVKPKESYKILEELTKHAESILQDLGLRYRVVELCTGDLSFSAAKCYDLEVWAPGEQQWLEVSSCSNFESFQARRGNIRYRKANDNSVEFVHTLNGSGLATPRLMVAILETYQKPDGSISIPKPLKD

SEQ ID NO: 185201 - protein, 303 aa, Unknown
  Bacterial polypetide isolated from the Sargasso Sea
VGGKIKGGADPKSEEVADLRRQGNTIKQKVAVLEEEEKHLSGQLREQLLTYPNLPSPECPDGRDENDNIEVRRWGTPREETDLEEHWQIADRLGLFDTERSVRIAQSRFVTLIGAGARLERALINFMLDLHTSKGYREVLPPVLVNSASLTGSGQLPKFAEESFRCAEDDLWLTPTAEVPVTSLHRDEIIPLDQLPLRYAAYSPCFRREAGSYGRDTRGLIRLHQFNKVELYWFSHPDQSEQAHQQITADAEAVLQALELPYRVLDLCTGDLGFSAQRTYDLEVWLPGAGTYREISSCSVCGD

SEQ ID NO: 185202 - protein, 189 aa, Unknown
  Bacterial polypetide isolated from the Sargasso Sea
LIFVKDKILNHKDLPMRFVASTPCFRKEAGSYGKDTKGMIRQHQFYKVEMVSIVEQTKCLEELERMTDCATGILDLLELPYRKVILCCGDMGFSAEKTYDIEVWLPSEKKYREISSCSSCATFQAVRMKARYKNQKNETLFTGTLNGSGLAVGRTLIAILENYQQKDGSITIPKVLKPYMNNLEKILPN

SEQ ID NO: 185203 - protein, 282 aa, Unknown
  Bacterial polypetide isolated from the Sargasso Sea
MLDPKLLRNDLDFVVSELQKRTFTLDTKHYQSLEDKRKALQVETEELQNKRNILSKEIGEAKANKKNAESLLKKAESIGASLEDKERLLEQINNELRIIFLGIPNILHESVPPGKSSDDNKEISTYQSSFNKTEKVLDHAELGQRAKQINFDQAAKITGSRFSILQGEIAQLHRALTQYMMNTHIEKHGYEEVYVPYIVNEDSLIGTGQLPKFADDLFKLDVDQEFYLIPTAEVSITNIVREKVLDSEDLPLKYVSHTPCFRSEAGSHGKDTRGLIRQHQFE

SEQ ID NO: 185204 - protein, 87 aa, Unknown
  Bacterial polypetide isolated from the Sargasso Sea
MGCRSENKYREISSCSSCSTFQAVRMKTRYKNAKKETLYAGTLNGSGLAIGRTLIAILENYQQKDGSITIPKILRPYMNNLEKISLN

SEQ ID NO: 185205 - protein, 147 aa, Unknown
  Bacterial polypetide isolated from the Sargasso Sea
IRQHQFTKVELVSLVEPQQSKEELERMLNCAEGILQDLELHYRVITLCTGDMGFSANKTYDIEVWLPGEDKYREISSCSNCGDFQARRMNTRYKQNDKNIYIHTLNGSGLAVGRTLIAILENYQTADGNVRIPKVLKKYFDNQEHLF

SEQ ID NO: 185206 - protein, 328 aa, Unknown
  Bacterial polypetide isolated from the Sargasso Sea
SIKDIRKNFIEFKKLMKLRNVDSDLENILSLDEKNRNLIQEKESLEMEKKSISKKKDEKLFAKSKEISLKIDDLSKKQSLIKNELDNILSNVPNIPLNDVPYGKDENDNKEILKAGEIKNFNFKPKSHYEIGEKLNMLDFDLATKTTGSRFVFVKDKLATLERALSNFMIDTHTKINGYKEISPPLMATDDTMFGTGQLPKFENDQFEIKFDEKEGRKFLIPTAEVILTNMVKNRIINLNNLPIRLVASTPCFRKEAGSYGKDTKGMIRQHQFYKVELVSIVENNKCLDELERMTNCATMILDKLKLPYRKIILSTGDMGFSAEKTYD

SEQ ID NO: 185207 - protein, 86 aa, Unknown
  Bacterial polypetide isolated from the Sargasso Sea
MDSFRNKYREISSCSSCGTFQARRMKARYKNKDNETNFVGTLNGSGLAIGRTLIGILENYQNQDGSVIIPDVLKPYMGNIDKISPN

SEQ ID NO: 185208 - protein, 218 aa, Unknown
  Bacterial polypetide isolated from the Sargasso Sea
PFICNKQSFVGTGNLPKFEEDLFKISGTENYLIPTAEVPLTNIHSNQIINASDFPIKYVAYSACFRSEAGSYGKDVKGLIRQHQFNKIELVKITDEFSSSDELEKLTEDACSILDKLELPYRVVALSSGDMSFSSAKTYDIEVWIPSENKYREISSCSNFGSFQSRRSNIKYKVGNKSSFAHTLNGSGLAVGRTFVSILENFQNSDGTITIPKVLRPY

SEQ ID NO: 185209 - protein, 232 aa, Unknown
  Bacterial polypetide isolated from the Sargasso Sea
VSPPLIVNEDVMFGTGQLPKFEDDQFEIKTDKLEDRKFLIPTAEVVLTNLVRKSMLAIENLPLRFVASTPCFRKEAGSYGKDTKGMMRQHQFYKVELVSIVDPKDCMTELNRMLNCAEEILKKLEIPYQIVLLSSGDMGFSAEKTFDIEVWIPSEKKFREISSCSSCGTFQARRMGAKYKTSNGTEYVGTLNGSGLAVGRLMIALVENNQNEDGSITIPNILKKYMNNQDKI

SEQ ID NO: 185210 - protein, 278 aa, Unknown
  Bacterial polypetide isolated from the Sargasso Sea
NQISKSIGQLKSQKKDATHEMEKVEDIKNKVNTLKELETLKDDELKSILSRLPNIPDSSTPAGANETENVFYKDWGDKPTFDFNPKLHFEIGENANSMNFETATKLSGSRFVILKGQLSKLERAITNFMIDKHTLVNGYVEMHVPYLVKEETLYGTGQLPKFAEDLFTAGDDHWLIPTAEIPLTALHSNEILNIDQLPMRFTSYTPCFRSEAGAAGKDTRGMLRQHQFTKVELVSLVEPQQSKEELERMLNCAEGILQDLELHYRVITLCTGDMGFNA

SEQ ID NO: 185211 - protein, 49 aa, Unknown
  Bacterial polypetide isolated from the Sargasso Sea
PTAEVPLTNLFANSIIISDKLPIRLCAVSQCFRSEAGSAGKDTKGMLRQ

SEQ ID NO: 185212 - protein, 133 aa, Unknown
  Bacterial polypetide isolated from the Sargasso Sea
TTPDQSEKELERMLSSAESILKDLEIHYRIVTLCTGDMGFAAQKTYDIEVWLPGENAYREISSCSNCSDFQSRRMNTKIKKNGKNIFAHTLNGSGLAVGRTLIAILENYQTEDGNVLIPKCLQKYFDNKKTLI

SEQ ID NO: 185213 - protein, 134 aa, Unknown
  Bacterial polypetide isolated from the Sargasso Sea
NNECINELERMTNCATMILDKLELPYRKVILCSGDMGFSAEKTYDIEVWIPSENKYREISSCSSCGSFQARRMKSRYKNENNETLFTGTLNGSGLAIGRTLIAILENYQTNNGDIVVPEILKPYMNNLQKISAN

SEQ ID NO: 185214 - protein, 297 aa, Unknown
  Bacterial polypetide isolated from the Sargasso Sea
GSDEKFNKVIETRGEIKNKNFKVKSHFELGENLGMLDFELASKTSGSRFVFVKDKLAMMERALSNFMLDIHTKYNGYKETSPPLIVSENTMYGTGQLPKFENDQFEIKLDGNEDRKFLIPTAEVILTNVVKNQIIKQSNLPIRLVASTPCFRKEAGSYGKDTKGMIRQHQFYKVELVSIVENKDCLEELERMTNCATMILDKLKLPYRKVILCTGDMGFSAEKTYDIEVWLPSENKYREISSCSSCGSFQARRMNSRYKNSENEKLYIGTLNGSGLAIGRTLIAIMENYQEEDGSII

SEQ ID NO: 185215 - protein, 139 aa, Unknown
  Bacterial polypetide isolated from the Sargasso Sea
QLVHPDDSWKALDELTGHAESILEKLNLPYRSVVLCGGDLGFSSAKTIDLEVWLPGQAQYREISSCSNFLDFQARRMQARFRNESTGKVELVHTLNGSGLAVGRTLVAVLENYQDAEGNIQIPSVLRPYLNGVSLLELG

SEQ ID NO: 185216 - protein, 166 aa, Unknown
  Bacterial polypetide isolated from the Sargasso Sea
TACFRKEAGSYGKDTKGMIRQHQFYKVELVSIVEPKKCLEELDRMTNCAQEILKRLKLPYRVVILSTGDMGFSAEKTFDIEVWIPSENKYREISSCSSCGQFQSRRMKAKFKNDKNESDFLGTLNGSGLAVGRTLIAIMENYQQKDGSIIIPDVLRSYMLGAERIG

SEQ ID NO: 185217 - protein, 188 aa, Unknown
  Bacterial polypetide isolated from the Sargasso Sea
PLTALHSNEILNIDQLPMRFTSYTPCFRSEAGAAGKDTRGMLRQHQFTKVELVSLVEPQQSKEELERMLNCAEGILQDLELHYRVITLCTGDMGFNANKTYDIEVWLPGEDKYREISSCSNCGDFQARRMNTRYKQNDKNIYIHTLNGSGLAVGRTLIAILENYQTADGNVRIPNVLKKYFDNQEHLF

SEQ ID NO: 185218 - protein, 111 aa, Unknown
  Bacterial polypetide isolated from the Sargasso Sea
AYLPYRLVDICTGDLGFSSTRTFDLEVWLPSSKCYREISSCSNCLDFQARRSSIRAKIDKKNTYLHTLNGSGLAIGRTMAAILENGQQTDGSVKIPDALVPYFGSNFLKTA

SEQ ID NO: 185219 - protein, 271 aa, Unknown
  Bacterial polypetide isolated from the Sargasso Sea
MLDIKKVRENPDKVDKLLAKRNHPAVSKDLLSADEKNRSLISELQKIQEERNLKSKLIGEYTTKGNTADADKLKEEVGNLKTKMQNLEEQQRNSQNSLEIMLSEIPNLPDESVPVGDESKNKEIKIEGNKKEFSFNLKEHFDLGENLNVMSFEKAANISGARFVIQKGILARLERAIANFMLDLHTTEFEYEEMNVPILVKDQAVFGTGQLPKFKDDLFKTTNDYWLIPTAEVPLTNMTRETVLDIAELPKRYVAHTPCFRSEAGAAGRDT

SEQ ID NO: 185220 - protein, 330 aa, Unknown
  Bacterial polypetide isolated from the Sargasso Sea
LNNHKKSIETNYRNLALSVPNMIHKSVPIGPDESDNVEVRKWGDLPNFDFDVKGHEEIAEKLNLLDIKRASKIAGARFYFLKGDLVRLAHAVTAFASDFLSEKGYKLIQPPYMINKKSMEGAVIADDMADVIYEIQEDELFLIGTSEHAIASMYSDEIIDGKSLPDRFGSISPCFRREAGEHGKDQKGIFRVHQFEKFEQFVFAKPEDSENEQEKMIGCTEEFYQKLGIPHRVVLLSSGDMGKVAAKTYDVEAWMPGQNAYREICSVSNCLDFQARRLMIRFRDKTNEETQYVHTLNGTLVAIERTLVAIIENFQTSDGHIKVPEVLQKY

SEQ ID NO: 185221 - protein, 116 aa, Unknown
  Bacterial polypetide isolated from the Sargasso Sea
LDALKLPYRKIILSSGDMGFSSEKTYDIEVWIPSENKYREISSCSSCGTFQSRRMKGRFKNINNETKFLGTLNGSGLAVGRTLIAVLENYQNEDGSIRIPDVLRPYMNNLDEITSN

SEQ ID NO: 185222 - protein, 85 aa, Unknown
  Bacterial polypetide isolated from the Sargasso Sea
LPAENKYREISSCSSCGSFQARRMKSRYKNKKNETVFLGTLNGSGLAVGRTLIAILENYQQSDGSIKIPEVLKPYMNNLDKIAKK

SEQ ID NO: 185223 - protein, 78 aa, Unknown
  Bacterial polypetide isolated from the Sargasso Sea
NTYREISSCSNCNDFKARRMNTRYKLENKNIFVHTLNGSGLAVGRTLIAILENYQMKDGNIKIPEVLKKYFNNSDTLI

SEQ ID NO: 185224 - protein, 232 aa, Unknown
  Bacterial polypetide isolated from the Sargasso Sea
KILETDRKKFQTLTEELQSKRKLLSKEYGDLKKIGTTDPDLIKKIESIKNELNICSENLLNIQSSLRNFLLDIPNIPHKSVPNGKNEENNVVIREFGEPKISGGKDHLDITSMIDLETANLLAGSRFSVLNGEIAKLHRSLITYMLDKASEHGYLEHYLPMIANTESLTSTGQLPKFFDDLFQLTDDYYLIPTAEVPLTNIFRDQIIDFADLPLKLSAHTSCFRSEAGSYGK

SEQ ID NO: 185225 - protein, 245 aa, Unknown
  Bacterial polypetide isolated from the Sargasso Sea
MLDTHINEFGYKEISPPLIVNEEVMFGTGQLPKFEDDQFEVKLENSEDRKFLIPTAEVVLTNLVRKSSLSSKDLPLRFVAATPCFRKEAGSYGKDTKGMMRQHQFYKVELVSIVEPKNCMSELDRMLNCAESILKKLELPYQIILLSSGDMGFSAEKTFDIEVWIPSEKKFREISSCSSCGSFQARRMGTKYKGASGSEFVGTLNGSGLAVGRLMIALIENYQNKDGSINIPKNLKKYMNNLDKI

SEQ ID NO: 185226 - protein, 299 aa, Unknown
  Bacterial polypetide isolated from the Sargasso Sea
SSKDDDNLKDQASSLSTLVKQDKEILQTIKHNIDEFLLDIPNLLDDSVPVGEDETSNQIIEEIGNIPEFSFEPKSHSDFIEKTDQGRGVKIAKSRFTVLSGKLAKLHRVIGQFMIDTHVKIHGYEELYVPYIVNKSSLIGTGQLPKFEEDLFKLTETPDLYLAPTAEVPVTNLHRDEKLKLDQLPLKYVCHSPCFRSEAGSYGKDTKGLIRQHQFDKVELVKICHPDKSEVEHKKLIEDASKILELLELPYRKVILSSGDTGFSAAKTVDLEVWFPSQNTYREISSLFNFTDFQSRRAN

SEQ ID NO: 185227 - protein, 258 aa, Unknown
  Bacterial polypetide isolated from the Sargasso Sea
MLDIKKLRDDFDNVKSALKKRGYEIDQKKFQSLDKKRKVLQVDVENLQAEKKKLSSEFGNLKSSGKNTDSLKETIDKKTLELNEKDSELKIILDQIDSFLLRIPNICHDSVPEGQNEDDNVVVSQHGKIDSKNTLDHLEITKKIDVDLAVKLAGARFSVLKGDLAKLQRSLITFMLDNASANGYEEYYLPFMANRNSLVGTGQLPKFEEDLFKTYDKLYLIPTAEVPLTNLFRNEFVQESDLPIKVTSHTPCFRSEAG

SEQ ID NO: 185228 - protein, 234 aa, Unknown
  Bacterial polypetide isolated from the Sargasso Sea
QNKLSKKIGEYFQSGDHASGNQLKKEVEALKPDQKKLEEDLNKIKVDLFENLNNVPNIPHALVRKGKNEEDNEIIYQSDDIDKLSPKAKPHWELASDYNLISFELGNKISGSGFPAYIDKGAKLERSLINFFLDYNIKGGYTEVQPPILINESSGHGTGQLPDKEGQMYKIENENLYLIPTAEVPITNFYRNKTISKNSLPIMLTGYTPCFRREAGSYGSEVRGLNRLHQFDKV

SEQ ID NO: 185229 - protein, 246 aa, Unknown
  Bacterial polypetide isolated from the Sargasso Sea
KHTIDNGYTEISPPLIASESTMYGTGQIPKFIDDQFEIKLDDKSERKFLIPTAEVILTNMVKGKILNKNDLPLRLVASTPCFRKEAGSYGKDTKGMIRQHQFYKVELVSIVEPQNCKSELERMTNCATGILDSLKLPYRKVVLCTGDMGFSAEKTYDIEVWIPSENKYREISSCSSCGSFQARRMKGRYKNDKKETLFLGTLNGSGLAVGRTLIAILENYQLEDGSIKIPNVLRPYMNNLDKISIK

SEQ ID NO: 185230 - protein, 298 aa, Unknown
  Bacterial polypetide isolated from the Sargasso Sea
RNVDVDFDQILNLDEENRKLIQEKEKLEMEKKSISKSKDETLFEKSKEISNKIDDLSKNQKNVKDQLDQILSNIPNLPLNDVPVGKDENSNKEVVKSGKIKEMSFKPKSHYEIGEKLNMLDFDLATKTTGSRFVFVKDKLASLERAISNFMIDTHVNNNGYTEISPPLMATDNTMFGTGQLPKFENDQFEIKFDDKNDRKFLIPTAEVILTNMVKNQILNFKSLPMRLVASTPCFRKEAGSYGKDTKGMIRQHQFYKVELVSIVENNKCIEELERMTNCATKILDDLQLPYRKIILST

SEQ ID NO: 185231 - protein, 214 aa, Unknown
  Bacterial polypetide isolated from the Sargasso Sea
MLDAKLVRTQPQLLAERLATRGFALDLAQLDALESRRKAVQTRTETLQAERNSRSKSIGQAKARGEDIQPLLADVDRMGTELAEGKQELEGIQQELDALLLSMPNLPAESVPVGKDEDENVEVRRWGTPRSFDFEVKDHVALGEQHGYLDFETAAKLSGARFALMRGPIARLHRALAQFMLDLHVNEHGYEEAYTPYLVQAEALQGTGQLPKFE

SEQ ID NO: 185232 - protein, 278 aa, Unknown
  Bacterial polypetide isolated from the Sargasso Sea
IDFEAGVKVSGSRFFILRDQGAKLERALINWMLDTHTNQNKFEEIQVPALVKQETMTGSGNLPKFEENLYRDTDDDLWLIPTAEVPLTSIHHDDILNGNELPKYYVSYAPSFRKEKTSAGRDTRGIKRVHQFNKVELYKIVTPETSKSELHSLISIVESLLQELGLHYRLLELCSSDIGFQSAQSFDLEVWAPGSKEWLEVSSCSNCLDFQSRRANIKFKREQSSRTEYPHTLNGSALALPRIMISILETFQQIDGTVVIPEVLHKYTGFTEIKPNNL

SEQ ID NO: 185233 - protein, 78 aa, Unknown
  Bacterial polypetide isolated from the Sargasso Sea
FTKVELVSIVEPQFSEDELERMLVCAESILKDLNIHYRVMTLCTGDMGFSANKTYDIEVWLPGENTYREISSCSNCGD

SEQ ID NO: 185234 - protein, 171 aa, Unknown
  Bacterial polypetide isolated from the Sargasso Sea
CFRSEAGSAGKDTTGMIRQHQFEKVEMVTYCKPEFENLELERMTECAERILKNLLIPFRRILLCSGDIGFASKKTYDLEVWLPGQNRFREISSCSICGDFQSRRINIRYKNKKESKPEFVSTLNGSGLAVGRCLIAIIENNQLKDGSVIIPEVLRPYMFNYQKIDNKGNLN

SEQ ID NO: 185235 - protein, 312 aa, Unknown
  Bacterial polypetide isolated from the Sargasso Sea
IILLKNSWERNIKINIKKILDLDKKNRELIQNKEKLEQEKKVISQKKDKSQFNKSKELSIEIEEINKKHKVVKDEIYTILSSLPNIALDDVPIGKDEKANKEINKFGEIKKFDFKPLSHYEIGKKMNMLDFDIATKTSGARFVFIKSKLAVLERAISNFMLDVHTKEFGYTEISPPLIVSDTTMFGTGQLPKFENDQFEIKFDDSDSRKFLIPTAEVVLTNIVRDSFVNKQDLPLRFVASTACFRKEAGSYGKDTKGMIRQHQFYKVELVSIVEPKKNIEELKRMTSCAEEILKRLKLPYRTILLSSGDMGF

SEQ ID NO: 185236 - protein, 79 aa, Unknown
  Bacterial polypetide isolated from the Sargasso Sea
YREISSCSSCSTFQSVRMKTRYKDQSKETRYTGTLNGSGLAIGRTLIAILENYQKKDGSITIPKVLRPYMNNLEKISLN

SEQ ID NO: 185237 - protein, 192 aa, Unknown
  Bacterial polypetide isolated from the Sargasso Sea
PVTNILRDKIVEADELPVKYVSHTPCFRSEAGSYGRDTKGMIRQHQFEKVELVMVVRPEDSQDAHEELTSHAEQILKKLNLPYRVVNLCGKDLGFASAKTYDIEVWLPGQSAYREISSCSNFLDFQARRISGRWRQTSSSKPELFHTLNGSGLAVGRTLVAILENYQNVDGSLSIPEALHPYMDGEEKISLG

SEQ ID NO: 185238 - protein, 308 aa, Unknown
  Bacterial polypetide isolated from the Sargasso Sea
MYKKKRVLDQKLIRENPTTVEENLSLRGKIYKISHIHELTVKKKEIAIEISSLQSESKKLSKLIGQVIRKSQDTNSQELNDLKKKGNEYRVKISELEEKQRILDKKVDDEIYNLPNFPSKEAPVGKDETDNVQIKTWGDPLIKENIKSHWEIGESLNIFESVKSIKISKSRFITLIGNGARLERALINFMLDMHSKNGYLELMPPALVNSESLTGSGQLPKFSNESFKCSNDDLWLSPTAEVPLTAFHKNEIIDSKQLPLKYVAYSPCFRREAGSYGRDTKGLIRLHQFNKVELYWFCDPSKSSEAHK

SEQ ID NO: 185239 - protein, 97 aa, Unknown
  Bacterial polypetide isolated from the Sargasso Sea
FSAQKTYDIEVWVPSEKKYREISSCSTCGTFQARRMKAKYKNSKNEKNFIGTLNGSGLAIGRTMIAILENYQDKDGSIIIPDVLKPYMDNINKITSN

SEQ ID NO: 185240 - protein, 201 aa, Unknown
  Bacterial polypetide isolated from the Sargasso Sea
GYAKLHRALKQFMLDVQTEENGYTEMYVPNIVRSDCLEGTGQLPKFADDQYKIENDEALYLIPTAEVPLTNLIRESILDQSELPIKMTAHTPCFRQEAGSYGKDTKGMIRQHQFEKVELVHIVKPEESYEALEELTKNAESILQKLNLPYRVMLLCSGDTGFSAAKTYDLEVWLPSQNTFREISSCSNCESFQSRRMKARY

SEQ ID NO: 185241 - protein, 251 aa, Unknown
  Bacterial polypetide isolated from the Sargasso Sea
GAKLQRALINFFLQEASEAGYKEYLSPILVNEDSALATGQLPDKEGQMYHASDDDFYLIPTGEVPLTNIYRNVILPDENFSIKITGHTPCFRREAGSYGKDVRGLNRLHQFDKVEIVRIEHPNNTENALNEMVDHIKNLLEKLKLPYRILRLCGGDMGFTSAMTYDFEVYSAAQEKWLEVSSVSRFDTYQSNRLKLRYKGNDKKNHLCHTLNGSALALPRILASILENNQKDNKIIVPEVLHEFCGFSEIS

SEQ ID NO: 185242 - protein, 265 aa, Unknown
  Bacterial polypetide isolated from the Sargasso Sea
HSLHGEKGELTFEPRNHNELIEMNGWVDQARGAKVAGSRFYFLQGDLARMEMALQQYGADFLMERGYTLVQPPLMMNREAYEGVTDLSDFETVMYGIEPDKYYLIATSEHPLTAMRMDEVIEPSELPIKMVGVSPCFRREVGAHGLSDRGIWRVHQFTKVEQIVICDPEDSWGHHEDLLTNAVDMWDSLGLHYRVVNICTGDMGTVAARKYDLEAWLPGAGAYKEVVSCSNCTDYQANRLRMRYRTPQGNSAVHTLNSTAIATSR

SEQ ID NO: 185243 - protein, 105 aa, Unknown
  Bacterial polypetide isolated from the Sargasso Sea
ILSTGDMGFSAEKTYDLEVWLPSENTYREISSCSSCGSFQSTRMMTRYKNDKNETIYPGTLNGSGLAIGRTLIAIMENYQNEDGSINIPDVLKPYMNNLEKIDIN

SEQ ID NO: 185244 - protein, 82 aa, Unknown
  Bacterial polypetide isolated from the Sargasso Sea
ENKYREISSCSSCGTFQAKRMMARYKNNENKTEYVGTLNGSGLAVGRTLIAILENYQTEEGSVIIPEVLRSYMGNLDKITLN

SEQ ID NO: 185245 - protein, 253 aa, Unknown
  Bacterial polypetide isolated from the Sargasso Sea
TWCQLERALINFMLDEHSKSNYMEIFPPFICNKQSFVGTGNLPKFEEDLFKISGTENYLIPTAEVPLTNIHSNQIINASDFPIKYVAYSACFRSEAGSYGKDVKGLIRQHQFNKIELVKITDEFSSSDELEKLTEDACSILDKLELPYRVVALSSGDMSFSSAKTYDIEVWIPSENKYREISSCSNFGSFQSRRSNIKYKVGNKFSFAHTLNGSGLAVGRTFVSILENFQNSDGTITIPKVLRPYLNNLHTIS

SEQ ID NO: 185246 - protein, 238 aa, Unknown
  Bacterial polypetide isolated from the Sargasso Sea
LHRALAQFMLDLHTEQHGYTELYVPYLVNATSLYGTGQLPKFGADLFHTKPATEEGVGMSLIPTAEVPVTNLARDCIFELSELPQKYTAHTPCFRSEAGSYGRDTRGLIRQHQFDKVELVQLVHPEQSFAALEELTGHAEKVLQLLGLPYRTMLLCTGDMGFGSTKTYDLEVWLPAQNTYREISSCSNMGDFQARRMQARFRPGEGKKPELLHTLNGSGLAVGRTLVAILENYQQADG

SEQ ID NO: 185247 - protein, 209 aa, Unknown
  Bacterial polypetide isolated from the Sargasso Sea
IKLEEGTDRKFLIPTAEVILTNIVKDKIFDLKSLPMRFVASTPCFRKEAGSYGKDTKGMIRQHQFYKVEMVSIVEQEKCMEELERMTDCATGILDLLELPYRKMILCSGDMGFSAEKTYDIEVWLPSENKYREISSCSSCSTFQSVRMKARYKNQKKEILYPGTLNGSGLAVGRTLIAILENYQQKDGSITIPKVLKPYMNNLEKISLN

SEQ ID NO: 185248 - protein, 132 aa, Unknown
  Bacterial polypetide isolated from the Sargasso Sea
EPNKCTEELKRMITCAEEILKKLKLPYRSVLLCTGDMGFSAEKTVDLEVWIPSENKYREISSCSSCGQFQSRRMKGKYKDSKNKSDFLGTLNGSGLAVGRTLIAVMENYQNSDGSITIPDALRPYMGNLEKI

SEQ ID NO: 185249 - protein, 285 aa, Unknown
  Bacterial polypetide isolated from the Sargasso Sea
EKLNMLDFELATKTTGSRFVFVKDKLASLERALSNFMIDTHVNDNGYKEISPPLFATKETMFGTGQLPKFENDQFEIKLDDNGERKFLIPTAEVILTNMVKKQTLQKSELPLRLVASTPCFRKEAGSYGKDTKGMIRQHQFYKVELVSIVDNNDCEKELQRMTKCASLILEKLKLPYRKVLLSTGDMGFSAEKTYDIEVYLPSEKKYREISSCSSCGTFQAQRMNAKFKNEKNETLFLGTLNGSGLAVGRTLIAIMENYQTSDGSIIIPDVLKPYMNNLDKISLN

SEQ ID NO: 185250 - protein, 315 aa, Unknown
  Bacterial polypetide isolated from the Sargasso Sea
SKSKEVGILKSKGESADNIFSDLKILSDKIKELEKEQRELSLSLKDALQEIPNVPHSSCPKGFSDKDNVVIKEKKTNKDFNFSPKNHIEIGKQLDILDFEVAAKMSGSGFPLYKGKGALLERALINFMIDYHLKNFNYTEIFTPFLVKPDSALTTGQLPKFSEDMYHIEKDDLYLIPTAEVSLTNIHKDDILSKDDLPKYYLGYSACFRREAGSYGKDTRGLLRVHQFNKVELVKFVEPEKSYAELDSLVKQASDILDLLELQYRVIELCTGDLSFAAAKCFDLEVWAPGEEKWLEVSSCSNFEDFQSRRGNIRF

SEQ ID NO: 185251 - protein, 142 aa, Unknown
  Bacterial polypetide isolated from the Sargasso Sea
YKVELVSIVEPKKCVEEFDRMLNCAQEVLKELKLPYRIILLSTGDMGFSAEKTYDLEVWIPSENKYREISSCSSCGQFQARRMQAKFKDEKNETDFIGTLNGSGLAIGRTLIAIMENYQQKDGSIKIPEVLRSYMNDEEYIK

SEQ ID NO: 185252 - protein, 154 aa, Unknown
  Bacterial polypetide isolated from the Sargasso Sea
MKKENLKSHLEIGESLNLFDSLKTTKISKSRFVTLIGNGARLERALINFMLDIHSENGYLELMPPALINSQSLQGSGQLPKFSNESFNCSNDDLWLSPTAEVPLTAFHRDEIIDSKLLPIKYVAYSPCFRREAGSYGRDTKGLIRLHQFNKVEL

SEQ ID NO: 185253 - protein, 195 aa, Unknown
  Bacterial polypetide isolated from the Sargasso Sea
MLDIQLLRKDLDGVAKRLADRGYTLDVAAFTALEAERRDTQTRTEEMQARRNTLSKQIGGMKGRGEDTSALMAEVGGIGDEMKASAARLDDIQKRLSDLLLGVPNLAHESVPVGTDEAGNVEVRRWGTPRQFDFEVKDHVDIGTPLGLDFETGAKLSGARFTLLRGQIARLHRALAQFMIDTHTLHHGYTEVYTP

SEQ ID NO: 185254 - protein, 187 aa, Unknown
  Bacterial polypetide isolated from the Sargasso Sea
TAYHRNELIDPKQLPIKYVAYSPCFRREAGSYGRDTKGLIRLHQFNKVELYWFCDPSKSLEAHKKITSDAESILKKLNLPYRLVDICTGDLGFSSSRTFDLEVWLPSSKCYREISSCSNCLDFQARRSSIRSKIDKKNTYIHTLNGSGLAIGRTMAAILENGQQTDGSVKIPDALIPYFGSNFLKTA

SEQ ID NO: 185255 - protein, 294 aa, Unknown
  Bacterial polypetide isolated from the Sargasso Sea
KKLSKLIGLEISKSQNKNSQELDELKSKGNKYRIEISDLEEKKRILENQIHKEISSLPNFPSKEAPLGKDESNNVQIKSWGDPLKKENLKSHWEIGESLNLFDSAKTTKISKSRFITLTGNGARLERALINFMLDVHVQNGYLELMPPALVNSESLQGSGQLPKFSNESFKCSNDDLWLSPTAEVPLTAFHKSEIIDSKLLPIKYVAYSPCFRREAGSYGRDTKGLIRLHQFNKVELYWFSDPNKSPEAHKNITADAESILKKLNLPYRLIDICTGDLGFSSSRTFDLEVWLPK

SEQ ID NO: 185256 - protein, 193 aa, Unknown
  Bacterial polypetide isolated from the Sargasso Sea
EVILTNIVKDKIVDQSHLPMRLVASTPCFRKEAGSYGKDTKGMIRQHQFYKVELVSIVEKENCLEELERMTNCATDILDKLELPYRKVILCSGDMGFSAEKTYDIEVWLPSENKYREISSCSSCSTFQSQRMKTRYKNKNKETVFVGTLNGSGLAVGRTLIAVLENYQQKDGSIVVPKVLREYMNNLELISQK

SEQ ID NO: 185257 - protein, 207 aa, Unknown
  Bacterial polypetide isolated from the Sargasso Sea
NGWWLIPTSEVTLTNICANEITPEVNLPLRMTAHTQCFRSEAGSAGKDTAGMLRQHQFEKVEMVSITHPDQSMHEHERMTNCAKAILEKLELPYRVVLLCSGDTGFGAQKTHDLEVWLPGQQAYREISSVSVCGDFQARRMNARYKPSNGGKPEFVHTLNGSGLAVGRCLIAVLENGQQEDGSVLIPQVLHNYMGGNVVIDNQGNLC

SEQ ID NO: 185258 - protein, 280 aa, Unknown
  Bacterial polypetide isolated from the Sargasso Sea
NRKTLSSSFSNLNDIDKIELQKKVQLIKNQIDELEKDIFNIDEQLKNTLSGLPNLPHSDVPVGEDENTNKLIKQVGIIPSFKFSPKSHYELGENLEMIDFEQAGKVSGTRFVYLKKNIARLERAIANFMLDKHTNEFGYTEINPPNLVRDAAAFGTGQLPKFSEDLFKTNTDHWLIPTAEVPLTNLVLDTIVSEKDLPLRYTAWTPCYRSEAGAAGRDTRGMIRQHQFSKVELVSITNEDESEIELDRMLNCASSILDDLEIPYQVILLSSGDMGFSAEK

SEQ ID NO: 185259 - protein, 279 aa, Unknown
  Bacterial polypetide isolated from the Sargasso Sea
FSFTPKDHVELGENLKLFDFEAGSRVAGHGFYFLTNDGVLLELALQKYAVDLLMQEGFTVMTTPDVARDSILEGTGFMPRGPETQIYSISNSDLSLVATAEITLGGAMHEKIFNINELPLKLCGISHCFRTEAGAHGRATRGLYRVHQFTKVEMFAFTSPDQSDAMHQQLLDLECKIFDGLGIPYRVVDTATGDLGGPAYRKYDLEAWMPGRGETGDWGEVTSTSNCTDYQARRLGIRFRNPSEKGTQFVHTLNGTAVAISRAIVAILENYQQPDGSVK

SEQ ID NO: 185260 - protein, 181 aa, Unknown
  Bacterial polypetide isolated from the Sargasso Sea
IVDEDELPIKLTAHTACFRSEAGSYGKDTRGLIRQHQFDKVELVQLVKPEDSMAALEALTGHAETVLQRLGLPYRTVILCTGDMGFGSSKTYDIEVWLPGQNTYREISSCSNMKDFQARRMQARYRVKADNKPALLHTLNGSGLAVGRTLVAILENYQNADGSVTIPEALRPYMGGMTQIG

SEQ ID NO: 185261 - protein, 153 aa, Unknown
  Bacterial polypetide isolated from the Sargasso Sea
KDTRGMLRQHQFTKVELVSVTTPDQSENELERMLNSAESILRDLEIHYRIVTLCTGDMGFAAKKTYDIEVWLPGENAYREISSCSNCGDFQSRRMNTKIKKDNKNIYAHTLNGSGLAVGRTLIAILENYQTQDGNVLIPECLQKYFDNKKTLI

SEQ ID NO: 185262 - protein, 59 aa, Unknown
  Bacterial polypetide isolated from the Sargasso Sea
NSKYKTIDGKNEYLSTLNGSGLAVGRTIVAILENYQNSDGSITVPKVLVPYMNGCTKIN

SEQ ID NO: 185263 - protein, 195 aa, Unknown
  Bacterial polypetide isolated from the Sargasso Sea
IPTAEVPLTNMTRESVVDAAELPKRYVSHTPCFRSEAGAAGKDTRGIMRQHQFYKVELVSLASEENSADEHERMLSCAEEVLKRLGLHYRVVILSTQDMGFSAQKTYDIEVWLPGQNSYREISSCSNCGDFQARRMNSRYKENDTIKYIHTLNGSGLAVGRTLIAVMENYQNEDGSIDVPEVLIPYMSGITKISN

SEQ ID NO: 185264 - protein, 80 aa, Unknown
  Bacterial polypetide isolated from the Sargasso Sea
QNKYREISSCSNFTDFQARRANIKYKTKNGNHFVHTINGSGLAVGRCLIALIENNYDGTDIIKIPSCLEKYFGSDQIKIN

SEQ ID NO: 185265 - protein, 241 aa, Unknown
  Bacterial polypetide isolated from the Sargasso Sea
MHSLKEIRKNTELFKKKIKDRNTNVDFKSLINHDKENRELIQKKEKLEQEKKLLSKKKDPQNFTKSKNLTNQIKKLEDNQKNLQEKINIIISSIPNLPLSDVPIGNDEKANKIIKKSGEIKKFDFKIKSHTELGNKYMDFDTATKLSGSRFVVLKDKLAFLERALINFMIDVHVKKFGYTEISPPLIVNETTMFGTGQLPKFEKDQYELISEKNEGRKFLIPTAEVPLSNLFKDSIVDAKK

SEQ ID NO: 185266 - protein, 199 aa, Unknown
  Bacterial polypetide isolated from the Sargasso Sea
FLIPTAEVILTNIVKDKIINQKDLPMRFVASTPCFRKEAGSYGKDTKGMIRQHQFYKVELVSIVEQENCLEELERMTNCATNILDLLELPYRKVILCSGDMGFSAEKTYDLEVWLPSENRYREISSCSSCSTFQASRMKARYKTQSKDTKHLGTLNGSGLAIGRTLIAILENYQQKDGSILIPKVLRSYMNNLEKISSK

SEQ ID NO: 185267 - protein, 291 aa, Unknown
  Bacterial polypetide isolated from the Sargasso Sea
RNERSKAIGQAKAAGKDIEPLKAEVENLGSMLSASESRLRDLQIELDRFLSEVPNLLHESVPSGLDEGSNEVIRSWGDPRDFSFKPKDHVVLGEGLGLIDFDAARKISGSRFVVLRGVLARLHRALTQLMLDIHIDDHSYIENYVPYLVNDDSLFGTGQLPKFSDDLFSLSGEKALRLIPTAEVPLSNLVRDCILEPRDIPMRLVAHTPCFRSEAGSYGRDTRGMIRQHQFEKVELVHITSSEDSYRSLEELLSHAEVILQRLELPYRVMSLCAGDTGFSSAKTYDIEVWL

SEQ ID NO: 185268 - protein, 124 aa, Unknown
  Bacterial polypetide isolated from the Sargasso Sea
EVLKQLGLPFRRVLLSTGDMGFSAMKTYDIEVWLPGQNNGEGQYREISSCSTCGDFQAMRMKSRYKSKNKKGTNFVHTLNGSGVAVGRALVAILENYQESDGSVRVPDVLIPYMNGLKLISSSS

SEQ ID NO: 185269 - protein, 269 aa, Unknown
  Bacterial polypetide isolated from the Sargasso Sea
MATKTTGARFVFVNDKLALLERAIANFMLDTHTQINSYKEISPPLIANDAAMFGTGQLPKFEDDQFEIKIEEKSGRKFLIPTAEVILTNIVRDKIINIKDFPMRFVALTPCFRKEAGSYGKDTKGMIRQHQFYKVELVSIVENNKCIEELERMTACATMILDKLKLPYRKIVLSTGDMGFSAEKTYDIEVWLPSEKKYREISSCSSCGTFQARRMKARYKNKNNETEFVGTLNGSGLAVGRTLIAILENYQNSDGSITIPDVLKPYMNN

SEQ ID NO: 185270 - protein, 97 aa, Unknown
  Bacterial polypetide isolated from the Sargasso Sea
YGFSAQKTYDLEVWMPGQQTYREISSISNCGDFQARRMKARYRDGNKNTKYLHTLNGSGVAVGRALIAILENYQTPDGIQVPDVLKKYMNNLSTIKI

SEQ ID NO: 185271 - protein, 89 aa, Unknown
  Bacterial polypetide isolated from the Sargasso Sea
MKFGYQSENRYREISSCSSCSTFQSKRMKTRYKNDKKEIVYAGTLNGSGLAVGRTLIAILENYQQSDGSINIPEVLKPYMNKVEKIIKN

SEQ ID NO: 185272 - protein, 151 aa, Unknown
  Bacterial polypetide isolated from the Sargasso Sea
MLDPKCLRSDIEQTAKRLAARGFNLDVAAFSSLEEKRKTLQSRTQDLQNERNVRSKSIGKAKAQGEDIAPLLAEVGKLGDELDAAKTELSELLEEINTFTQGIPNLPHESVPEGKDENDNVEISRWGEPRTFDFEVKDHVDLAEGLNNGLD

SEQ ID NO: 185273 - protein, 236 aa, Unknown
  Bacterial polypetide isolated from the Sargasso Sea
ISPPLIASENTMFGTGQLPKFENDQFEIKFEEGTDRKFLIPTAEVILTNIVKNKILDLKDLPMRFVASTPCFRKEAGSYGKDTKGMIRQHQFYKVEMVSIVEKDKCLNELERMTNCATSILDDLCLPYRKMILCTGDMGFSAEKTFDIEVWIPSENKYREISSCSSCSTFQAIRMKARYKNNNREIINVGTLNGSGLAIGRTLIAILENYQQKDGSIIIPEKLRSYMNNLEKISLN

SEQ ID NO: 185274 - protein, 296 aa, Unknown
  Bacterial polypetide isolated from the Sargasso Sea
MHNINYIRENPTEFDNFMKTRGENPIANKIIEIDKVKRETQTILQNLLAERNQISKSIGQLKSQKKDATHEMEKVEDIKNKVNTLKELEALKDDELKSILSRLPNIPDSSTPVGANETENIFYKDWGDKPTFDFNPKLHFEIGENANSMNFETATKLSGSRFVILKGQLSKLERAIANFMIDKHTLVNGYVEMHVPYLVKEETLYGTGQLPKFVDDLFTAGDNHWLIPTAEIPLTALHSNEILNIDQLPMRFTSYTPCFRSEAGAAGKDTRGMIRQHQFTKVELVSLVEPQQSKEN

SEQ ID NO: 185275 - protein, 143 aa, Unknown
  Bacterial polypetide isolated from the Sargasso Sea
FNKVEMVKFVKPESSYDELEKLTNQAESILQKLGLHYRVIELCTGDLSFSAAKCYDLEVWAPGEKKWLEVSSCSNFEDFQARRGNIRYRKSSDKKVNYIHTLNGSGLATPRLMVALLETYQSSEGKILLPEVLHQQMGMEVID

SEQ ID NO: 185276 - protein, 245 aa, Unknown
  Bacterial polypetide isolated from the Sargasso Sea
MLDIHTKQFGYLEVSPPLIATEESMFGTGQLPKFENDQFEIKLEGNQKKYLIPTAEVILTNMVKDNSIKVKDLPLRLVASTACFRKEAGSYGKDTKGMLRQHQFYKVELVSIVDPKKCFEELERMKSCAEEILKKLKLPYRTVLLSTGDMGFSAEKTIDLEVWVPSENKYREISSCSSCGQFQSRRMKAKYKDEKNKSDFLGTLNGSGLAVGRTLIAIMENYQNSDGSVTIPDSLRPYMNNLEKI

SEQ ID NO: 185277 - protein, 195 aa, Unknown
  Bacterial polypetide isolated from the Sargasso Sea
EVILTNIVKNQIIKANELPLRLVASTPCFRKEAGSYGKDTKGMIRQHQFYKVELVSIVENSNCLNELERMTNCATMILDKLKLPYRKVILCTGDMGFSAEKTYDIEVWLPSEKKYREISSCSSCGTFQARRMNSRYKNSKNENLFVGTLNGSGLAVGRTLIAIMENYQQEDGSIIIPDALRPYMNNLDKILAISS

SEQ ID NO: 185278 - protein, 224 aa, Unknown
  Bacterial polypetide isolated from the Sargasso Sea
MFGTGQLPKFESDQFEIKIDDNNRKFLIPTAEVILTNMAREKTLDIKELPLRYVASTPCFRKEAGSYGKDTKGMIRQHQFYKVELVSLVEPQKCEEELERMTKCASGILDKLKLPYRIVELCTGDMGFSAQKTYDIEVWVPSEKKYREISSCSTCGTFQARRMKAKYKNSKNEKNFIGTLNGSGLAIGRTMIAILENYQDKDGSIIIPEVLKPYMDNIDKITSN

SEQ ID NO: 185279 - protein, 239 aa, Unknown
  Bacterial polypetide isolated from the Sargasso Sea
QIKIKNELDDILKTLPNVALSDVPIGKDETSNVEILKSGEIKNFKFKPKTHYEIGENLKMLDFELATKTTGSRFVFVKDKLAQLERAISNFMIDTHTKFNGYKEISPPLMASDHSMYGTGQLPKFENDQFEIKLDDSNDRKFLIPTAEVILTNMVKDQIINYKDLPIRLVASTPCFRKEAGSYGKDTRGMIRQHQFYKVELVSIVDPKDCISELERMTNCATKLLDLLKLPYRKIILST

SEQ ID NO: 185280 - protein, 262 aa, Unknown
  Bacterial polypetide isolated from the Sargasso Sea
LPLNDVPVGVDENFNKEILKSGLIKKFSFEPKSHYELGEKLNMLDFDLAAKTTGSRFVFVKDKLAQLERAIANFMLDTHTQINGYKEISPPLIASDLSMFGTGQLPKFENDQFEIKIDEKNNRKFLIPTAEVILTNMVRDQIFNINDFPMRLVALTPCFRKEAGSYGKDTKGMIRQHQFYKVELVSIVQNNNCTEELERMTNCATMILDKLELPYRKIVLSTGDMGFSAEKTYDIEVWLPSDNKYREISSCSSCGYFSSKKK

SEQ ID NO: 185281 - protein, 147 aa, Unknown
  Bacterial polypetide isolated from the Sargasso Sea
QHQFEKVEIVKFADPKKSDKCLDELVSHASQILDKLELSYRHVVLCTGDLGFSAAKTIDIEVWLPSQNCFREISSCSNFRDFQARRINAKVKDGKDKFYPHTLNGSALAVGRTLLAIIENFYENGLGVHIPKVLADYLDFDLIEEQK

SEQ ID NO: 185282 - protein, 241 aa, Unknown
  Bacterial polypetide isolated from the Sargasso Sea
MIDAALENGYTEVSPPNIVRSNAMTGSGQLPKFSEDAFQTKDDYWLIPTAEVSLVNMVSGKILKEEQLPLRFAAYTPCFRREAGSAGKDTRGMIRQHQFKKVELVSITDDQSSAQEHERMTGIACSVLEKLKLPYRKMLLCSGDMGFCAQKTYDLEVWLPSENRYREISSCSNCGDFQARRMKARYKKDKKNLFVHSLNGSSLAVGRTIVAILENYQNEDGSIVIPEVLRTYMSGQELISR

SEQ ID NO: 185283 - protein, 72 aa, Unknown
  Bacterial polypetide isolated from the Sargasso Sea
NFEDFQSRRSQIRYKPAQDSKPEFVHTINGSGLAVGRTLVAILENYQNQDGSVSIPEALIPYMGQIKEIAAQ

SEQ ID NO: 185284 - protein, 227 aa, Unknown
  Bacterial polypetide isolated from the Sargasso Sea
MFDIKWIRDNPKAFDEGLARRSLPARAQELIILDTTRREAQTRAQEIQTKRNALSKEIGAAKSRGEDASNIIAKVSESKAAQADAEHMASEAMLALETELASIPNLPFDDVPVGNSEDDNLELRRWGIPREFDFHIRDHVELGEALGMMNFERAAKLSGSRFVVLTGALAQLERALANFMLNLHTRENGYTEINPPALVNDATMFGTGQLPKFGEDLFRTEEGLWMI

SEQ ID NO: 185285 - protein, 277 aa, Unknown
  Bacterial polypetide isolated from the Sargasso Sea
ILPQKPLGSRFVFVKNKLALLERAISNFMLDIHTSKNGYEEISPPLLASENTMFGTGQLPKFESDQFEVKLEEGSGRKFLIPTAEVILTNIVKDKILDLKTLPMRFVASTPCFRKEAGSYGKDTKGMIRQHQFYKVELVSIVEQNKCLEELERMTNCATGILDLLELPYRKMILCSGDMGFSAEKTYDIEVWLPSENKYREISSCSSCSTFQATRMKARYKNSNKETVFVGTLNGSGLAVGRTLIAILENFQQKDGSISIPKVLRPYMNNLEKISLN

SEQ ID NO: 185286 - protein, 88 aa, Unknown
  Bacterial polypetide isolated from the Sargasso Sea
EVWLPSQNMYREISSCSNFTDFQARRAKIRCKKRTGGKPEFVHTLNGSGLAVGRLFVAILENYQNADGTVTVPKTLRPYLKGCQILSK

SEQ ID NO: 185287 - protein, 289 aa, Unknown
  Bacterial polypetide isolated from the Sargasso Sea
MHNLKEIRKDFSKFETDLEKRSVKIDINNLKKLDELNRDLIQKKENLEKEKKDISKSKDESLFKKSKEISIELEKISEQQKNTKIELENILSSIPNIPHQDVPNGIDENDNVEVSKSGKVPEFDFKPKSHYELGENLDMLDFNLATKTTGSRFVFVKKELALLERALSNFMLDTHIIKNGYQEISPPLIASDNTMYGTGQLPKFENDQFEIKFDQESDRKFLIPTAEVILTNIVKDKIVDQKELPMRFVASTPCFRKEAGSYGKDTKGMIRQHQFYKVELVSIVEKRKL

SEQ ID NO: 185288 - protein, 171 aa, Unknown
  Bacterial polypetide isolated from the Sargasso Sea
STPCFRKEAGSYGKDTKGMIRQHQFYKVELVSIVENDKCLDELERMTKSATTILDKLNLPYRKIILCTGDMGFSAEKTYDIEVWLPSEKKYREISSCSSCGTFQARRMNSKYKNLENENVFTGTLNGSGLAVGRTLIAIMENYQDEDGSIIIPKALRPYMNNMTKISSIIG

SEQ ID NO: 185289 - protein, 147 aa, Unknown
  Bacterial polypetide isolated from the Sargasso Sea
MIRQHQFYKVELVSVVEPKNCISELDRMLNCVKKILEKLEIPYQVILLSSGDMGFSAEKTYDIEAWIPSENKYREISSCSSCGSFQARRMGARYKTQNGNEFVGTLNGSGLAVGRLMIAILENNQNEDGSVKIPDALKKYMNNLDKI

SEQ ID NO: 185290 - protein, 219 aa, Unknown
  Bacterial polypetide isolated from the Sargasso Sea
NFENDQFEIKLDKGDERKFLIPTAEVILTNIVKNQIIMLNDLPLRLVASTPCFRKEAGSYGKDTRGMIRQHQFYKVELVSIVENTKCLDELERMTNCATMILDKLNLPYRKIVLCTGDMGFSAEKTYDIEVWLPSESKYREISSCSSCGTFQSRRMNSRYKNSKNENVFTGTLNGSGLAVGRTLIAIMENYQLEDGSIIIPEVLRPYMNNMDKISSISS

SEQ ID NO: 185291 - protein, 171 aa, Unknown
  Bacterial polypetide isolated from the Sargasso Sea
PVLTTAYTPCFRREAGSYGAHVRGLNRLHQFDKVEIVRVEHPDKSYEALDGMVEHVKDILRDLKLPYRVLRLCGGDMGFTSALTYDFEVFSTAQDRWLEISSVSNFETFQANRLKLRFKDKDGKNQLAHTLNGSALALPRVLAGILENYQTPEGIVIPEVLRPYCGFDIID

SEQ ID NO: 185292 - protein, 274 aa, Unknown
  Bacterial polypetide isolated from the Sargasso Sea
LRRWGSPRQEEGLEEHWQIAERLHLFDTERSVRIAQSRFVTLMGQGARLERALINFMLDLHTSKGYREVMPPVLVNSASLTGSGQLPKFADDCFRCSEDDLWLTPTAEVPVTSLHRDEIIPADQLPLRYAAYSPCFRREAGSYGRDTRGLIRLHQFNKVELYWFAHPDHSAEAHAQITADAEAVLQALELPYRVLDLCTADIGFSAQRTYDLEVWLPGAAAYREISSCSVCGDFQARRSAIRTKEGKSTKLVHTLNGKGLAVGRTMAAVLKPAS

SEQ ID NO: 185293 - protein, 88 aa, Unknown
  Bacterial polypetide isolated from the Sargasso Sea
DLEVWIPSENRYREISSCSSCGQFQARRMKARFKNNKNETVFLATLNGSGLAIGRTLIAIMENYQQKDGSIIIPEALMPYMDNQKRIG

SEQ ID NO: 185294 - protein, 174 aa, Unknown
  Bacterial polypetide isolated from the Sargasso Sea
SDLTLSYVSHTPCFRSEAGSYGLDTKGIIRQHQFEKVELVKISHPDDSDEELEKLTSDAEKILDLLELPFRKIKLCAGDIGFGAALTYDLEVWMPSQSSYREISSCSNYRDFQSRRLKIRTKENEKTILCHTLNGSGLAIGRTIAAIFENFQNKDGTISIPNILRPYMGNKEIL

SEQ ID NO: 185295 - protein, 243 aa, Unknown
  Bacterial polypetide isolated from the Sargasso Sea
GDEKIRKTSKIVADKKTEVADMNAKAKALDQQLNLALMSLPNILDPDIPDGEDEDQNVEIFSWGEPREINSPKEHFEISAVIPGMDFETAAKLSGSRFVVLRGAIARLHRALAQFMLDVHINEHGLTETMTPVLVREEAMFGTNQLPKFSDDSYQTTNGWWLIPTSEVTLTNICANEVTPEEILPLRMTAHTQCFRSEAGSAGKDTAGMLRQHQFEKVEMVSVTHPDQSMKEHERMTNLRKSN

SEQ ID NO: 185296 - protein, 69 aa, Unknown
  Bacterial polypetide isolated from the Sargasso Sea
GNFQARRMRARYKNQDKETLFIGTLNGSGLAVGRTLIAILENYQQSDGSIIVPEVLRPYMNNLAKIDKN

SEQ ID NO: 185297 - protein, 245 aa, Unknown
  Bacterial polypetide isolated from the Sargasso Sea
ELSKDLSLIDLDRGAKISGSGFPVYTGQGAKLERSLINSMIDHHTDQYGFTEIFPSVLILEESMRTTGQLPKFKEDMYLSELDNLYLAPTAEVPITNMHRHEIIPESELPINYVAYSPCFRRESGSYGKDTRGLLRLHQFNKVEMVKFVKPEESYDALEDLVLQAESILKILGITYRVVELCTSDLSFSAAKCYDIEIWSPGEKKWLEVSSCSNFEDFQARRGKIRFRGEIDKKVNLLHTLNGSG

SEQ ID NO: 185298 - protein, 292 aa, Unknown
  Bacterial polypetide isolated from the Sargasso Sea
MLDIKKIRNNTDDVLKALSKKDNDISLNDILNLDSKLKSLTTKLNELQAEQNSKSKEVGQLKSKGESSDNIFKDLKVLSEKIKAFEKEQKELSSALKKALLEIPNIPHSSCPEGVSEKDNIVVSENKNTRDFNFPLKDHIELGEKLDILDFEVAAKMSGSGFPLYKGNGALLERALINFMTDYHLKNFDYTEFFTPFLVKPESALTTGQLPKFSEDMYHIEKDDLYLIPTAEVSLTNIHKDDILSSNELPKYYLGYSACFRREAGSYGKDTRGLLRVHQFNKVELVKFVEPT

SEQ ID NO: 185299 - protein, 112 aa, Unknown
  Bacterial polypetide isolated from the Sargasso Sea
LELPYRKVLLCGGDLGFGAAKTYDLEVWVPSQGTYREISSCSLFTDFQARRMQARWRESDQGKPQYVHTLNGSGLAIGRTLVAILENYQDQSGRVRVPSALLPYMPGLEFLE

SEQ ID NO: 185300 - protein, 250 aa, Unknown
  Bacterial polypetide isolated from the Sargasso Sea
EVEKKGNIPEFNFKPKSHSELGDHLKMIDFDLASKTSGSRFVFLKNNLALLERALSNFMVDKHTSENGYTEISPPLIASESTMFGTGQLPKFIDDQFELKLDEKNEKKFLIPTAEVILTNIVRDKILNINELPLRFVASTPCFRKEAGSYGKDTKGMIRQHQFYKVELVSIVEIENCKSELERMTNCATGILDALELPYRKVVLCTGDMGFSAEKTYDIEVWIPSENKYREISSCSSCGSFQARRRKLDT

SEQ ID NO: 185301 - protein, 252 aa, Unknown
  Bacterial polypetide isolated from the Sargasso Sea
MIARMERAISNFMLDLHTNEFGYTEMNVPILVKDQSVYGVGQLPKFKDDLFKTTDDYWLIPTAEVPLSNMTRESIIDILDLPKRYVSHTPCFRSEAGAAGKDTRGIMRQHQFYKVELVSLTSESQSKDEHERMLSCAEEVLKRLNLHYRVVILSSEDMGFAAQKTYDIEVWLPGQKAYREISSCSNCGDFQARRMNSRYKEGKETKFLHTLNGSGLAVGRTLISILENYQNEDGTIQVPDALIPYMGGINQI

SEQ ID NO: 185302 - protein, 268 aa, Unknown
  Bacterial polypetide isolated from the Sargasso Sea
AKLSKTRFVVMKGEIAKLHRSLISYMISQHTNNNNYMEYNVPYIVNSTSMMGTGQLPKFEDDLFKVKDSDLYLIPTAEVPLTNLYRDKILNETDLPIYMVAHTPCFRSEAGSYGKDTKGIIRQHQFEKVELVHITKPDDAERSLDLITDHAEKIMESLEIPYQRVLLSTGDLGFSSSKTFDIEAWFPSQDCYREISSCSLFSDFQSRRLNIKFKNQLTKKKEFVATLNGSGLAIGRTMAALIENHTDGKVIKIPKALQPFTGFEIIKL

SEQ ID NO: 185303 - protein, 242 aa, Unknown
  Bacterial polypetide isolated from the Sargasso Sea
EHGLTETMTPVLVKEEAMFGTNQLPKFSDDSYQTTNGWWLIPTSEVTLTNICANEVTPEEILPLRMTAHTQCFRSEAGSAGKDTAGMLRQHQFEKVEMVSVTHPDQSMKEHERMTNCAKAILEKLELPYRVVLLCSGDTGFGAKKTYDLEVWLPGQQSFREISSVSICGDFQARRMNARFKPSSGGKPEFVHTLNGSGLAVGRCLIAVLENGQQEDGSILVPEVLRNYLGGNVVIDNQGNLC

SEQ ID NO: 185304 - protein, 80 aa, Unknown
  Bacterial polypetide isolated from the Sargasso Sea
EKYREISSCFNFRDFQARRMKARWKNPSSNKTEILNTLNGSGLALSRTVLALMENFQEKDGSISIPDSLRNYFGSSKITL

SEQ ID NO: 185305 - protein, 148 aa, Unknown
  Bacterial polypetide isolated from the Sargasso Sea
IRQHQFEKVEIVQVVHPNDSDAALESLLENAEEILQLLDLPYQVVQLCGGDLGFSSAKTYDIEVWIPSQNKYREISSCSNFSDFQSRRSKIRLNIGGEKTLPHTLNGSALAVGRTLVAIIENFYDGKNSIIIPKVLQKYLNKDLIRTN

SEQ ID NO: 185306 - protein, 284 aa, Unknown
  Bacterial polypetide isolated from the Sargasso Sea
MHNINYIRDNSIEFDNAMNLRGEKSISSKLLEIDRIKRETQTVLQNLLSEKNILSKKIGNLKSKNEDSKKEISKVEELKIKINSLKELETIKENELNGILIRLPNIPHKTVPNGKDETDNKLYREWGSKPNFNFKPKVHYEIGENLGLINFEIASKLSGSRFVLLKKQISKLERAISNFMLDKHTEENGYTEYSVPFLVKEESLFGTGQLPKFGEDLFTAGDDHWLIPTAEVPLTNLVRNEILNVNQLPIRSTSYTPCFRSEAGAAGKDTRGMLRQHQFTKVEL

SEQ ID NO: 185307 - protein, 293 aa, Unknown
  Bacterial polypetide isolated from the Sargasso Sea
KSKDKSKFSISKDLSTKIEDLIIEQKKIKDKLESILSSIPNIPLNDVPVGIDEKFNTEVIKSGEIKKFNFKPKSHHEIGEKLNMLDFDLASKTSGSRFVFVKGKLAALERAISNFMIDTHVKKNGYTEISPPLLVTDDTMYGTGQLPKFENDQFEIKLDGNDRKFLIPTAEVILTNMVKNQILNVKSLPMRLVASTPCFRKEAGSYGKDTKGMIRQHQFYKVELVSIVENNNCIEELERMTNCATELLDQLKLPYRKIILSTGDMGFSAEKTYDIEVWLPSENKYREISSCSS

SEQ ID NO: 185308 - protein, 230 aa, Unknown
  Bacterial polypetide isolated from the Sargasso Sea
SEILEGTGQLPKFSDDLFKTDSDKWLIPTAEVPITNVIRNEILNENDLPMNFVAYSPCFRAEAGAAGKDTRGMIRQHQFSKVEMVSIVKPEKSEEELIRITNCAERILQKLSLPYRVMLLCSGDTGFSARKTFDIEVWLPGQNNGKGEYREISSCSNCGDFQSRRMNARFRIQSSKELSYIHTLNGSCLAIGRTMIAILENHQNRDGSVNIPIPLQPYMHGKKIILNQDI

SEQ ID NO: 185309 - protein, 173 aa, Unknown
  Bacterial polypetide isolated from the Sargasso Sea
RSEAGAAGADTRGMIRQHQFSKVEMVFITNPLESNHELDRLVICAETILQKLKLPYRVMKLCSGDVGFSAKKTYDLEVWLPGQNKGKGAFREISSCSNCGDFQARRMNAKFKDRETNKIDFLHTLNGSGLAIGRTIIAILENYQQIDGSVLIPDVLVPYMKGTQKIDIPNRNK

SEQ ID NO: 185310 - protein, 273 aa, Unknown
  Bacterial polypetide isolated from the Sargasso Sea
MGEELGMLDFDLATKTTGSRFVFVKSKLALLERALSNFMLDIHIQKNGYEEISPPLLASENTMFGTGQLPKFENDQFEVKLDKDAERKFLIPTAEVILTNIVKDKILDIKSLPMRFVASTPCFRKEAGSYGKDTKGMIRQHQFYKVEMVSVVEQNKCLEELERMTNCATGILDLLELPYRKVILCSGDMGFSAEKTYDIEVWLPSENKYREISSCSSCSTFQAVRMKTRYKDSNKDTLYAGTLNGSGLAIGRTLIAILENYQQKDGSITIPKV

SEQ ID NO: 185311 - protein, 220 aa, Unknown
  Bacterial polypetide isolated from the Sargasso Sea
LILGQLPKFKEDLFYIQDQNLYLIPTAEIPVTNIVKDKIIDKNNLPLKFVSHTPCFRSEAGSYGKDTRGMIRQHQFEKVELVQIVEAEQSYNILEELTQHAESILKKLNLPYRVVNLCTRDLGFSAAKTYDIEVWLPSQNQYREISSCSNFESFQTRRMKTRCRDENNSKLDLLHTLNGSALAIGRTLIAIMENYQTEKGEIVIPDVLQQYMGDKKVIKQ

SEQ ID NO: 185312 - protein, 226 aa, Unknown
  Bacterial polypetide isolated from the Sargasso Sea
IVFGTGQLPKFENDQFEIKFDEGLDKKFLIPTAEVILTNIVKDKIVDLKDLPIRLVASTPCFRKEAGSYGKDTKGMIRQHQFYKVELVSIVEKDKCLEELERMTNCATGILDDLKIPYRKMILCTGDIGFSAEKTYDIEAWIPSENKYREISSCSSCSTFQAVRMKTRYKNQNNEILNVGTLNGSGLAVGRTLIAVLENYQQKDGSVIVPEVLRPYMNNLEKISSN

SEQ ID NO: 185313 - protein, 114 aa, Unknown
  Bacterial polypetide isolated from the Sargasso Sea
LLELPYRKMILCSGDMGFSAEKTYDIEVWLPSENKYREISSCSSCSTFQAIRMKARYKNQNKETLYAGTLNGSGLAVGRTLIAILENYQQKDGSITIPKILRPYMNKLEKISLN

SEQ ID NO: 185314 - protein, 297 aa, Unknown
  Bacterial polypetide isolated from the Sargasso Sea
GKPKEFNFKIKSHVELLENKNMIDFDISSKLSGSRFSMLKGKLSLLERALINFMLDLHTIKFHYEEISPPLIVNEEVMFGTGQLPKFENDQYQLLTEKNKRKFLIPTAEVVLTNIVRDKLLDSKKLPLRFVASTPCFRKEAGSYGKDTKGLMRQHQFYKVELVSIVEPSKCQEELNRMLGCAEEILKILKIPYRVVLLSTGDMGFSAEKTFDIEVWIPSENKYREISSCSSCGTFQARRMNAKYKSKDKRDFVGTLNGSGLAVGRLLIALIENNQNDDGSINLPKELSKYTNNLTNF

SEQ ID NO: 185315 - protein, 98 aa, Unknown
  Bacterial polypetide isolated from the Sargasso Sea
GFSAHKTYDLEVWFPSEERYREISSCSNCLDFQARRMNSKFKSKNDNKNIFLHTLNGSGVAVGRALAAILENYYDEKGHINIPKALQPYMNNETTIKI

SEQ ID NO: 185316 - protein, 275 aa, Unknown
  Bacterial polypetide isolated from the Sargasso Sea
DFEMSSKLSGARFVVLKDKYALLERALINFMIDIHTTKFGYVEISPPLIVNENVMFGTGQLPKFEDDQFEIKKEDSGQRKFLIPTAEVVLSNLFRESILDAKKLPLRFVAGTPCFRKEAGNYGKDTKGMIRQHQFYKVELVSLVDPLNCKDELERMLKCAEEILKQLSIPYQILLLSSGDMGFSSEKTYDIEAWIPSENKYREISSCSSCGTFQSRRMGTKFKTSNGTKFVGTLNGSGLAVGRLLIALIENMQNKDGSILIPEPLRKYMNNLDKI

SEQ ID NO: 185317 - protein, 299 aa, Unknown
  Bacterial polypetide isolated from the Sargasso Sea
SAIPNIPHADVPEGINEESNIVIETKGEIKSKNFKEKSHYELGEKLGMLDFDLATKTTGSRFVFIKDKLAMMERALSNFMLDVHTLENGYIEISPPLMASENTMYGTGQLPKFENDQFEIKLDKNEERKFLIPTAEVILTNIVKNQIVRLNDLPLRLVASTPCFRKEAGSYGKDTKGMIRQHQFYKVELVSIVENGNCLNELERMTNCATMILDKLNLPYRKIILCTGDMGFSAEKTYDIEVWLPSEKKYREISSCSSCGTFQSRRMNSRYKNSKSENVFTGTLNGSGLAVGRTLIAIM

SEQ ID NO: 185318 - protein, 161 aa, Unknown
  Bacterial polypetide isolated from the Sargasso Sea
AGSYGKDTKGMIRQHQFYKVELVSIVENDKCEEELIRMTDCASMILRKLKLPFRKIILSTGDMGFSAEKTFDLEVWLPSENKYREISSCSSCGSFQARRMQARYKNNSKETLSVGTLNGSGLAVGRTLIAIIENYQTEDGSVIIPDALKPYMNNMDKITNN

SEQ ID NO: 185319 - protein, 300 aa, Unknown
  Bacterial polypetide isolated from the Sargasso Sea
ALSKSKDESNFNKSKVISEKILNISKEQLKVKTKLDEILNYLPNLALDDVPVGKDEKSNKLIKKYGNIKKFSFKPKSHVEIGSKNNRIDFETSIKLSGARFVVLKNNIALLERALINFMLDIHTTQYSYTEISPPLIVNEDVMFGTGQLPKFEEDQFELKIDNSDQRKFLIPTSEVVLANLVRRSLLKKEELPLRFVASTPCFRKEAGSYGKDTKGMIRQHQFYKVELVSVVEPKNCMEELDRMLNCARQILEKLEIPHQVILLSTGDMGFSAEKTYDIEAWIPSEDKYREISSCSSCGT

SEQ ID NO: 185320 - protein, 113 aa, Unknown
  Bacterial polypetide isolated from the Sargasso Sea
KKLNLPYRLVDICTGDLGFSSSRTFDLEVWLPSSNCYREISSCSNCLDFQARRSSIRSKIDKQNVYLHTLNGSGLAVGRTMAAILENGQQKDGSVKIPDALIPYFGSNFLKTA

SEQ ID NO: 185321 - protein, 127 aa, Unknown
  Bacterial polypetide isolated from the Sargasso Sea
ALDEITAHAEKVLQLLGLPHRTMVLCTGDMGFGSSKTYDIEVWLPAQNTYREISSCSNMRDFQARRMQARYRSKVDNKPALLHTLNGSGLAVGRTLVAVLENYQNQDGTITVPEVLRPYMGGLSVIG

SEQ ID NO: 185322 - protein, 310 aa, Unknown
  Bacterial polypetide isolated from the Sargasso Sea
DEDDNVEISRWGEPRTFDFEVKDHVDVAGGLNNGLDFATASKLTGSRFVVMRGDIARLNRAIAQFMLDTHTQEHGYQEMYVPYLVNADSLYGTGQLPKFGEDLFHTKPATEEGQGLSLIPTAEVPLTNIARDEILDAKTLPVKMTAHTPCFRSEAGSYGRDTRGLIRQHQFDKVELVQLVKPEDSFDALEALTGHAEVILQKLELPYRKVLLCTGDMGFGACKTYDLEVWLPAQNTYREISSCSNMLDFQARRMQARFRNPETNKTELLHTLNGSGLAVGRTLVAILENNQQADGSVTIPKALVPYMAGQ

SEQ ID NO: 185323 - protein, 149 aa, Unknown
  Bacterial polypetide isolated from the Sargasso Sea
RQHQFYKVEMVSIVEKENCLKELERMTNCATDILDKLELPYRKIILCSGDMGFSAEKTYDIEVWLPSENKYREISSCSSCSTFQAQRMKSRYKNKNKETVFVGTLNGSGLAVGRTLIAVLENYQQKDGSIIVPKVLRPYMNNLELISAK

SEQ ID NO: 185324 - protein, 252 aa, Unknown
  Bacterial polypetide isolated from the Sargasso Sea
MHDLKDIRKNIEIFKKKINQRNVQIDLEKLLTIDKDNREIIFKKEKLEQEKKLLSKTKDPKNFEKSKKISLDISKLEKNHLELKKKIKDILSSVPNLALDDVPIGKDEKSNKVIKKIGELKKFNFKVKPHTILGTTKKNMDFDLASKLSGARFVVLKENLALLERALINFMIDTHTEKFNYTEISPPIIVNESAMYGTGQLPKFEMDQYEIKTDKEDLRKFLIPTAEVSLTNLVRETILDIKDLPLRYVAST

SEQ ID NO: 185325 - protein, 305 aa, Unknown
  Bacterial polypetide isolated from the Sargasso Sea
KKENLEKEKKDISKSKDESLFKKSKEISTELEKISDQQKNTKNELDNILSSIPNLPHSDVPNGKDENDNVEVLKAGKVPEFEFKPKSHYELGENLGMLDFDLATKTTGSRFVFVKKELALLERALSNFMLDTHIVQNGYQEISPPLIASDNTMYGTGQLPKFENDQFEIKFDEGSDRKFLIPTAEVILTNIVKDKIVDQKDLPMRFVASTPCFRKEAGSYGKDTKGMIRQHQFYKVELVSIVEKENCLDELERMTNCATDILEKLELAYRKVILCSGDMGFSAEKTYDIEVWLPSENKYREISSC

SEQ ID NO: 185326 - protein, 310 aa, Unknown
  Bacterial polypetide isolated from the Sargasso Sea
KFIEKSKELSLKMKEINKNQIKLQSQITDILSSIPNIPLSDVPVGQDENSNKEIEKKGEIKEFNFKPKSHYELGEKLNMLDFDLATKTTGSRFVFVKKELAQLERAISNFMIDTHTQKNGYTEISPPLIATAETMFGTGQLPKFENDQFEIKLDEGDGRKFLIPTAEVILTNIVKNRILDNKELPIRVVASTPCFRKEAGSYGKDTKGMIRQHQFYKVELVSIVENDKCSEELERMSNSATMILDALKLPYRKIVLCTGDMGFSAEKTYDIEVWLPSENKYREISSCSSCGSFQARRMKARYKGQNNSKE

SEQ ID NO: 185327 - protein, 247 aa, Unknown
  Bacterial polypetide isolated from the Sargasso Sea
MEKKTISKSKDQKLFEKSKELSVKIEEINKNQSKLQSQIDNILSSIPNLPLSDVPIGQDENANVEIEKKGETKEFDFKPKTHFELGENLNMLDFDLATKTTGSRFVFVKKQLAQLERALSNFMIDTHTQKNGYTEISPPLIATAETMYGTGQLPKFENDQFEIKLDADEGRKFLIPTAEVILTNIVNNQIINKDDLPIRVVASTPCFRKEAGSYGKDTKGMIRQHQFYKVELVSIVEKDKCADELER

SEQ ID NO: 185328 - protein, 255 aa, Unknown
  Bacterial polypetide isolated from the Sargasso Sea
KFALLERALINFMLDPHVNKFNYCEVSPPLIVNEDVMFGTGQLPKFEDDQFEVKIDNSEERKFLIPTAEVVLTNLVRKSILTIENLPLRFVASTPCFRKEAGSYGKDTKGMMRQHQFYKVELVSIVDPKDCMTELNRMLNCAEEILKKLEIPYQVVLLSSGDMGFSAEKTFDIEVWIPSEKKFREISSCSSCGSFQARRMGTKFKTSNGTEYVGTLNGSGLAVGRLMIALVENNQNEDGSITIPNILKKYMNNLD

SEQ ID NO: 185329 - protein, 218 aa, Unknown
  Bacterial polypetide isolated from the Sargasso Sea
LPKFENDQFEIKFDSSDRKFLIPTAEVILTNIVKDKILDLKELPMRFVASTPCFRKEAGSYGKDTRGMIRQHQFYKVEMVSVVENNKCLDELERMTDCATGILSDLGLPFRKVILCSGDMGFSAEKTYDIEVWIPSENKYREISSCSSCSTFQAIRMKARYKNENKEIVNVGTLNGSGLAIGRTLIAILENYQQKDGSIVIPEKLRPYMNNLEKISLN

SEQ ID NO: 185330 - protein, 191 aa, Unknown
  Bacterial polypetide isolated from the Sargasso Sea
ILTNMVKNQIINIKSLPMRLVASTPCFRKEAGSYGKDTKGMIRQHQFYKVELVSVVENDKCLEELERMTNCATKILDDLKLPYRKIILSTGDMGFSAEKTYDIEVWLPSEEKYREISSCSSCGTFQARRMKARYKNKDNNIEFVGTLNGSGLAVGRTLIAILENYQTEEGSVIIPDVLKPYMGNIDKISIN

SEQ ID NO: 185331 - protein, 180 aa, Unknown
  Bacterial polypetide isolated from the Sargasso Sea
LDESKLPVKFAAYSACFRREAGSYGKDTRGLLRLHQFNKVELVKFAHPDNSYNELESLLEDAEKVLQSLGLHYRVIELCTGDLSFSAAKCYDIEVWSPYENKYLEVSSCSNFESFQANRGSIRFRSSKTGKMEFVHTLNGSGVATPRLLVALIENYQQKDGTIQLPKALQRYMNISVIKD

SEQ ID NO: 185332 - protein, 264 aa, Unknown
  Bacterial polypetide isolated from the Sargasso Sea
KSQKNNLSKEIGTLASKGEDTKKLKDDSENLNKDIDQLQNDFDLLKTDIDTTMLQIPNLPDSDVPIGGDESNNKEINKKIFTQHNDGLDHVEIGEKLGLLDFDLANKLSGSRFVVLKGKLAQLQRALIQFMLDEAKNSGYEEMYVPYIVNADSLIGTGQLPKFEDDQFKVGDSKYLIPTAEVPLTNLLRDQVITSSELPINLTAHTPCFRAEAGSYGKDTRGMIRQHQFEKVEIVKFADPEKSDKCLDELVSHASQILEKLELS

SEQ ID NO: 185333 - protein, 248 aa, Unknown
  Bacterial polypetide isolated from the Sargasso Sea
MHNLKEIRKDFDTFKRSLEKRSVDINFDKLKDLDKKNRDFIQKKEELEKEKKEISKSKDKSLFTKSKEISLNIEQIVEKQKLVKDELEKILSNIPNIPHADVPNGKDENDNVEISKSGKIPKFDFTPKSHYELGENLKMLDFDLATKTTGSRFVFVKNKLALLERALSNFMLDTHVQKNDYEEISPPLLASENTMFGTGQLPKFENDQFEVKLEESTGRKFLIPTAEVILTNIVKDRIIDIKSLPLRF

SEQ ID NO: 185334 - protein, 280 aa, Unknown
  Bacterial polypetide isolated from the Sargasso Sea
MKQRGEQPISNKILELDKVKRETQTVLQNLLAERNSISKNIGKLKSENKDASSEMKKVDEIKNKINNLKELETIKDEELKTILSRLPNIADKTVPVGSNEEDNTKYREWGEKPEFQFKPKTHFELGEDLGLMNFETASKLSGSRFVLLKNQLSKLERAIANFMLDKHTNENGYIEMHVPYLVKSDTLYGTGQLPKFAEDLFTAGDDHWLIPTAEIPLTALHSNEILNINQLPMRVTSYTPCFRSEAGAAGKDTRGMLRQHQFTKVELVSLVEPEHSKDEL

SEQ ID NO: 185335 - protein, 260 aa, Unknown
  Bacterial polypetide isolated from the Sargasso Sea
KLAGARFSVLKGDLAKLQRALITFMLDNAIGHGYEEYYLPFMANRNSLIGTGQLPKFEEDLFKTYDKLYLIPTAEVPLTNLFRNEFVNEVELPIKVTSHTPCFRSEAGSYGKDTRGLMRQHQFEKVELLQVTHPDNSMKCLDELLANACEILDKLELPYQVVELCTGDLGFSSCKTFDIEVWMPSQNRYREISSCSNFSDFQARRANIKFKNKEGTHFAHTINGSGLAVGRTLIALIENNYNGTDSIKIPSSLQEYFGSD

SEQ ID NO: 185336 - protein, 279 aa, Unknown
  Bacterial polypetide isolated from the Sargasso Sea
SKKEGTDSSKLEKKASEITSKIKSQSKILSSILLDIDAFALSIPNLIDDDVPEGKDESDNIELRNSGKVRKFDFTPKDHLELGSNLSGIDMESGVKITGSRFAVFKSDLARLQRSLINFMIDIHVQEHSYTEVYVPFIVNEESLLGTGQLPKFEEDLFKIEGKENFYLTSTAEVPVTNLFRNEVIDSKELPKKYVCHTPCFRSEAGSYGLDTKGIMRLHQFEKVELVQATESKDSDNALEELTGHAEEILKRLELPYRVVSLCSGDIGFSAAKTYDLEV

SEQ ID NO: 185337 - protein, 292 aa, Unknown
  Bacterial polypetide isolated from the Sargasso Sea
MHNLKEIRKDFSKLKKDLERRSIKIDFNNLKKLDQLNRDLIQKKENLEKEKKDISKSKDESLFRKSKEISVELEKISDQQKNTKTELDNILSGIPNIPHQDVPSGIDENDNVEVLKSGKVPEFDFKPKSHYELGENLGMLDFDLATKTTGSRFVFVKKELALLERALSNFMLDTHIVQNGYQEISPPLIASGNTMYGTGQLPKFENDQFEIKFDEGSDRKFLIPTAEVILTNIVKDKIVDQKDLPMRFVASTPCFRKEAGSYGKDTKGMIRQHQFYKVEMVSIVEKENCLEE

SEQ ID NO: 185338 - protein, 237 aa, Unknown
  Bacterial polypetide isolated from the Sargasso Sea
FNYTEISPPLIVNEDVMFGTGQLPKFEEDQFEIQIENNEDRKFLIPTAEVVLTNLVRKSNLNLKDLPLRFVASTPCFRKEAGSYGKDTKGMMRQHQFYKVELVSIVEPKDRFDELERMLNCAEEILKKLDIPYQVVLLSSGDMGFSAEKTYDIEAWIPSEKKYREISSCSSCGSFQSRRMGAKYKSTKGTEFVSTLNGSGLAVGRLMIALLENNQNEDGSINIPNNLKKYMNNLDKI

SEQ ID NO: 185339 - protein, 141 aa, Unknown
  Bacterial polypetide isolated from the Sargasso Sea
KVELYWYSDPSKSLEAHNQLTSDAENILRKLNLPYRVVDICTGDLGFSSSRTFDLEVWLPSSKCYREISSCSNCLDFQARRSSIRTKIDKKTSYIHTLNGSGLAIGRTMAAILENGQRPDGSVKIPEALIPYFGSTFIKTT

SEQ ID NO: 185340 - protein, 285 aa, Unknown
  Bacterial polypetide isolated from the Sargasso Sea
ENLGMLDFDLATKTTGSRFVFVKKELALLERALSNFMLDTHIVQNDYQEISPPLIASDNTMYGTGQLPKFENDQFEIKFDEGSDRKFLIPTAEVILTNIVKDKIVDQKDLPMRFVASTPCFRKEAGSYGKDTKGMIRQHQFYKVEMVSIVEKENCLEELERMTNCATDILDKLELPYRKVILCSGDMGFSAEKTYDIEVWLPSENKYREISSCSSCSTFQAQRMKSRYKNKNKETVFVGTLNGSGLAVGRTLIALLENYQKKDGSIIVPKVLRPYMNNLELISAK

SEQ ID NO: 185341 - protein, 268 aa, Unknown
  Bacterial polypetide isolated from the Sargasso Sea
DNFMKSRGENSISQKIIDIDKEKREAQTALQNLLADKNQLSKTIGKLKSEKKDATNEMAQVDDLKNKINALKELETLKNDELNAILSRLPNIPDSSTPIGANDEENVFYRDWGEKPSFDFDPKQHFEIGENANLMNFETATKLSGSRFVILKGNLSKLERAIANFMIEKHTSINGYVELHVPYLVKANTLYGTGQLPKFADDLFTAGDDHWLIPTAEIPLTALHSNEILNISQLPMRVTSYTPCFRSEAGAAGKDTRGMLRQHQFTKV

SEQ ID NO: 185342 - protein, 281 aa, Unknown
  Bacterial polypetide isolated from the Sargasso Sea
QKIVKDKLDNILTSIPNIPLDDVPRGKDENTNKEVVKVGNIQKFNFKPKSHYEIGEKLNMLDFDLATKTTGSRFVFVKDKLASLERAISNYMIDTHTKINGYTEISPPLLASENTMFGTGQLPKFENDQFEIKLDDKNDRKFLIPTAEVILTNMVKNQIINIKSLPIRLVASTPCFRKEAGSYGKDTKGMIRQHQFYKVELVSVVENNKCLDELERMTNCATKILDDLKLPYRKIILSTGDMGFSAEKTYDIEVWLPSEEKYREISSCSSCGTFQATRRKP

SEQ ID NO: 185343 - protein, 190 aa, Unknown
  Bacterial polypetide isolated from the Sargasso Sea
LTNMVKDKMINLNQLPLRFVASTPCFRKEAGSYGKDTKGMIRQHQFYKVELVSIVEKNKCQEELERMTKCACNILDKLMLPYRKILLSTGDMGFSAEKTYDIEVWLPSENKYREISSCSSCGTFQARRMKTRYKDANKETQYVGTLNGSGLAVGRTLIAIMENYQTKEGSIIIPEVLRPYMNNLDKIEKN

SEQ ID NO: 185344 - protein, 320 aa, Unknown
  Bacterial polypetide isolated from the Sargasso Sea
NDNQKKIKDELDTILHNIPNIPHSDVPDGKDENDNLEISKSGKIPSFDFKPKTHYEIGEKLKMLDFDLATKTSGSRFVFVKSHLSLMERALSNFMLDRHVFKNGYQEISPPLIASDNTMFGTGQLPKFENDQFEIKFDEESNKKFLIPTAEVILTNMVKDKVVDFKELPMRFVASTPCFRKEAGSYGKDTKGMIRQHQFYKVELVSIVEKDKCLEELERMTNCATGILDDLGLSYRKVILCTGDIGFSAEKTYDIEVWLPSENRYREISSCSSCSTFQAVRMKTRYKNKSNEMVNVGTLNGSGLAIGRTLIAILENYQQK

SEQ ID NO: 185345 - protein, 285 aa, Unknown
  Bacterial polypetide isolated from the Sargasso Sea
MKFGEKLNMLDFDLATKTTGSRFVFVKDKLATLERAISNFMIDTHTKINGYTEISPPLMATDDTMFGTGQLPKFENDQFEIKFDEKDGRKFLIPTAEVILTNMVKNQIINLNSLPIRVVASTPCFRKEAGSYGKDTKGMIRQHQFYKVELVSIVENDKCLDELERMTNSATMILDKLKLPYRKIILSTGDMGFSAEKTYDIEVWLPSEDKYREISSCSSCGTFQARRMKARYKNKDNITDFVGTLNGSGLAVGRTLIAILENYQTEDGSVLIPDVLKPYMDNIDK

SEQ ID NO: 185346 - protein, 119 aa, Unknown
  Bacterial polypetide isolated from the Sargasso Sea
MRKDTKGMIRQHQFYKVEMVSIVEKENCLEELERMTNCATDILDKLELPYRKVILCSGDMGFSAEKTYDIEVWLPSQNKYREISSCSSCSTFQAQRMKSRYKNKNKETVFVGTYQMEVV

SEQ ID NO: 185347 - protein, 289 aa, Unknown
  Bacterial polypetide isolated from the Sargasso Sea
MNLGENLGMLDFDLATKTTGSRFVFVKKELALLERALSNFMLDTHIVENNYQEISPPLIASDNTMYGTGQLPKFENDQFEIKSDEGSDRKFLIPTAEVILTNIVKDKIVDQKDLPMRFVASTPCFRKEAGSYGKDTKGMIRQHQFYKVELVSIVEKENCLEELERMTNCATDILDKLELPYRKVILCSGDMGFSAEKTYDIEVWLPSENKYREISSCSSCSTFQAQRMKSRYKNKNKETVFVGTLNGSGLAVGRTLIAVLENYQQKDGSIIVPKVLRPYMNNLGLISAK

SEQ ID NO: 185348 - protein, 199 aa, Unknown
  Bacterial polypetide isolated from the Sargasso Sea
FLIPTAEVILTNMVKDKILNQKDLPMRLVASTPCFRKEAGSYGKDTKGMIRQHQFYKVELVSIVEPQNCIDELERMTNCATDLLDMLKIPYRKVILSTGDMGFSAEKTYDIEVWLPSENKYREISSCSSCGSFQARRMKARYKNDKKETLFVGTLNGSGLAVGRTLIAILENYQQEDGSIIVPDVLKPYMNNLEKISNN

SEQ ID NO: 185349 - protein, 275 aa, Unknown
  Bacterial polypetide isolated from the Sargasso Sea
MQKVSSTIKEYDLELKQIDDELKSKLLFIPNVPHESVPKGKAEEDNVKVREWGEKPIFLFPHRDHVFLSEKHNLIDFKAGAKISGSGYPLYIDRGARLERALINYMMDYHSNNGFTEVFPPFLVNESSVLTTGQLPKFKDDMYYINKDDMYCISTAEVPVTNIHRDEILDMNCFPVQYAAYSACFRREAGSYGKDTKGLLRLHQFNKVELVKFCNPSNSYQELELLLKSAEKILQELNLHYRIIELCTGDLSFSAAKCYDIEVWSPSEQKYLEVS

SEQ ID NO: 185350 - protein, 296 aa, Unknown
  Bacterial polypetide isolated from the Sargasso Sea
QQKHTKIELDNILSSIPNIPHQDVPNGKDENDNVEVLKAGKVPEFDFKPKSHYELGENLGMLDFDLATKTTGSRFVFVKKELALLERALSNFMLDIHIVQNGYQEISPPLIASDNTMYGTGQLPKFENDQFEIKFDEGSDRKFLIPTAEVILTNIVKDKIIDQKDLPLRFVASTPCFRKEAGSYGKDTKGMIRQHQFYKVELVSIVEKENCLEELERMTNCATDILDKLELPYRKVILCSGDMGFSAEKTYDIEVWLPSENKYREISSCSSCSTFQAPRMKSRYKNKNKETVFVGT

SEQ ID NO: 185351 - protein, 275 aa, Unknown
  Bacterial polypetide isolated from the Sargasso Sea
MHNINFIRDNPIIFDNFMKQRGELPCSKNIIKIDEDKRNTQTVLQNLLAERNKLSKEIGILKSQNKESEVENILKRVEKIKEETSSLKELEKIKEDELHAILSRLPNIPSSSTPQGKNENDNILYREWGNKTDFQFKPKRHYEIGENLNLMNFDLASKLSGSRFVVLKGMLSKLERAIAQFMLDKHTDENGYTEMYVPFLVKNDSLFGTGQLPKFGEDLFTAGENHWLIPTAEVPLTNLVRDKILQTNNLPMRVTSYTPCFRSEAGAAGQDTRGM

SEQ ID NO: 185352 - protein, 249 aa, Unknown
  Bacterial polypetide isolated from the Sargasso Sea
MIDVHTQTNGYKEISPPLMASDDSMYGTGQLPKFENDQFEVKLDEKNDRKFLIPTAEVILTNMARDQILNIKDLPMRLVAATPCFRKEAGSYGKDTKGMIRQHQFYKVELVSIVENDKCEEELNRMTNCATMILDKLKLPYRKIILSTGDMGFSAEKTYDIEVWLPSEKKYREISSCSSCGTFQATRMKARYKNKSNETTFVGTLNGSGLAVGRTLIAILENYQNSDGSVSIPDVLKPYMNNLDKISNN

SEQ ID NO: 185353 - protein, 236 aa, Unknown
  Bacterial polypetide isolated from the Sargasso Sea
REFIQKKESLEKEKKDISKSKDKSLFDKSKKISISLDEISEQQKKIKFDLDQILSNIPNTLHPDVPTGKDENDNVEIMKSGKIPNFKFKPKSHYELGEDLNMLDFDLASKTTGARFVFVKDKLALLERALSNFMLDIHVNNNGYQEVSPPLMALENTMFGTGQLPKFENDQFEIKIEHESDRKFLIPTAEVILTNIVKDMIIDLKKLPMRFVASTPCFRKEAGSYGKDTKGMIRQH

SEQ ID NO: 185354 - protein, 151 aa, Unknown
  Bacterial polypetide isolated from the Sargasso Sea
MIRQHQFYKVELVSVVEPENCKSELERMTNCATGILDSLKLPYRKVVLCTGDMGFSAEKTYDIEVWIPSENKYREISSCSSCGSFQARRMKARYKNDKKETVFLGTLNGSGLAVGRTLIAILENYQLEDGSIKIPEVLRPYMKNLDIISIK

SEQ ID NO: 185355 - protein, 184 aa, Unknown
  Bacterial polypetide isolated from the Sargasso Sea
LYRDTIIDQNSLPLKLVSHTPCFRSEAGSYGKDTRGIIRQHQFEKVEVVQIVEPQHSLNALEEITSHAEQLLENLEVPYQRVCLSTGDLGFSASKTYDIEAWFPGEQTYREVSSCSLFGDFQSRRANIKFKSSDKKKYYPHTLNGSALAIGRTLAALIENHTKDNIIHIPDVLRVYTGFDSIKL

SEQ ID NO: 185356 - protein, 265 aa, Unknown
  Bacterial polypetide isolated from the Sargasso Sea
ESEKKKISKTNDKSLFEKSKKLSAEIEKLNNDQNKIDEDLNSILSNIPNIALNDVPIGLDDKSNVEIKKIGTIPSFNFEPKPHYVLGENLNMLDFNLATKTSGSRFVFMKDKLALLERALNNFMLDTHIYENGYKEISPPLLVNENSMFGTGQLPKFENDQFELKMDLKSDKKFLIPTAEVILTNMVRENIVNFNDLPMRFVASTPCFRKEAGSYGKDTKGMIRQHQFHKVELVSIVEPENCVEELDRMTNSASKILDKLKLPYR

SEQ ID NO: 185357 - protein, 94 aa, Unknown
  Bacterial polypetide isolated from the Sargasso Sea
FSAAKTYDLEVWIPSQESYREISSCSNCTDFQARRAKMRFKEDGVSKFVHTLNGSALAAGRALIAIIENNFDQKSKITIPEVLQDYTKFSHIEV

SEQ ID NO: 185358 - protein, 301 aa, Unknown
  Bacterial polypetide isolated from the Sargasso Sea
AVTELQTLQEKRNKISKEVGKARRAGHKSDHLVEEVSRLKNAITELEQIDRELSVKLEESLSELPNQLAEDVPEGSSDLDNIELRSEGIIKPRLFQPKDHVELGEKLEEIDFDSAVKISGARFVVLRGQLARLERALANFMIDHQVNEFGYLEVSPPALVNSEALFGTGQLPKFSDQQFKTEDGLWLIPTAEVPLTNLVRDCILEEGELPLRFTAYTPCFRSEAGAAGRDTRGMIRVHQFGKVEMVSITHPEHSEEEHERMTSCAENILKALELPFRTVVLCSGDTGFSAVKTYDIEVWLP

SEQ ID NO: 185359 - protein, 96 aa, Unknown
  Bacterial polypetide isolated from the Sargasso Sea
MSFSSAKTYDIEVWIPSENKYREISSCSNFGSFQSRRSNIKYKVGNKSSFAHTLNGSGLAVGRTFVSILENFQNSDGTITIPKVLRPYLNNLHTIS

SEQ ID NO: 185360 - protein, 96 aa, Unknown
  Bacterial polypetide isolated from the Sargasso Sea
MGFNANKTYDIEVWLPGEDKYREISSCSNCGDFQARRMNTRYKQNGKNIYIHTLNGSGLAVGRTLIAILENYQTDDGNVRIPKVLKKYFDNQDNLF

SEQ ID NO: 185361 - protein, 260 aa, Unknown
  Bacterial polypetide isolated from the Sargasso Sea
SRFSYLFGDLVKMQFNLVSYAMNKLSEKGFNPTIPPVLVRENALFGTGFFPDDSDQVYEIPNDDLFLVGTSEVSLAALHGDEILDFGKLPIRYAGYSTCFRREAGTYGKDTTGIFRVHQFDKVEMFSFCSPEKSEEEHEFILSVEEEILQELEIPYRVVDVCTGDLGSSAAKKFDIEAWIPSQNTYREVTSCSNTTDFQARRLNIRTKVEKDTALLHTLNGTAIAVGRILIALLENNQTEDGGVEFSDSLGNILGVEKLS

SEQ ID NO: 185362 - protein, 122 aa, Unknown
  Bacterial polypetide isolated from the Sargasso Sea
ITADAEAVLQALELPYRVLDLCTADIGFSAQRTYDLEVWLPGAAAYREISSCSVCGDFQARRSAIRTKDGKSTKLVHTLNGSGLAVGRTMAALLETGQQSDGSVLLPKALVPYVGYERLQPE

SEQ ID NO: 185363 - protein, 255 aa, Unknown
  Bacterial polypetide isolated from the Sargasso Sea
NRKVFQVKMESSQAKQNKIAKEIGLAQKNKESIEDLKSKATKISSELKDAKDKFQTNKIEYEDFLLNIPNLLDPSVPFGKSAEDNEVLKEAGMISSFDFTPRDHQELGILAEGMDFEAAAKISKSRFVIFKNSVAKLSRALIQFMLNTHINEHGYQEIYVPYIVNKDSLLGTGQLPKFKEDQFQINDDENEMYLIPTAEVPVTNYHRDEILNPKDLTLSYVSHTPCFRSEAGSYGLDTKGIIRQHQFEKVELVKI

SEQ ID NO: 185364 - protein, 282 aa, Unknown
  Bacterial polypetide isolated from the Sargasso Sea
GADETENIEIRKEGKPRAFAFTVKDHLEIGRNHEIDMEAGVRITGSRFKVLRNDIAHLQRALINFMIDTHVDEHGYEEVYVPYIVNKDSLLGTGQLPKFEEDLFKINNESNFYLTSTAEVPVTNLFRDEILESKQLPLKYVCHTPCFRSEAGSYGKDTRGIMRLHQFEKVELVQAVEATDSDDALEELTNHAENILKKLELPYRVVSLCSGDIGFSSSKTYDLEVWVPSQDAYREISSCSNFRDFQARRLKARWKDNNGKKTQLINTLNESGLALSRTVLAI

SEQ ID NO: 185365 - protein, 279 aa, Unknown
  Bacterial polypetide isolated from the Sargasso Sea
ASEAIGQAKKAGHDVSVAINTMKKLGENLKKVEYDLDKISNQLNDLLFKVPNPPHDSSPQGTDESGNVEIRSWGKKPEIDFELKTHTEIGKDLELFDFKRGAKLSGSGFPLYIGQGAQLERALINSMMEHHRKEYSYKEIFPPVLMKKMSMVTTGQLPKFEEDMYHTELDNLYLAPTAEVPVTNIHRDEIIDESELPIQYVAYSPCFRRESGSYGKDTRGLLRVHQFNKVELVNFTTPENSYNELENLTKQAESILQKLGLHYRVLELCTGDLSFAAAK

SEQ ID NO: 185366 - protein, 255 aa, Unknown
  Bacterial polypetide isolated from the Sargasso Sea
ALINYMLDMHTKKFEYIEVSPPILANYATMFGTGQLPKFTEDQFEVKLNEDNNKDRKFLIPTAEVVLTNMVRESVLKSESLPLRVTAHTPCFRKEAGSYGKDTKGMMRQHQFHKVELVSIVHPEKRLDELDRMVNCAEQILKDLDLPFRKVLLCSGDMGFSAEKTYDLEVWIPSENKYREISSCSSCGQFQARRMNAKFKDKDNKNDFVATLNGSGLAVGRTMIAIIENFQEQDGSIRIPTSLRPYMHNLEKIKI

SEQ ID NO: 185367 - protein, 172 aa, Unknown
  Bacterial polypetide isolated from the Sargasso Sea
LCFRSEAGSAGRDTSGHVRQHQFEKVEMVSIIHPDDSRAELDRMTGCAEAILDRLGLAYRTLVLCTGDMGFGARRTHDIEVWLPGQNTYREISSCSTTGDFQARRMNARFRPAQGGKPEFVHTLNGSGLAVGRCLIAVLENGQQADGSVRLPDALVPYLGGKTTITADGSFG

SEQ ID NO: 185368 - protein, 361 aa, Unknown
  Bacterial polypetide isolated from the Sargasso Sea
MMAEVGGIGDEMKASAARLDDIQKRLSDLLLGVPNLAHESVPVGTDEAGNVEVRRWGTPRQFDFEVKDHVDIGTPLGLDFETGAKLSGARFTLLRGQIARLHRALAQFMIDTHTLHHGYTEVYTPYIVNPEILYGTGQLPKFADDMFRVEKGGEENTVTQYLISTSEISLTNTVRDSIVEAETLPIKLTAHSPCFRSEAGSYGRDTRGLIRQHQFDKVEMVQIVAPETSYDALEQMVGHAETILQKLELPYRVITLCTGDMGFSAAKTYDLEVWVPAQNTYREISSCSNTESFQARRMQARFRNAQGKPELVHTLNGSGLAVGRTLVAVLENFQNADGSVTVPAALRPYLGGVERLEVPAA

SEQ ID NO: 185369 - protein, 337 aa, Unknown
  Bacterial polypetide isolated from the Sargasso Sea
EFEEKKRLLDKKLQNEIYNLPNLPSRDAPIGKDENHNVQVKTWGDPLVAENLKSHWEIGESLSLFDSTKSTKISKSRFITLIGNGARLERSLINFMLDMHTENGYLELMPPALVNSESLTGSGQLPKFSNESFKCSNDDLWLSPTAEVPLTAFHRNEIIDSKQLPLKYVAYSPCFRREAGSYGRDTKGLIRLHQFNKVELYWFCDPSKSTEAHKKITLDAEGILKKLNLPYRLVDICTGDLGFSSSRTFDLEVWLPSSKCYREISSCSNCLDFQARRSSIRAKIDKKNTYLHTLNGSGLAIGRTMAAILENGQQKDGSVKIPDALVPYFGSNILKTA

SEQ ID NO: 185370 - protein, 228 aa, Unknown
  Bacterial polypetide isolated from the Sargasso Sea
MKLCLVLDNLPKFENDQFEIKFDEKEDRKFLIPTAEVILTNMVKNQIVNLNSLPIRVVASTPCFRKEAGSYGKDTKGMIRQHQFYKVELVSIVENDKCLDELERMTKSATMILDKLKLPYRKIILSTGDMGFSAEKTYDIEVWLPSENKYREISSCSSCGTFQARRMKARYKNKDNVTDFVGTLNGSGLAVGRTLIAILENYQTEDGSVLIPDVLKPYMDNIDKISNN

SEQ ID NO: 185371 - protein, 336 aa, Unknown
  Bacterial polypetide isolated from the Sargasso Sea
MKKKKESYYKQLEDEISKLPNFPSKDAPFGENENNNVQIKKWGDPLKKDNLKAHWEIGENLNLFDSLKSTKISKSRFITLTGNGARLERALINFMLDVHSNNGYLELMPPSLVNSESLRGSGQLPKFSNESFKCVNDDLWLSPTAEVPLTAFHKNEIIDPKILPLKYVAYSPCFRREAGSYGRDTKGLIRLHQFNKVELYWFCHPNKSLEAHKKITADAESILKKLNLPYRSVDICTGDLGFSSSRTFDLEVWLPSSKCYREISSCSNCLDFQARRSSIRTKIDKKTSYIHTLNGSGLAIGRTMAAILENGQQSDGSVKIPDALVPYFGSSFIKTA

SEQ ID NO: 185372 - protein, 233 aa, Unknown
  Bacterial polypetide isolated from the Sargasso Sea
PLMASAETMFGTGQLPKFETDQFEIKFDDSNDRKFLIPTAEVILTNMVKDQILNFKDLPIRLVASTPCFRKEAGSYGKDTKGMIRQHQFYKVELVSIIEPNKCIDELERMTSCATKILDLLKLPYRKVILSTGDMGFSAEKTYDIEVWLPSENKYREISSCSSCGSFQARRMKARFKNDKNVTEFLGTLNGSGLAVGRTLIAILENYQNEDGSINIPDALKPYMNNLDKITIN

SEQ ID NO: 185373 - protein, 382 aa, Unknown
  Bacterial polypetide isolated from the Sargasso Sea
MHNIKDIRKNFDEFVNSIEKRNQDLKLENILELDKKNRNLIQNKEILEKEKKDISKSKDKSLFEKSKKISSEIDLLNTQQNKIKTEIENILSSLPNLALNDVPVGKDEKSNVEVETKGEIRKFDFKPKSHYELGDSLKMLDFDVATKTSGTRFVFVKDKLAQLERALSNFMLDIHIKENGYEEISPPLIANEDSMYGTGQLPKFENDQFELKIDEKNDRKFLIPTAEVILTNIVKDKILNIKNFPLRYVASTSCFRKEAGSYGKDTKGMIRQHQFYKVELVSIVENNKCADELERMTKCASAILDKLKLPYRKVLLCTGDMGFSAEKTYDLEVWLPSENKFREISSCSSCGTFQARRMKTRYKNSSNDTEFVGTLNGSGLAI

SEQ ID NO: 185374 - protein, 280 aa, Unknown
  Bacterial polypetide isolated from the Sargasso Sea
MLDFDLATKTSGSRFVFVKSQLAHLERAISNFMIDIHTQKNQYKEISPPLIASSNSMYGTGQLPKFENDQFEINLDSDDRKFLIPTAEVILTNIVRDKILDEKTLPQRYVASTPCFRKEAGSYGKDTRGMIRQHQFYKVELVSIVHPDNRLEELERMTDCATGILDLLELPYRKIILSSGDMGFSAEKTYDIEVWLPSENNYREISSCSSCGSFQARRMKSRFKDKNNETQYVSTLNGSGLAVGRTLIAILENYQNEDGSIKIPNILKPYMNNIEKISKN

SEQ ID NO: 185375 - protein, 419 aa, Unknown
  Bacterial polypetide isolated from the Sargasso Sea
MHNIKDIRKNFDDFKNIIKSRNISIDLDQILDLDQKNRKLIQEKETLEQEKKSISKKQDKSLFSKSKEISEKIVSINKDQSLTKIKLDDLLSSIPNLPLKDVPIGADENSNKEISKSGTIKEFNFNPKSHYELGENLKMLDFDLATKTTGARFVFVNDKLALLERAIANFMLDTHTQINSYKEISPPLIANDAAMFGTGQLPKFEDDQFEIKIEEKSGRKFLIPTAEVILTNIVRDKIVNIKDFPMRFVALTPCFRKEAGSYGKDTKGMIRQHQFYKVELVSIVENNKCIEELERMTNCATMILDKLKLPYRKIILSTGDMGFSAEKTYDIEVWLPSEKKYREISSCSSCGTFQARRMKARYKNTNNETEFVGTLNGSGLAVGRTFIAILENYQNSDGSITIPDVLKPYMNNKKKISNN

SEQ ID NO: 185376 - protein, 273 aa, Unknown
  Bacterial polypetide isolated from the Sargasso Sea
LATKTTGSRFVFVKDKLALLERALSNFMLDTHILKNGYKEISPPLLASENSMFGTGQLPKFENDQFEVKLEKDSERKFLIPTAEVILTNIVKDKIINQKDLPMRFVASTPCFRKEAGSYGKDTKGMIRQHQFYKVEMVSIVEQSKCLDELERMTNCATGILDLLELPYRKMILCSGDMGFSAEKTYDIEVWLPSENRYREISSCSSCSTFQAVRMKSRYKNQNKEILYVGTLNGSGLAIGRTLIAIMENYQQKDGSITIPNVLKPYMNNLEKI

SEQ ID NO: 185377 - protein, 332 aa, Unknown
  Bacterial polypetide isolated from the Sargasso Sea
SYRKLLQEKENHEQKKKEISKSKDKSLFSKSKEISEKISIITKDLSVIKKNLDDILHTVPNIALDDVPIGTDESSNKEVLKSGEIKNFDFTPKAHYDLGENLKMLDFDLATKTTGSRFVFVKDKLAMLERAISNFMLDTHININGYKEISPPILANESTMFGTGQLPKFENDQFEIKFDEKSGRKFLIPTAEVILTNMVRDQILKLNELPIRLVSLTPCFRKEAGSYGKDTKGMIRQHQFYKVELVSIVEVNQCLDELERMTNSATMILDKLKLPYRKIVLSTGDMGFSAEKTYDIEVWIPSENKYREISSCSSCGSFQSRRMKARYKKSKK

SEQ ID NO: 185378 - protein, 317 aa, Unknown
  Bacterial polypetide isolated from the Sargasso Sea
MQSQIDSILSSIPNLPLSDVPIGQDENANVEIEKKGEIKEFDFEPKTHFELGENLNMLDFDLATKTTGSRFVFVKKQLAQLERALSNFMIDTHTQKNGYTEISPPLIATAETMYGTGQLPKFENDQFEIKLDADEGRKFLIPTAEVILTNIVKNQIINKDDLPIRVVASTPCFRKEAGSYGKDTKGMIRQHQFYKVELVSIVENDKCAEELERMSNAATMILDELKLPYRKIILCTGDMGFSAEKTYDIEVWLPSENRYREISSCSSCGSFQARRMKARYKDKNNSKEFLGTLNGSGLAVGRTMITIMENYQTQDGS

SEQ ID NO: 185379 - protein, 419 aa, Unknown
  Bacterial polypetide isolated from the Sargasso Sea
MHNIKDIRNDFENFINIIKNRNIDTDLKKILDLDKENRKLIQEKEKYEMEKKSISKTKDKTQFEKSKQISVKIEELTLKHKNVKDELDGILVSIPNLPLKDVPVGRDEESNKEVSKNGNIKDFNFKPKSHYELGEKLSMLDFDLATKTTGSRFVFVKDKLASLERAISNFMIDSHTKMNGYTEISPPLMATDDTMFGTGQLPKFENDQFEIKFDDKNDRKFLIPTAEVILTNMVKNQILNLNDLPMRLVASTPCFRKEAGSYGKDTKGMIRQHQFYKVELVSIVENNKCEEELERMTNCATKILDDLKLPYRKIILSTGDMGFSAEKTYDIEVWLPSEKKYREISSCSSCGMFQARRMKAKYKDHNNNNEFVGTLNGSGLAVGRTLIAILENYQTEDGSIIIPDVLRPYMGNIDIISVN

SEQ ID NO: 185380 - protein, 137 aa, Unknown
  Bacterial polypetide isolated from the Sargasso Sea
HCRKENCLEELERMTNCATDILEKLELPYRKVILCSGDMGFSAEKTYDIEVWLPSENKYREISSCSSCSTFQAQRMKTRYKNKNKETVFVGTLNGSGLAIGRTLIAVLENYQQKDGSIVVPKVLREYMNNLELISQK

SEQ ID NO: 185381 - protein, 422 aa, Unknown
  Bacterial polypetide isolated from the Sargasso Sea
MLDIKKIRDDGKQLDEALVSRKHEPSSSLIIELDKKNRDLIGELQVLQEERNAKSKLIGEHASNGKKDEAELLKSEVSSIKNKMQEIENNQRIAKEELNSLLESLPNMPDASVPVGDESVNKEIKIEGKKKEFSFSPKEHFDLGEDLNKMSFDQAAKISGARFVIQKGELARLERAIANFMLDLHTNEFEYEEINVPILVRDQAAFGTGQLPKFKDDLFKTTDDYWLIPTAEVPLTNMTRESVVDVAELPKRYVSHTPCFRSEAGAAGKDTRGIMRQHQFYKVELVSLASEENSADEHERMLSCAEEVLKRLGLHYRVVILSTQDMGFSAQKTYDIEVWLPGQNAYREISSCSNCGDFQARRMNSRYKENDTIKYLHTLNGSGLAVGRTLIAVMENYQNEDGSIDVPEVLISYMSGITKISN

SEQ ID NO: 185382 - protein, 271 aa, Unknown
  Bacterial polypetide isolated from the Sargasso Sea
ATKLSGSRFVVLKDKLALLERALINFMIDVHTKKFGYVEISPPLIVNEKIMFGTGQLPKFEKDQYEIFSEKDEERKFLIPTAEVPLSNLFNNSTIDQKKLPLRFVAGTPCFRREAGSYGKDTKGIMRQHQFYKVELVSLVEPSKCDAELNRMLNCAEEILKMLELPYQIVLLSSGDMGFSAEKTFDIETWIPSENKFREISSCSSCGTFQARRMKTKFKSGNSSDFIGTLNGSGLATGRLMIALMEYYQNSNGSITIPTPLKKYMDNIEKI

SEQ ID NO: 185383 - protein, 251 aa, Unknown
  Bacterial polypetide isolated from the Sargasso Sea
VASLHRALINYMLSKQVKNGYQEYNVPYICNSESLTGTGQLPKFEEDLFKLSNANLYLIPTAEVPLTNIYRDVTLPSEDLPIMMTAHTPCFRSEAGSYGLDTKGLIRQHQFEKIELVQLVHPDHSDEALDEITLHARSILDDLELPYQIVELCTGDLGFSSKKTYDLEVWFPSQKKYREVSSCSNFGDFQARRLNIKFKEHKQKNLVHTLNGSGLAVGRTLAALVENNFDGKKINIPNCLHKYLDFKTIEL

SEQ ID NO: 185384 - protein, 410 aa, Unknown
  Bacterial polypetide isolated from the Sargasso Sea
KSLSLRGKVFNISQIQELTLQKKEIDIEISSLQSESKKLSKLIGQEISKSKNNHSPEVNNLKKKGNEYRTKISEFEEKKRTLDKNIHNEICNLPNLPSKDAPIGKDESNNVQVKTWGDPLVTENLKSHWEIGESLNLFDSVKSTKISKSRFITLIGNGARLERALINFMLDMHTSNGYLELMPPALVNSESLTGSGQLPKFSNESFKCSNDDLWLSPTAEVPLTAFHRNDIIDSKQLPLKYVAYSPCFRREAGSYGRDTKGLIRLHQFNKVELYWFCDPNKSIEAHKKITIDAESILKKLNLPYRLIDICTGDLGFSSSRTFDLEVWLPSNKCYREISSCSNCLDFQARRSSIRAKIDKKNTYLHTLNGSGLAIGRTMAAILENGQQTDGSVKIPDALVPYFGSNILKTA

SEQ ID NO: 185385 - protein, 400 aa, Unknown
  Bacterial polypetide isolated from the Sargasso Sea
MKGSIGDIISLDENFRMIPYDLEQLRAKKNTVSEQVAIAKRNGEESAEKIKEMRDLGDEIKILETKSNKLKLDLASSLEQVPNLPHKSVPIGNDENDNVIVREWGEKKIFDFNEKTHLELSASLNLLDLERGAKISGSGFPIYVGKGAELERRLINCMIEHHVRDYNFTEIFPPVLMLEDSMKTTGQLPKFKEDMYLTDLDQLYLAPTAEVPITNIHRNEIIPESDLPINYVAYSPCFRRESGSYGKDTRGLLRLHQFNKVEMVKFVRPVNSYEALEELTLQAESILQKLGITYRVVELCTGDLSFAAAKCYDIEIWSPGEKKWLEVSSCSNFEDFQARRGKIRYRKDEDKKVDLLHTLNGSGLATPRLMVSLLETYQTKNSTIEFSDSAAEFIGIKEIS

SEQ ID NO: 185386 - protein, 392 aa, Unknown
  Bacterial polypetide isolated from the Sargasso Sea
MLRKKDIDIEISNLQSESKKLSKLIGQEIIKSKNSDSPELISLKKKGNEYRIKISELEEKQRIFDREVDDKIYNLPNFPSKDAPIGKDERDNLQIKTWGDPLIKENIKSHWEIGESLNIFDSVKSTKISKSRFITLIGNGARLERALINFMLDMHTKNGYLELMPPALVNSESLTGSGQLPKFSNESFKCSNDDLWLSPTAEVPLTAFHRNELIDPKQLPIKYVAYSPCFRREAGSYGRDTKGLIRLHQFNKVELYWFCDPSKSLEAHKKITSDAESILQMLNLPYRLVDICTGDLGFSSSRTFDLEVWLPSSKSYREISSCSNCLDFQARRSSIRSKIDKKNTYIHTLNGSGLAIGRTMAAILENGQQKDGSVKIPDALVPYFGSNFLKTA

SEQ ID NO: 185387 - protein, 425 aa, Unknown
  Bacterial polypetide isolated from the Sargasso Sea
MHDIKYIRENPELFDANLNKRGIDASSKEILLIDNERRKLQTLIQEKQKSRNEISKKIPEIKSKGQDASSLFDQVSLIKKEISEFEKNETQLSEKLNSYLLELPNLIDNDLPIGTEEQNKLIKTWGTIKKHDFTPKDHVALGENFSEIDFPSAAKLSGSRFVVLFGKIAKLERALKSFMIDRLTNSYGYTEVMPPVLVNEKTMTGTGQLPKFSEDLFKTIDNRWLIPTAEVPLTNLVSDMITPKKNLPMRFTAYTQCFRAEAGAAGRDTRGMIRNHQFSKVEMVSICDEDSSVDELDRMTGAAENILQSLELPYRVVLLASKDIGFSAKRTYDLEVWLPGQNDGQGCYREISSCSNCGSFQGRRMKARYKDENNNNKFVHTLNGSGLAVGRTIIAILENGQLSNGDIQLPKVLHEYMGADKISKG

SEQ ID NO: 185388 - protein, 358 aa, Unknown
  Bacterial polypetide isolated from the Sargasso Sea
MHNLKEIRKDFSKFEKDLEKRSVKIDFNNLKKLDELNRDLIQKKENLEKEKKDISKSKDESLFKKSKEISTELEKIAEQQKNTKTELDNILSSIPNIPHQDVPNGKDENDNVEVLKAGKVPEFDFKPKSHYELGENLGMLDFDLATKTTGSRFVFVKKELALLERALSNFMLDTHIVQNGYQEISPPLIASDNTMYGTGQLPKFENDQFEIKFDEGSDRKFLIPTAEVILTNIVKDKIVDQKDLPMRFVASTACFRKEAGSYGKDTKGMIRQHQFYKVEMVSIVEKENCLEELERMTNCATDILDKLELPYRKVILCSGDMGFSAEKTYDIEVWLPSENKYREISSCSSCSTFQAQRM

SEQ ID NO: 185389 - protein, 352 aa, Unknown
  Bacterial polypetide isolated from the Sargasso Sea
YNLKKKGNEYRTKISEFEEKKRTLDKNIQNEICNLPNLPSKDAPIGKDETHNVQVKTWGDPLVTANLKSHWEIGESLNIFDSARSTKISKSRFITLIGNGARLERALINFMLDMHINNGYLELMPPALVNSESLTGSGQLPKFSNESFKCSNDDLWLSPTAEVPLTAFHRNDIIDSKQLPLKYVAFSPCFRREAGSYGRDTKGLIRLHQFNKVELYWFCDPSKSIEAHKKITLDAESILKKLDLPYRIVDICTGDLGFSSSRTFDLEVWLPSSKCYREISSCSNCLDFQARRSSIRAKIDKKNTYLHTLNGSGLAIGRTMAAILENGQQTDGSVKIPDALVPYFGSNILKST

SEQ ID NO: 185390 - protein, 124 aa, Unknown
  Bacterial polypetide isolated from the Sargasso Sea
MTNCATMILDKLKLPYRKIILSTGDMGFSAEKTYDIEVWLPSENKYREISSCSSCGTFQARRMKARYKNSNNETEFVGTLNGSGLAVGRTLIAILENYQNSDGSITVPDALKPYMNNLEKISNN

SEQ ID NO: 185391 - protein, 288 aa, Unknown
  Bacterial polypetide isolated from the Sargasso Sea
KTHYELGIKSNMMDFESATQTFWFRLFFLKGRLAQLERAISNFMLDIHTKEFGYDEISPPLIASEETMFGTGQLPKFESDQFEIQIDENTKKYLIPTAEVILTNIVKMNTINLKNLPLRMVASTACFRKEAGSYGKDTKGMLRQHQFYKVELVSIVEPSNCNNELKRMISCAEEILKRLKLPFRSVLLSTGDMGFSAEKTVDLEVWIPSENKYREISSCSSCGQFQSRRMKAKFKDEKNKSDFLGTLNGSGLAVGRTLIAIMENYQNSDGTITIPELLRPYMNNLNKI

SEQ ID NO: 185392 - protein, 314 aa, Unknown
  Bacterial polypetide isolated from the Sargasso Sea
MIDINLLRADPEKVKDNLKIKNYDLDTGLFTEIDSKRKTIQTEVEDLKSQKNKLSKDFGELKKSNQDTSELSDQLDKIKGNLLEKEDLLNKILSDLNNFLLDIPNIPHQDVEEGSSEEDNKVIKSFGEVQKRDSIDHLEITTDIDTESAVKLAGTRFTVLKDDIAKLHRALISFMLDVAEKNGYKERYVPFMANSRSLTGTGQLPKFEEDLFKVTEDLFLIPTAEVPLTNIYADSILELDSLPIKITSHTPCFRSEAGSYGKDTKGLIRQHQFEKVEIVQVVHPDKSDTALESLLSNAEEILQLLELPYQVVQL

SEQ ID NO: 185393 - protein, 289 aa, Unknown
  Bacterial polypetide isolated from the Sargasso Sea
FDFNPKTHFELGENLGLMNFETASKLSGSRFVLLKNQLSKLERAITNFMLDKHTNENGYIEYNLPFLVKDSALFGTGQLPKFGEDLFTAGEDHWLIPTAEVPLTNMVREEILNQNQLPMRVTSYTPCFRSEAGAAGKDTRGMLRQHQFTKVELVSIVEPQHSQDELERMLESAESILQDLNIHYRIMTLCTGDMGFSASKTYDIEVWLPGENTYREISSCSNCNDFQARRMNTRYKLENKNIFVHTLNGSGLAVGRTLIAILENYQMKDGNIKIPEVLKKYFNNSDTLI

SEQ ID NO: 185394 - protein, 335 aa, Unknown
  Bacterial polypetide isolated from the Sargasso Sea
ILKDKEDELNNYLEKLNDFLMGIPNIPDDSVPTGSDENDNVVINKFGEISTKNDLDHLEITNEIDTELAAKLAGSRFAVLKGEIAKLQRALITFMIDNAIKNGYKEFYVPFMANVESLTGTGQLPKFEEDLFQSSDKLFLIPTAEVPLTNLFRDEFLNPKDLPIKVTSHTPCFRSEAGSYGKDTRGLIRQHQFEKIELVQVTSPENSMECLDNLLANACEILDLLELPYQVIELCTGDLGFSSCKTYDIEVWMPSQNKYREISSCSNFSDFQARRANIKIKDEGKNYFAHTINGSGLAVGRTLIALIENNFDGSDSIKIPKNLESYFGSNTIKIN

SEQ ID NO: 185395 - protein, 408 aa, Unknown
  Bacterial polypetide isolated from the Sargasso Sea
MHNLIYIRENPTEFDNFMKLRGEDNLSSKILELDKIKRETQTVLQNLLSDKNKLSKEIGILKAQKLDANAKIKKVEDLKSKIDNLKELEEIKDNELNSILSRLPNIPDKSVPFGKNENDNIKYREWGNKPEFNFKPKLHYEIGENLGLINFELAAKLSGSRFVVLKKQISKLERAISNYMLDKHTVENGYIEYTLPFLVKDNSLFGTGQLPKFGEDLFTAGEDHWLIPTAEVPLTNLVRNEILNINQLPIRTTSCTPCFRSEAGASGKDTRGMLRQHQFTKVELVSIVEPQYSDQELERMLECAESILKDLNIHYRIMTLCSGDMGFSAKKTYDIEVWLPGENTYREISSCSNCGDFQSRRMNTRYKTDGKNQYVHTLNGSGLAVGRTLIAILENYQMEDGNVKIPEV

SEQ ID NO: 185396 - protein, 342 aa, Unknown
  Bacterial polypetide isolated from the Sargasso Sea
KNQKIVKDKLDKILSTIPNIPLKDVPIGKDENDNKEIVKVGNIKEFSFKPKSHYEIGEKLNMLDFELATKTTGSRFVFVKDKLASLERAISNFMIDTHTKNNGYTEISPPLIATDNTMFGTGQLPKFENDQFEIKFDDKNDRKFLIPTAEVILTNMVKNQIVNIKSLPMRLVASTPCFRKEAGSYGKDTKGMIRQHQFYKVELVSIVQNDKCLDELERMTNCATRILEDLKLPYRKVILSSGDMGFSAEKTYDIEVWLPSEKKYREISSCSSCGTFQAKRMKARYKNKDNNIEFVGTLNGSGLAVGRTLIAILENYQTEEGSIIIPDVLKPYMGNIDKISIN

SEQ ID NO: 185397 - protein, 252 aa, Unknown
  Bacterial polypetide isolated from the Sargasso Sea
MLKKRFIDPKSNEIISLDKKKRDILTKSQELRAERKNLSSSFANLNDSDKADLQKKVQLIKNKIDELENDISIIDEQLKNNLSSLPNLPHKDVPVGKDEISNKLIKQVGKIPSFSFPPKSHYELGENLEMIDFEQAGKVSGTRFVYLKKKIAKLERAIANFMLDKHTNEFNYTEINPPNLVRDAAAYGTGQLPKFSEDLFKTNTNHWLIPTAEVPLTNLVLDTIVSDKNLPLRYTAWTPCYRSEAGAAGRDT

SEQ ID NO: 185398 - protein, 421 aa, Unknown
  Bacterial polypetide isolated from the Sargasso Sea
MISIKKLRNDKDSFKSKLALKNDNADLDLILSLDAKLRELKTASSEMRAERNSASDAIGKAKKAGDDASAAISTMRELGENIKEIESDLQDVSIQLDDLLYKIPNPPHDSSPKGKDESDNVEVRSWGSKPEFDFTPKTHTEIGESLELFDFIRSAKLSGSGFPLYTGQGAHLERSLINSMMSHHHNEYDFKEIFPPVLMKKKSMITTGQLPKFEEDMYHTEVDNLYLAPTAEVPVTNIHRDEIIDESELPINYVAYSPCFRRESGSYGKDTRGLLRVHQFNKVELVKFTSPESSYDELEALTHQAESILQKLGLCYRVVELCTGDLSFAAAKCYDIEIWAPGEGKWLEVSSCSNFESFQARRGNIRFRDSDNNVKFLHTLNGSGVATPRLMVALIETYQNQNGTIRFPEKVAEFLGIKEIK

SEQ ID NO: 185399 - protein, 419 aa, Unknown
  Bacterial polypetide isolated from the Sargasso Sea
MHNLKEIRKDFPGFEKALEKRSLKIDFKKLQKLDEENRNLIQKKEAIEKEKKDISKSKDETLFKKSKELTFELDKLTDSQKKIKTELDNLLSNIPNIPHEDVPNGKDENDNVEVLKTGNIRKFDFKPKSHYELGENLGMLDFDLATKTTGSRFVFVKNHLALLERALSNFMLDTHINKNGYQEISPPLIASDNTMYGTGQLPKFENDQFEIKFDEGSDRKFLIPTAEVILTNIVKDKIVDQSHLPMRFVASTPCFRKEAGSYGKDTKGMIRQHQFYKVELVSIVEKENCLEELERMTNCATDILDKLELPYRKVILCSGDMGFSAEKTYDIEVWLPSENKYREISSCSSCSTFQAQRMKTRYKNTNKETVFVGTLNGSGLAVGRTLIAILENYQQKDGSIVVPKVLREYMNNLELISQK

SEQ ID NO: 185400 - protein, 419 aa, Unknown
  Bacterial polypetide isolated from the Sargasso Sea
MHNIKDIRKDIDNFKNTIKNRNVDVDFEQILNLDEENRKLIQEKEKLEMEKKSISKSKDETLFEKSKEISNKIDDLSKNQKNVKDQLDQILSNIPNLPLNDVPVGKDENSNKEVVKSGEIKEMSFKPKSHYEIGEKLNMLDFDLATKTTGSRFVFVKDKLASLERAISNFMIDTHVNNNGYTEISPPLMATDNTMFGTGQLPKFENDQFEIKFDDKNDRKFLIPTAEVILTNMVKNQILNLKSLPMRLVASTPCFRKEAGSYGKDTKGMIRQHQFYKVELVSIVENNKCIEELERMTNCATKILDDLQLPYRKIILSTGDMGFSAEKTYDIEVWLPSENKYREISSCSSCGTFQAKRMKARYKNNNNENEFVGTLNGSGLAVGRTLIAILENYQTEDGSITIPEKLRPYMNNMEKIGIN

SEQ ID NO: 185401 - protein, 358 aa, Unknown
  Bacterial polypetide isolated from the Sargasso Sea
MISIEYLRNNYEEAKKSLSSKGAIDGLDEIISIDKDYRKILMTVNDLRADRNKTSDEIAELKKSGEDADDKIISMRRVSEKIKDIENELSTKKEKIDELLLNLPNIPHESVPEGINQDDNKIVSTWGEDPKKDFTLKTHIEIGKSLNLFDFERSAKISGSGFPLLIGKGALLERALINFMLDTQTVENNYIEIFPPFLVNSDSVLTTGNLPKFSEDMYHSEIDNLWLIPTAEVPITNIHKNEILSEDDLPKKYTAYSACFRREAGSYGKEAKGFLRLHQFNKVELVQFTHPKDSYKILEDLTFHAEMILQALNLKYRKVELCTGDLSFSAAKCYDLEIWAPTEKKWLEVSSCSNFEDF

SEQ ID NO: 185402 - protein, 423 aa, Unknown
  Bacterial polypetide isolated from the Sargasso Sea
MHDINKIRQEPDLFCDGLKKRGLEVDIEKILKIDSSLRESISEIQSFQERRNQISKDAGKAKSEGNESEFLKLNKESQEIKDSISKIEESKLETEKELKDILSSLPNIPSNDLPVGDDESFNVEIKKEGELINKKSPHHSEIGGELNELDFETAAELSGSRFVISSGKIAKLERALSNFMIDIHTSEHGYKEINIPYLVKEDSMFGTGQLPKFSEDQYKTDNDLWLIPTAEVPLTNLVRKKIISEEELPLRYTAFSQCFRKEAGAAGRDTRGMIRLHQFPKVELVSITKPEDSNDELERMLSCAEKILQLLELPYRVVLLATGDIGFSAHKTYDLEVWFPSEKKYREISSCSNCLDFQSRRMNAKYKSKNDKKNIFLHTLNGSGVAVGRALAAILENNYDETGHINIPKVLQPYMNGEKVLKI

SEQ ID NO: 185403 - protein, 311 aa, Unknown
  Bacterial polypetide isolated from the Sargasso Sea
MHNLKEIRKDFLKFKKDLEKRSVKIDFNNLKKLDELNRDLIQKKENLEKEKKEISKSKYESLFKKSKEISTELEKISEQQKNTKTELDNILSSIPNIPHQDVPSGKDENDNVEVLKAGTVPEFDFKPKSHYEIGENLGMLDFDLATKTTGSRFVFVKKELALLERALSNFMLDTHITQNGYQEISPPLIASDNTMYGTGQLPKFENDQFEIKFDEGTDRKFLIPTAEVILTNIVKDKIVDQKDLPMRLVASTPCFRKEAGSYGKDTKGMIRQHQFYKVEMVSIVEKENCLEELERMTNCAKDILDKLELPY

SEQ ID NO: 185404 - protein, 340 aa, Unknown
  Bacterial polypetide isolated from the Sargasso Sea
MHDIKKIRENPSDLDELLAKRKHPPVSNQIIELDEKNREIIGELQVIQEERNAKSKLIGEYAAKEKNDEAAKLKAEVTSLKDKMQELENSQREKQEELNTVLSSLPNNPADDVPVGDESLNKEIKLEGNKKEFTFTPKEHDELGENLNMMSFEQATKISGARFVVQSGLIARMERAISNFMLDLHTNEFGYTEMNVPILVKDQSVYGVGQLPKFKDDLFKTTDDYWLIPTAEVPLSNMTRESIIDILDLPKRYVSHTPCFRSEAGAAGKDTRGIMRQHQFYKVELVSLTSERKSKDEHERMLSCAEEVLKRLNLHYRVVILSSEDMGFAAQKTYDIEVWC

SEQ ID NO: 185405 - protein, 390 aa, Unknown
  Bacterial polypetide isolated from the Sargasso Sea
MLDIRKLRDNFEEVKVALKKRGFDIDQEKFQSLDKKRKVLQVDVENLQADKNKLSSEFGKLKSAGESTDSLKETIDKKTLELNEKDSELKIILDKIESFLLRIPNISDDSVPEGKNEEDNVVVSTHGSIDSSNTLDHLEITGLIDVDLAVKLAGARFSVLKGDLAKLQRALITFMLDNATSHGYEEYYLPFMANRNSLIGTGQLPKFEEDLFKTYDKLYLIPTAEVPLTNLFRNEFVNEDELPIKVTSHTPCFRSEAGSYGKDTRGLMRQHQFEKIELLQVTHPDNSMKCLDELLANACEILNKLELPYQVVELCTGDLGFSSCKTFDIEVWMPSQNRYREISSCSNFSDFQARRANIKFKNKEGTHFAHTINGSGLAVGRTLIALIENN

SEQ ID NO: 185406 - protein, 419 aa, Unknown
  Bacterial polypetide isolated from the Sargasso Sea
MLDIKKIIENKEIFSEGLSNRGYDISNLDILVELDTKRRNYISDGDDKRSTRNEISKKIGQEKRKPTSEESLFIKKLSGELKKVDEELAVINEKIKEIMLNIPNLPDKNVPIGEDENSNIEKDVIGVQRDENYIKPHWDIGPEKDILDLEAGANISGARFFVFKGKGARLHRALMNWMMDVHTDEFGYEEIDPPYLVKQETMIGSGNLPKFKDNLYRDDETDLWLIPTAEVSLNGLHQGKIITPASLPKSYVARTPSFRKEHTSAGRDIRGIKRVHQFYKVEMFKYVHPDDSEEHLESMIDNARTLCDRLELSSKLIQLSTGDIGFQSAITFDIEVWAAGSKEWLEVSSISNCYDFQSRRNNTRYKETQASSTIFPHTLNGSGLALPRIWVAIIENGQQEDGSIKIPEVLIPYTGFESI

SEQ ID NO: 185407 - protein, 275 aa, Unknown
  Bacterial polypetide isolated from the Sargasso Sea
MPQRLQDQDFVFVKNKLAKLERALSNFMIDVHTKENGYEEISPPLLANFDTMFGTGQLPKFESDQFEIKIDDNNRKFLIPTAEVILTNMAREKTIDIKELPSRYVASTPCFRKEAGSYGKDTKGMIRQHQFYKVELVSLVEPQKCEEELERMTKCASGILDKLKLPYRIVELCTGDMGFSAQKTYDIEVWVPSEKKYREISSCSTCGTFQARRMKAKYKNSKNEKNFIGTLNGSGLAIGRTMIAIMENYQDKDGSIIIPDVLKPYMDNIDKITSN

SEQ ID NO: 185408 - protein, 244 aa, Unknown
  Bacterial polypetide isolated from the Sargasso Sea
MLDVQTEENGYTEMYVPNIVRSDCLEGTGQLPKFAEDQYKIENEEGLYLIPTAEVPLTNLIRESILEENELPIKMTAHTPCFRQEAGSYGKDTKGMIRQHQFEKVELVHIVKPDESYEALEELTKNAESILQKLKLPYRLMLLCSGDTGFSAAKTYDLEVWLPSQETYREISSCSNCESFQSRRMKARYKNSKSKQTDYPHTLNGSGLAIGRTLIAVLENYQNEDGSITIPDVLRPYMQNRERI

SEQ ID NO: 185409 - protein, 373 aa, Unknown
  Bacterial polypetide isolated from the Sargasso Sea
MIDANYIKANLEQVKKNLAKKGFNLEQSKFEKLYSNRKGLITKHESLLSEKNIISKDIGLLKSNNKDASSLLLKVESINKEIDKISKSETKAEKDLHDYLLSIPNLLDDSVPEGKSEDSNKIIYETKLQKNSLSIDHLDIINNIKLSFNHDVTSISGSRFSLLFKDIAKLHRVLGQYMINYHVENNNYLEVYVPLIVSEKSLIGTGQLPKFKDDLFEIKNKENSFLIPTAEVPLTNICNNQIIDLNTLPLKFVSLTPCFRSEAGSYGKDTKGLIRQHQFDKVELVQIAEPSQSNDALNNLVSDAEKILINLSLPYRKVLLCSGDTSFSSSITYDLEVWLPSQSKYREISSCSNFLSFQSRRLNIRYRNEKKKE

SEQ ID NO: 185410 - protein, 433 aa, Unknown
  Bacterial polypetide isolated from the Sargasso Sea
MLDIQLLRKDLDGVAQRLADRGYTLDIAAFSALEAERRAIQTRTEELQARRNSLSKQIGAMKGKGEDTSAVMAEVGGIGDEMKAGEAKLGEIQARLSDLMLGMPNVAHESVPVGKDEADNVEVRRWGTPRQFDFEVKDHVDVGTPLGLDFETGAKLAGARFTMLRGSIARLHRALAQFMIDTHTLQHGYTEAYTPYIVNPEILYGTGQLPKFADDMFRVEKGGEENKVTQYLISTSEISLTNTVRESIVDASALPIKLTAHSPCFRSEAGSYGRDTRGMIRQHQFDKVEMVQVVAPETSYAALDEMVGHAEAILQKLGLPYRVITLCTGDMGFSAAKTFDLEVWLPAQNTYREISSCSNTEAFQARRMQARFRNAQGKPELVHTLNGSGLAVGRTLVAVLENYQNADGSVTVPEVLRPYMGGIERIDAPAQAS

SEQ ID NO: 185411 - protein, 415 aa, Unknown
  Bacterial polypetide isolated from the Sargasso Sea
MIDPKILKENIQSCKDNLAKRGYSLDDKKFLLLENQRKDLQTRVEDLQSQKNKLSKNFGELKKSGQSTDVLALELEEIKSQTTDLEKTLSALQIEISSFLMDIPNLISEDTPTGTSEDDNKLIEEYLKPQVLKSDSHLDITDQISLELGNKLSGSRFSVLKGNVAKLHRSLCTYMINEAINNGYEETYVPYIVNYDALEGTGQLPKFEEDLFKLSNDQYLIPTAEVPLTNLFRDQIVDQDLLPIKLTAHTPCFRSEAGSYGKDTNGLIRLHQFDKVEIVQIVKPQDSDKALGEITSHAKSVLEKLELPYRVVQLCSGDVGFSASKTFDIEVWMPSQEKYREISSCSNFLDFQARRSKIRFKENGKNHFVHTLNGSALAVGRTLIAVIENNFNKKLKLINIPKELQNLMDADIIEL

SEQ ID NO: 185412 - protein, 186 aa, Unknown
  Bacterial polypetide isolated from the Sargasso Sea
NMFRDRILDDKELPIKVTAHTSCFRSEAGSYGKDTRGLIRQHQLEKIELVQITHPTNSMDCLNDLLKNACQILDKLELPYQVIELCTGDLGFSSAKTFDIEVWMPSQNKYREISSCSNFSDFQARRANIKFKDKKGNTYAHTINGSGLAVGRTLIALLENRFNGNDEIDLPECLVSYFGAKKVKLK

SEQ ID NO: 185413 - protein, 419 aa, Unknown
  Bacterial polypetide isolated from the Sargasso Sea
MIDLNELKENLALYKKGLSAKGCKVDLEDLINKNSKKNTIQTKLDELKSQKNNLSKEIGTLASKGEDTKKLKNDSENLNKDIDQLQNDFDLLKTDIDTIMLQVPNLPDSDVPIGGDESDNKEINKKIFTQHNDGLDHVEIGEKLGLLDFDLANKLSGSRFVVLKGKLAQLHRALIQFMLDEAKDNGYEEMYVPYIVNADSLIGTGQLPKFEDDQFKVGESKYLIPTAEVPLTNLLRDQVITSSELPINLTAHTPCFRAEAGSYGKDTKGMIRQHQFEKVEIVKFADPKKSDKCLDELVSHASQILDKLELSYRHVVLCTGDLGFSAAKTIDIEVWLPSQNCFREISSCSNFRDFQARRINAKVKDGKDKFYPHTLNGSALAVGRTLLAIIENFYENGLGVHIPKVLADYLDFDLIEEQK

SEQ ID NO: 185414 - protein, 422 aa, Unknown
  Bacterial polypetide isolated from the Sargasso Sea
MISIEQIRNNSIYIKERLSLKGEIDSIDSILSLDKSYRSHISKSNELRAKRNQVSDKIAEAKKSGKNADSDIKDMREVGDKIKSLEDKGSKIKNELNELLLRLPNLPHESVPKGKDSAENQVVREYGQNLDQDFELKSHLELGKKLNLFDFDKASKISGSGFPLYTGEGAKLERALINYMLDFQTKNHDYTEIFPPFMVRSQSPLTTGNLPKFSEDMYFVENDNLWMIPTAEVPITNMHQDEILLEDQLPIKYAAYSACFRREAGSHGKETKGLLRLHQFNKVELVQFVKPKESYKILEELTKHAESILQDLGLRYRVVELCAGDLSFSAAKCYDLEVWAPGEQQWLEVSSCSNFESFQARRGNIRYRKANDNSVEFVHTLNGSGLATPRLMVAILETYQNSDGSISIPKPLKDYVGVEVFN

SEQ ID NO: 185415 - protein, 302 aa, Unknown
  Bacterial polypetide isolated from the Sargasso Sea
FGNLPKFDFKPKSLTELGNNLNMLDFDLATKTTGSRFVFVKDKLALLERALSNFMLDIHTKINGYKEISPPLIASDNTMFGTGQLPKFENDQFEIKFDDNGRKFLIPTAEVILTNMVKNQILSVNDLPIRLVASTPCFRKEAGSYGKDTKGMIRQHQFYKVELVSIVENDKCIEELERMTKSAVMILDKLNLPYRKIILSTGDMGFSAEKTYDIEVWIPSENKYREISSCSSCGTFQARRMKARYKNSNKETVPVGTLNGSGLAIGRTLIAIMENYQQSDGSILIPKALKPYMDNQDKITKN

SEQ ID NO: 185416 - protein, 415 aa, Unknown
  Bacterial polypetide isolated from the Sargasso Sea
PITLLIIERFVLEKLVNKNYNLDFTKFSDLYMSRKESIQKEEDLKAKLNDFNKKITKEKRKPNKDELSEIKKFSNQSKDAEKARKDIELKLNELLLEIPNLHDDSVPIGEDESFNKEITRKGKIRDFDFKILDHVTLGTNLQLFDLEVAAKITGTRFNLYKGLGAKLERALINFMLDEHSKSNYIEIFPPFICNKQSFVGTGNLPKFEEDLFKISGTENYLIPTAEVPLTNIHSNQIINASDFPIKYVAYSACFRSEAGSYGKDVKGLIRQHQFNKIELVKITDEFSSSDELEKLTEDACSILDKLELPYRVVALSSGDMSFSSAKTYDIEVWIPSENKYREISSCSNFGSFQSRRSNIKYKVGNKFSFAHTLNGSGLAVGRTFVSILENFQNSDGTITIPKVLRPYLNNLHTIS

SEQ ID NO: 185417 - protein, 418 aa, Unknown
  Bacterial polypetide isolated from the Sargasso Sea
MLDINLIINHSSDIKNKLLSRGYELSLNKLEDLYFRRKDIIKKKEDLAANKNQISDQFKTCKDESEREKLRTSSENLENEIQLNKDQLLEIENNLKNILLEIPNIPLDDVPKGKDFSDNQIIKKWGEPSKEIVNDHSELFESNKLLDFELSVKVSKSRFSVLKGKLARLSRSLISYCLNHHIEINGYTEYYTPYIVNKNSLIGTGQLPKFEEDLFKIHGEELYLIPTAEVPLTNLYRDTIIDQNSLPLKLVSHTPCFRSEAGSYGKDTRGIIRQHQFEKVEVVQIVEPEHSLNALEEITSHAEQLLENLEVPYQRVCLSTGDLGFSASKTYDIEAWFPGEQTYREVSSCSLFGDFQSRRANIKFKSSDKKKYYPHTLNGSALAIGRTLAALIENHTKDNIIHIPDALRVYTGFDSIKL

SEQ ID NO: 185418 - protein, 210 aa, Unknown
  Bacterial polypetide isolated from the Sargasso Sea
FSEDMYHSEIDDLWLIPTAEVPLTNIHYNEILNESDLPIKYTAFSACFRREAGSYGKDTKGFQRLHQFNKVELVQLVKPDESYKVLESLTSHAEMILKALNLKYRKIELCSGDLSFSAAKCYDLEIWAPAERKWLEVSSCSNFEDFQSRRGNIRYRKEVDNKVDFVHTLNGSGLATPRLLIAILETYQNANGTITVPEPLQDYTKLKIID

SEQ ID NO: 185419 - protein, 285 aa, Unknown
  Bacterial polypetide isolated from the Sargasso Sea
MHDIKSIRNNPKKFDQTLKDRNLKPVSEKVLKLDAEIRKFKTKLQEVQENRNLKSRKIGLLIKENKDPISLQNEVKELKNKLTLLEENIRNAELDLNKILMSLPNILDEDVPIGFSEDENKLVKKWGKIKNFGFIPQDHVKLGERNNEMDFKTGAKLSGSRFVLMRNDLALLERSLITFMLDTNIKEFGHQEISPPYLVNSAALTGTGQLPKFSEDLFETNDGKWLIPTSEVPLTNIVSNEILKEQDLPFNFVSYSPCFRSEAGAAGKDTRGMIRQHQFSKVEMV

SEQ ID NO: 185420 - protein, 293 aa, Unknown
  Bacterial polypetide isolated from the Sargasso Sea
IKKFLAVGEIIKFKFKPKSHYELGENLKMLDFDLATKTTGSRFVFVKGKLAMLERAIANFMLDTHTKVNGYNEISPPLMASENTMFGTGQLPKFETDQFELKLDESNDRKFLIPTAEVILTNMVNDQILNYKDLPLRLVAATPCFRKEAGSYGKDTKGMIRQHQFYKVELVSIVDPNECLNELERMTNCATKILDDLKLPYRKIVLSTGDMGFSAEKTYDIEVWLPSENKYREISSCSSCGSFQARRMKARFKNNKNETNYLGTLNGSGLAVGRTLIAILENYQQEDGSIKIP

SEQ ID NO: 185421 - protein, 398 aa, Unknown
  Bacterial polypetide isolated from the Sargasso Sea
SVKIDFANLKKLDELNRDLIQKKENLEKEKKDISKSKDESLFKKSKEISTDLEKISEQQKKTKTELDNILSSIPNIPHQDVPNGKDENDNVEVLKAGKVPEFDFKPKSHYELGENLGMLDFDLATKTTGSRFVFVKKELALLERALSNFMLDTHIIQNGYQEISPPLIASDNTMYGTGQLPKFENDQFEIKFDQGSDRKFLIPTAEVILTNIVKDKIVDQKELPMRFVASTPCFRKEAGSYGKDTKGMIRQHQFYKVELVSIVEKENCLDELERMTNCATDILDKLELPYRKIILCSGDMGFSAEKTYDIEVWLPSENKYREISSCSSCSTFQAQRMKSRYKNKNKETVFVGTLNGSGLAVGRTLIAVLENYQQKDGSIIIPKVLRPYMNNLKSISAK

SEQ ID NO: 185422 - protein, 212 aa, Unknown
  Bacterial polypetide isolated from the Sargasso Sea
FEDDQFEIKFEKSEQRKFLIPTAEVSLTNLIRKSLIKKEDLPQRFVASTPCFRKEAGSYGKDTKGMIRQHQFYKVELVSIVEPKNCNSELDRMLNCATSILKKLSIPFQTILLSTGDMGFSAEKTLDIEVWIPSENKFREISSCSSCGSFQARRMSAKYTTEKGNEFVGTLNGSGLAVGRLIVALLENNQNEDGSVTIPNVLKKYMNNLDKI

SEQ ID NO: 185423 - protein, 422 aa, Unknown
  Bacterial polypetide isolated from the Sargasso Sea
MLSLNRIRKNPDDIKTGVQSKNESIHLDEILKTDTHYREKVHELDELRAKRNKSSDAIAQAKRDGVNSDKAIAEMRAVSDTIKSIEKEVNDIKNLLDTKLELIPNIPHSNVPVGKDESSNVIIREWGEPKNVEYKLKSHVDLGTSLELFDLERGSKISGSGFPLLTGLGSKLERALINFMLDFHVSEHGYKEIFPPFLTRPNSPYTCGQLPKFSDDMYYIEKDELYLIPTAEVPLTNLFADEIIDENNLPKKYAAYSACFRREAGSYGKDTRGLLRLHQFNKVEMVKFVKPDSSYDELEMLTKQAEAILQQLGLHYRVVELCTGDLSFAAAKCYDLEVWAPGEGKWLEVSSCSNFEDFQARRGNIRYRRSEDKKVDYVHTLNGSGLATPRLMVALLESYQTSDGKIALPKVLHKPMGMEVLD

SEQ ID NO: 185424 - protein, 424 aa, Unknown
  Bacterial polypetide isolated from the Sargasso Sea
MLDSKKLNKDPQAVADNLQKRGYILDIDNWDNLESSRKDLQSDTENMQAELNDLSKQIGIYKKDGKDSSKLEKQATEVTSKIKSQSKKLNTILEDMNNFISSIPNMIDDDVPEGQNEEDNVEIRTVGKIRDFAFAPKDHLELGSALGGIDMESGVKITGARFTVLNGQLAKLQRSLINFMLDIHTKEHQYQEVYVPYVVNSESLFGTGQLPKFEEDLFKLNGKEDFYLTSTAEVPVTNLFRNEILDSKSLPIKYVCHTPCFRSEAGSYGLDTKGIMRLHQFEKVELVQAVEAQDSENALEELTRHAEEILKRLELPYRVVSLCSGDIGFSAAKTYDIEVWIPSQNKYREISSCSNFRDFQARRMKARWKDPSTKKNQYLNTLNGSGLALSRTLLALLENFQEKDGSIIIPDALRNYFGADIINL

SEQ ID NO: 185425 - protein, 316 aa, Unknown
  Bacterial polypetide isolated from the Sargasso Sea
NGKDENDNVEVLKAGKVPEFDFKPKSHYELGENLGMLDFDLATKTTGSRFVFVKKELALLERALSNFMLDTHIVQNGYQEISPPLIASDNSMYGTGQLPKFENDQFEIKFDEGSDRKFLIPTAEVILTNIVKDKIVDQKELPMRFVASTPCFRKEAGSYGKDTKGMIRQHQFYKVEMVSIVEKENCLDELERMTNCATDILDKLELPYRKVILCSGDMGFSAEKTYDIEVWLPSENKYREISSCSSCSTFQAQRMKSRYKNKNKETAFVGTLNGSGLAVGRTLIAVLENYQQKDGSIIIPKVLRPYMNNLELISVK

SEQ ID NO: 185426 - protein, 387 aa, Unknown
  Bacterial polypetide isolated from the Sargasso Sea
LDVENRELILKKETLEKEKKEISKSKDKSLFEKSKEISSEIDEITKKQKLVKENLDNILSNLPNVPHPDVPIGKDENDNIEIGKFGKIPNFEFEPKSHYEIGENLKMLDFDLATKTTGARFVFVKNRLALLERALSNFMLDTHILKNGYLEISPPLLASDNTMYGTGQLPKFENDQFEVKLEKGSDRKFLIPTAEVILTNIVKDKIVENSSLPMRFVASTPCFRKEAGSYGKDTKGMIRQHQFYKVELVSIVEQEKCHEELERMTTCATGILDLLELPYRKMILCSGDMGFSAEKTYDIEVWLPSENKYREISSCSSCSTFQAVRMKSRYKNSKKETLYVGTLNGSGLAIGRTLIAILENYQQKDGSVTVPKVLRPYMNNLEKISLN

SEQ ID NO: 185427 - protein, 178 aa, Unknown
  Bacterial polypetide isolated from the Sargasso Sea
SSKDLPIKVTSHTPCFRSESGSYGKDTRGLIRQHQFEKIELVQITSPENSMECLDNLLANACEILDLLELPYQVIELCTGDLGFSSCKTYDIEVWMPSQNKYREISSCSNFSDFQARRANIKIKDEGKNYFAHTINGSGLAVGRTLIALIENNFDGSDSIKIPKNLESYFGSNTIKIN

SEQ ID NO: 185428 - protein, 154 aa, Unknown
  Bacterial polypetide isolated from the Sargasso Sea
KDTKGMIRQHQFEKVELVHIVKPDESYEALEELTKNAESILQKLKLPYRLMLLCSGDTGFSAAKTYDLEVWLPSQETYREISSCSNCESFQSRRMKARYKNSKSKQTDYPHTLNGSGLAIGRTLIAVLENYQNEDGSVTIPDVLRPYMQNRERI

SEQ ID NO: 185429 - protein, 304 aa, Unknown
  Bacterial polypetide isolated from the Sargasso Sea
MLDSKTLRKETKKVSLSLKKRASDFDLDSYLKMDQKMRDLISTVEELRSSKNNINKSIASPEISENDKSDLISEVGTINKKLKESEQSLNELSEQTKKMSLEIPNILDESVPEGSSEKENVEVRSWGKLPKFDFEPKDHSELGESKGGIDFESAAKLSGSRFVVMKDGYAKLHRALKQFMLDVQTEENGYTEMYVPNIVRSDCLEGTGQLPKFADDQYKIENEEALYLIPTAEVPLTNLIRESILDQSELPIKMTAHTPCFRQEAGSYGKDTKGMIRQHQFEKVELVHIVKPEESYEALEELTK

SEQ ID NO: 185430 - protein, 64 aa, Unknown
  Bacterial polypetide isolated from the Sargasso Sea
SAPPAARFKNAQGKNELLHTLNGSGLAVGRTLVAVLENYQQADGSVTVPEVLRPYLGGTAVLKP

SEQ ID NO: 185431 - protein, 383 aa, Unknown
  Bacterial polypetide isolated from the Sargasso Sea
MHNIKDIRKDFENFKERLKNRNIDISLDNILSLDKENRKLIQEKEKFEMEKKSISKSKDQSLFEKSKELSLKIEEINKNQIKLQSQITYILSSIPNIPLSDVPVGQDENSNKEIEKKGEIKEFNFKPKSHYELGDKLNMLDFDLATKTTGSRFVFVKKELAQLERAISNFMIDTHTQKNGYTEISPPLIATAETMFGTGQLPKFENDQFEIKLDEGDGRKFLIPTAEVILTNIVKNQILEKNELPIRVVASTPCFRKEAGSYGKDTKGMIRQHQFYKVELVSIVENDKCSEELERMSNSATMILDALELPYRKIVLCTGDMGFSAEKTYDIEVWLPSENKYREISSCSSCGSFQARRMKARYKGQNNSKEFVGTLNGSGLAVG

SEQ ID NO: 185432 - protein, 128 aa, Unknown
  Bacterial polypetide isolated from the Sargasso Sea
MKCLDILLSNACEILDLLDLPYQVVELCTGDLGFSSAKTFDIEVWMPSQNKYREISSCSNFTDFQARRANIKYKSESGNSYVHTINGSGLAVGRCLIALIENNFDGSNSVKIPKCLQEYFGSDSLKVN

SEQ ID NO: 185433 - protein, 301 aa, Unknown
  Bacterial polypetide isolated from the Sargasso Sea
MHNLKEIRKDYSKFEKDLEKRSVKIDFNNLKKLDELNRDLIQKKENLEKEKKDISKSKDESLFKKSKEISTELEKISEQQKNTKTDLDNILSSIPNIPHQDVPNGKDENDNLEVLKAGKVPEFDFKPKSHYELGENLGMLDFDLATKTTGSRFVFVKKELALLERALSNFMLDTHIVQNGYQEISPPLIASDNTMYGTGQLPKFENDQFEIKFDQGSDRKFLIPTAEVILTNIVKDRIVDQKDLPMRFVASTPCFRKEAGSYGKDTKGMIRQHQFYKVEMVSIVEKENCLEELERMTNCAT

SEQ ID NO: 185434 - protein, 119 aa, Unknown
  Bacterial polypetide isolated from the Sargasso Sea
LNCAEEILKLLDLPYQVTLLSTGDMGFSAEKTYDVEVWMPFEKKYREISSCSSCGTFQSRRMSAKYKTQKGVELLGTLNGSGLAVGRLLIALIENNQNNDGSINIPDVLKKYMNNITKI

SEQ ID NO: 185435 - protein, 224 aa, Unknown
  Bacterial polypetide isolated from the Sargasso Sea
YGTGQLPKFENDQFEIKLDADEGRKFLIPTAEVILTNIVKNQILNKDDLPIRVVASTPCFRKEAGSYGKDTKGMIRQHQFYKVELVSIVESDKCSDELERMTNSATMILDYLKLPYRKIILCTGDMGFSAEKTYDIEVWLPSENRYREISSCSSCGSFQARRMKARYKDKNNAKEFLGTLNGSGLAVGRTMIAIMENYQTKDGSILIPEVLKPYMPNIDKISVN

SEQ ID NO: 185436 - protein, 82 aa, Unknown
  Bacterial polypetide isolated from the Sargasso Sea
PSQNKYREISSCSNFTDFQARRANIKYKSESGNNYVHTINGSGLAVGRCLIALIENNFDGSNSVKIPKSLQEYFGSDTLKVS

SEQ ID NO: 185437 - protein, 359 aa, Unknown
  Bacterial polypetide isolated from the Sargasso Sea
DVSAILTDMEDLKSSLDKKKNELGEIQSKLHEYLLNVPNIPNEEVPPGKDESDNQVINTWGSLPKYDFDVKDHSELGEKLEQGLDFAAAVTLSGSRFVVLEGRLAKLHRALSQFMLDVHTEEHGYLEFNLPLIVNYESLLGTGQLPKFEDDLFKVNHEGNFYLIPTAEVPLTNLVRGKILEADALPLKYTAHTPCFRSEAGSYGKDTKGMIRQHQFEKVELVQVVKPESSDNALNELTGHAESILRKLGLPYRKVLLCGGDLGFGASKTYDLEVWLPSQNTYREISSCSSFTDFQARRMQASGRSPTMQKPQFVHTINGSGMAIGRALVAVMENYQDETGRIQIPSILRPYMGNAEFLE

SEQ ID NO: 185438 - protein, 370 aa, Unknown
  Bacterial polypetide isolated from the Sargasso Sea
MLDPKCLRSDIEQTAKRLAARGFNLDVAAFSSLEEKRKTLQSRTQDLQNERNVRSKSIGKAKAQGEDIAPLLAEVGKLGDELDAAKAELSELLEEINTLTQGIPNLPHESVPAGKDEDDNVEISRWGEPRTFDFEVKDHVDVAEGLNNGLDFATASKLTGSRFVVMRGDIARLNRAIAQFMLDTHTQEHGYQEMYVPYLVNADSLYGTGQLPKFGEDLFHTKPATEEGQGLSLIPTAEVPLTNIARDEILDAKSLPVKMTAHTPCFRSEAGSYGRDTRGLIRQHQFDKVELVQLVKPEESFDALEALTGHAEVILQKLELPYRKVLLCTGDMGFGACKTYDLEVWLPAQNTYREISSCSNMLDFQARRMQ

SEQ ID NO: 185439 - protein, 418 aa, Unknown
  Bacterial polypetide isolated from the Sargasso Sea
MIDPQLLKTNIEAIEENIRKRDLDIDLDKLKLLDESRRTLKFESEKLRAEQKILGKEIASASEKEKAILLEKAEKISNKVKSLSEETQQKDEEFFDAWIKIPNIVNSSSPVGKTDEDNKEIKKVGEPRNIKNPMTHLEIGENLGLIDVERASKISGSRFSYLFGDLVKIQFNLVSYTLNKLSEKGFNPTIPPVLVRENALFGTGFFPDDSDQVYEVQNDDLYLVGTSEVSLAALHTDEIIDIKNLPLRYAGYSTCFRREAGTYGKDTSGIFRVHQFDKVEMFSFCDPEKSNEEHEYILATEEEILQDLEIPYRVVDVCTGDLGASAAKKYDIEAWIPSQQKYREVTSCSNTTDFQARRLNMRTKIEDGNTILHTLNGTALAVGRILIALLENNQQLDGSVMFSDDLGQILGINKLSKE

SEQ ID NO: 185440 - protein, 102 aa, Unknown
  Bacterial polypetide isolated from the Sargasso Sea
LCTGDLGFSSCITFDIEVWMPSQNRYREISSCSNFSDFQARRANIKFKNKEGTHFAHTINGSGLAVGRTLIALIENNYNGTDSIKIPSCLQEYFGSDTLKTS

SEQ ID NO: 185441 - protein, 421 aa, Unknown
  Bacterial polypetide isolated from the Sargasso Sea
MLDIKKIRNNKDDVLKALSKKDNDISLNDILNLDSKLKSLTTKLNELQAEQNSKSKEVGQLKSKGESSDDIFKDLKVLSEKIKVFDKEQKELSSALKKALLEIPNIPHSSCPEGVNEKDNIVVSENKNTRDFNFPLKNHIELGKKLDILDFEVAAKMSGSGFPLYKGNGALLERALINFMTDYHLKNFDYTEFFTPFLVKPESALTTGQLPKFSEDMYHIEKDDLYLIPTAEVSLTNIHKDDILSSNELPKYYLGYSACFRREAGSYGKDTRGLLRVHQFNKVELVKFVEPTKSYEELDSLVNQASNILDLLELDYRVIELCSGDLSFAAAKCFDLEVWSPGEEKWLEVSSCSNFEDFQSRRGNIRFKNSNGEIDFVHTLNGSGLATPRIFAALLETHQNEDGSVRIPQCLQPFMGISEIK

SEQ ID NO: 185442 - protein, 225 aa, Unknown
  Bacterial polypetide isolated from the Sargasso Sea
ILVKDQSVYGVGQLPKFKDDLFKTTDDYWLIPTAEVPLSNMTRESIIDILDLPKRYVSHTPCFRSEAGAAGKDTRGIMRQHQFYKVELVSLTSESQSKDEHERMLSCAEEVLKRLNLHYRVVILSSEDMGFAAQKTYDIEVWLPGQKAYREISSCSNCGDFQARRMNSRYKEGKETKFLHTLNGSGLAVGRTLISILENYQNEDGTIQVPDALIPYMGGINQISN

SEQ ID NO: 185443 - protein, 422 aa, Unknown
  Bacterial polypetide isolated from the Sargasso Sea
MLQVDFIKENFSKVIDSLKKRNKDYSSDLKKIIDFNENRKKQQTKLDALLSEVNNLSKQIGELFKNGKVEEANELKKSVEKIKPEVKLLQDLLNSNNEDLQELLCSIPNIPNELVKKGTSEEDNEIIFESTFKISDEKLNEHWDICEEYNIVDFELGNKVTGSGFPVYKGKGAALQRALINYFLDKNTSSGYTEVQPPVLVNEDSAFATGQLPDKEGQMYHISNDNLYLIPTAEVPITNFYRDSIINSSDLPIKLTGYTPCFRREAGSYGKDVRGLNRLHQFDKVEIVRIEKPEDSYKVLDEMVEHVKNILEELELPFRILRLCGGDLGFTSALTYDFEVYSKGQKKWLEVSSVSNFETYQSNRLKLRLRINEKEKKLAHTLNGSALALPRIVAAIIENNNSPEGIKIPKILHKYTGFKFIS

SEQ ID NO: 185444 - protein, 247 aa, Unknown
  Bacterial polypetide isolated from the Sargasso Sea
ALIRFMLDEAASNGYEEYYVPYIVNSESLIGTGQLPKFEDDQFSVDEGKYLIPTAEVPLTNVFRNEAISVDDIPIKMTAHTPCFRAEAGSYGKDTRGMIRQHQFEKIELVKFVHPNESEKALDELVSHASKILDKLELSYRKVVLCTGDLGFSAAKTIDLEVWLPSQKCFREISSCSNFRDFQTRRMSTKITDGSTKTYPHTLNGSALAVGRTLLAILENYFENGVGVHIPKVLSAYLTFDLIEIKK

SEQ ID NO: 185445 - protein, 246 aa, Unknown
  Bacterial polypetide isolated from the Sargasso Sea
MIDINLLRTDPEKVKNNLKTKNYDLDTELFGEIESKRKTLQTEVEDLKGLKNKLSKDFGELKKNNQDTAELSNQLEEIKENLHKKEELLDKTFIDLNDFLLDIPNIPHEDVQPGNSEEDNKVIKTHGEVLKRDSIDHLEIASDIDTESAVKLVGARFTVLKNDIAKLHRALISFMLDVAEKNGYEERYVPYIANSQSLTGTGQLPKFEEDLFKVSEDLFLIPTAEVPLTNLFADSILQDDELPIKV

SEQ ID NO: 185446 - protein, 376 aa, Unknown
  Bacterial polypetide isolated from the Sargasso Sea
KEKFEMEKKSISKSKDQSLFKKSKELSLKIEEINKNQIKLQSQITDILSSIPNIPLSDVPIGQDENSNKEIEKKGEIKDFNFKPKSHYELGEKLNMLDFDLATKTTGSRFVFVKNELAQLERAISNFMIDTHTQKNGYTEISPPLIASAETMFGTGQLPKFENDQFEIKLDEGEDRKFLIPTAEVILTNIVKNRILEKKELPIRVVASTPCFRKEAGSYGKDTKGMIRQHQFYKVELVSIVENDKCIEELERMSNSATMILDALKLPYRKIVLCTGDMGFSAEKTYDIEVWLPSENKYREISSCSSCGSFQARRMKARYKGQNNSKEFVGTLNGSGLAVGRTMIAIMENYQTEDGSILIPEVLKPYMPNIDKISIN

SEQ ID NO: 185447 - protein, 424 aa, Unknown
  Bacterial polypetide isolated from the Sargasso Sea
MLSIDYITNSKDDAIIGLKKRGFKNLDVLDSIIELNNNRKKIQQELDNILFKSNTISKDIAEAFKSGNNDIDIDSLKSESSNLKLKSKSLTEELDAVKIKISDLITSVPNIPDSKVPDGLSEKNNIEVFRSSNFKESGYNLKNHWDLSKEYDIIDFELGSKITGSGFPVYKDRGAKLQRALINFFLDRNSSAGYNEFQVPHLVNSDSAYATGQLPDKDGQMYHVINDDFYLIPTAEVPLTNIYRDKILAVDQVPVMMTGYTPCFRREAGSYGSDVRGLNRLHQFDKVEIVRIEHPDKSDDALIKMKEHIKEILTELKLDFRILNLCAGDLGFTSSITYDFEVFSKGQEKWLEISSVSNFKTYQSNRLNLKFKDKDGKNYTLHTLNGSSLALPRVMAGLIENNQSENGIIIPDVLVPYTGFDIIN

SEQ ID NO: 185448 - protein, 282 aa, Unknown
  Bacterial polypetide isolated from the Sargasso Sea
SHLDIGERLGLIDVEKASSVSGSRFSYLFGDLVKMQFNLVSYAMNKLSEKGFNPTIPPVLVRENALFGTGFFPDDSDQVYEIPNDDLFLVGTSEVSLAALHGDEILDFDKLPIRYAGYSTCFRREAGTYGKDTTGIFRVHQFDKVEMFSFCNPEKSEEEHEFILSVEEEILQELEIPYRVVDVCTGDLGSSAAKKFDIEAWIPSQNTYREVTSCSNTTDFQARRLNIRTKVEKDTALLHTLNGTAIAVGRILIALLENNQTEDGGVEFSDSLGNILGVEKLS

SEQ ID NO: 185449 - protein, 127 aa, Unknown
  Bacterial polypetide isolated from the Sargasso Sea
LERMTKCASGILDKLKLPYRIVELCTGDMGFSSQKTYDIEVWVPSEKKYREISSCSTCGTFQARRMKAKYKNSKNEKNFIGTLNGSGLAIGRTMIAILENYQDKDGSIIIPDVLKPYMDNIDKITSN

SEQ ID NO: 185450 - protein, 180 aa, Unknown
  Bacterial polypetide isolated from the Sargasso Sea
DEIIDIENLPLRYAGYSTCFRREAGTYGKDTSGIFRVHQFDKVEMFSFCDPEKSNEEHEHILAIEEEILKDLEIPYRVVDVCTGDLGASAAKKYDIEAWIPSQQKYREVTSCSNTTDFQARRLNMRTKNENGNTILHTLNGTALAVGRILIALLENNQNSDGSVTFSDDLGKILGVNKLS

SEQ ID NO: 185451 - protein, 307 aa, Unknown
  Bacterial polypetide isolated from the Sargasso Sea
MIDLKLLKNNLKDIEKKINSRGESFDLSTIVLDYEKKNSLQIEIEDLRNQKKQVSKEIGELKKNKSNSSEQEKRSDELSTNLSKLEKSFEEVDEKVNKNLSLIPNIPHEKCPNGSSEEDNIEVHRKEYKNPKTNLDHVEIGEKIDCINFDDATKVAGPRFVVLKNKLAQMHRALIQLMLDEAMKNNYQECYVPHIVNSNSLFGTGQLPKFADDSFKVENEEKYLIPTAEVPLTNLFRDKQLAVDELPVMVTAHTPCYRSEAGSYGKDTRGMIRQHQFEKVELVQIVHPSKSNNALNNLISHASSILD

SEQ ID NO: 185452 - protein, 380 aa, Unknown
  Bacterial polypetide isolated from the Sargasso Sea
MHNIKDIRNDFENFKDKLKNRNIDISLDNIISLDEENRKFIQEKEKFEMEKKSISKSKDQSLFEKSKDLSLKIEEINKNQIKLQRQITDILSSIPNIPLSDVPVGQNENSNKEIEKKGEIKEFNFKPKSHYELGDKLNMLDFDLATKTTGSRFVFVKKELAKLERAISNFMIDTHTQKNGYTEISPPLIATAETMFGTGQLPKFENDQFEIKLDEGEERKFLIPTAEVILTNIVKNRILEKNELPIRVVASTPCFRKEAGSYGKDTKGMIRQHQFYKVELVSIVENDKCSEELERMSKSATMILDALKLPYRKIVLCAGDMGFSAEKTYDIEVWLPSENKYREISSCSSCGSFQARRMKARYKGQNNSKEFVGTLNGSGL

SEQ ID NO: 185453 - protein, 318 aa, Unknown
  Bacterial polypetide isolated from the Sargasso Sea
LKIPNLISSTSPDGKTDEDNAEIKQVGDIKNIDNPKDHLEIAEKLGLIDVQKASEVSGSRFSYLFGDLVKIEFNLVSWALDILSSKGFTPTVPPVLVRENALYGTGFFPDDAEQVYEIPNDDLYLVGTSEVPLAALHSDEILDIENLPIRYAGFSTCFRREAGTYGKDTTGIFRVHQFDKVEMFSFCNPEKSEEEHEFILSIEEELLQALEIPYRVVDVCAGDLGASAAKKYDIEAWIPSQNTYREVTSCSNTTSFQARRLNIRAKSDGETNILHTLNGTAIAVGRILIALIENNQTEDGKVEFSDTVAEIIGVKNLG

SEQ ID NO: 185454 - protein, 415 aa, Unknown
  Bacterial polypetide isolated from the Sargasso Sea
MHNLKLIRENLGDFKNKISKRNIKVDFDKLIQLDKKHREIIGNKEKLEQQKKIISKSQDKKQFEKSKNISNEINQLIIEEKKIGKKISQILDVIPNIGLDDVPVGSDEKSNKIINSTGEIPKFSFKVQSHYDLGKKKGLLDFDLASKTTGARFVFLKGKLAELERAISNFMLDVHTKEFGYEEVSPPLIASESTMYGTGQLPKFENDQFQIQMEGNQKKYLIPTAEVILTNMFKENTLNIKNLPKRLVASTPCFRKEAGSYGKDTKGMLRQHQFYKVELVSIVEPNKCNEELNRMISCAEEILKRLKLPYRQVLLCTGDMGFSAEKTIDLEVWIPSENKFREISSCSSCGQFQSRRMRAKYKDSKNKSDFLGTLNGSGLAIGRTLIAIMENYQKSDGTIIIPEALRGYMKNLDKI

SEQ ID NO: 185455 - protein, 399 aa, Unknown
  Bacterial polypetide isolated from the Sargasso Sea
MHNINFIRENPTEFDNYMKQRGEHPISNKILELDKVKRETQTVLQNLLAERNSISKNIGKLKSENKDASSEMNKVDEIKNKINNLKELETIKDEELKTILSRLPNIADKTVPIGSNEADNTKYREWGEKPGFDFNPKTHFELGENLGLMNFETASKLSGSRFVLLKNQLSKLERAIANFMLDKHTNENGYIEYNLPFLVKDSALFGTGQLPKFGEDLFTAGEDHWLIPTAEVPLTNMVREEILNQNQLPMRVTSYTPCFRSEAGAAGKDTRGMLRQHQFTKVELVSIVEPQHSQDELERMLESAESILQDLNIHYRIMTLCTGDMGFSASKTYDIEVWLPGENTYREISSCSNCNDFQARRMNTRYKLENKNIFVHTLNGSGLAVGRTLIAILENYQTK

SEQ ID NO: 185456 - protein, 398 aa, Unknown
  Bacterial polypetide isolated from the Sargasso Sea
MLDLKKLKKDSKSVADNLKRRGFKLDLDTWDKLEASRKSLQSDTESMQAELNEISKEIGIHKKEGSDSSKLEKKASEITLKIKSQSKDLAPILEDLNNFISSIPNLIDDDVPEGKDEEENLELRTFGNIRTFDFTPKDHLELGSNLNGIDMEAGVKIAGARFAVLNGDLAKLQRSLINFMLDVHTNEHQYKEVYVPYIVNNESLFGTGQLPKFEEDLFKLEGKENFYLASTAEVPVTNLFRDEILDSNMLPAKLVCHTPCFRSEAGSYGLDTKGIMRLHQFEKVELVQAVEEKDSNNALEELTVHAEEILKRLELPYRVVSLCSGDIGFSAAKTYDIEVWIPSQDKYREISSCSNFRDFQARRMKARWKNPSTNKTEFLNTLNGSGLALSRTVLAIME

SEQ ID NO: 185457 - protein, 177 aa, Unknown
  Bacterial polypetide isolated from the Sargasso Sea
QSELPIKMTAHTPCFRQEAGSYGKDTKGMIRQHQFEKVELVHIVKPEESYEALEELTKNAESILQKLNLPYRVMLLCSGDTGFSAAKTYDLEVWLPSQNTYREISSCSNCESFQSRRMKARYKNSDTKQTDYPHTLNGSGLAIGRTFIAVLENYQNEDGSITIPDVLIPYMQNRERI

SEQ ID NO: 185458 - protein, 247 aa, Unknown
  Bacterial polypetide isolated from the Sargasso Sea
MLDIKNLRDNFKDIQISLKKRGYDLNEASFKSLDDSRKELQIEVENLQAERKKLSSEFGKLKASGEETSDLKKVIDKKNSDLEKKDSELQDVLKNLNNLLLDMPNIPHDSVPEGSSEEDNKIVSKHGEIISTNTLDHLEITKKIDTELAAKLSGSRFAVLEGDLAKLQRSLITFMLDCAIQNGYKEYYVPFMANEESLTGTGQLPKFEEDLFKTSDKLYLIPTAEVPLTNLFRNEFLNEKDFPIKVT

SEQ ID NO: 185459 - protein, 413 aa, Unknown
  Bacterial polypetide isolated from the Sargasso Sea
MLDPKIIRKDSDRVRGSLKKRASDFDLDSYLEIDQKNRDLISAVEELRSSKNAINKSIANPDLSDEERSDLISQVGEINKKLKDSEESLNDLSSQSREMSLEIPNILDDSVPQGLNEEDNMEIRSWGEPRKFDFQPKDHSELGENNGGIDFESAAKLSGSRFVVMKDGYAKLHRALKQFMLDVQTEENGYTEMYVPNIVRSDCLEGTGQLPKFADDQYKIENEEALYLIPTAEVPLTNLIRESILDQSELPIKMTAHTPCFRQEAGSYGKDTKGMIRQHQFEKVELVHIVKPEESYQALEELTKNAESILQKLNLPYRVMLLCSGDTGFSAAKTYDLEVWLPSQKTYREISSCSNCESFQSRRMKARYKNSDTKQTDYPHTLNGSGLAIGRTLIAVLENYQNEDGSITIPDVL

SEQ ID NO: 185460 - protein, 257 aa, Unknown
  Bacterial polypetide isolated from the Sargasso Sea
MLDKKLLNQSPELVKNNLSSRGYVLNIDQWKKLEEDRKIAQVNLETNQENLNKLSKEISKSKDDANLKDQASSLSTLVKQDKEILQSIQDNIDEFLLDIPNILDESVPIGEDETSNQIIEEIGAIPNFSFEPKPHSFFIEKTDQGRGVKIAKSRFTVLSGELAKLHRVIGQFMIDTHTNLHGYVELYVPYIVNKTSLIGTGQLPKFEEDLFKLTESSDLYLAPTAEVPVTNLHRDEKLNFEQLPIKYVCHSPCFRSE

SEQ ID NO: 185461 - protein, 217 aa, Unknown
  Bacterial polypetide isolated from the Sargasso Sea
LFGTGQLPKFGEDLFTAGEDHWLIPTAEVPLTNMVRGEILNINQLPMRVTSYTPCFRSEAGAAGKDTRGMLRQHQFTKVELVSIVEPHHSQGELERMLESAESILKDLNIHYRVMTLCTGDMGFSASKTYDIEVWLPGENTYREISSCSNCYDFQARRMNTRYKLENKNIFVHTLNGSGLAVGRTLIAILENYQMKDGNIKIPEVLKKYFNNSDTLV

SEQ ID NO: 185462 - protein, 129 aa, Unknown
  Bacterial polypetide isolated from the Sargasso Sea
MTKCAQAILEKLGLPYRTVVLCTGDMGFGAQKTHDLEVWLPGQGKYREISSISICGDFQARRMLARFKPGEGGKLQFVHTLNGSGVAVGRCLIAVLENGQNEDGSVSLPPVLSPYLGNCTRINSTGGLE

SEQ ID NO: 185463 - protein, 294 aa, Unknown
  Bacterial polypetide isolated from the Sargasso Sea
MHNLKEIRKNLDYYKKKIKDRNVDVDFENLLNLDKINRDLILNKEKFEHEKKLLSKTKDEKNFQKSKRLTEDIADIEIKQKELQKKIRSIISIMPNIAMDDVPVGEDEKSNKQIKKLGEPKKFEFKIKSHVEIGENLKYLDFDSATKISGSRFVVLKDKFALLERALINFMLDIHTKMFNYKEISPPIIVNEETMFGTGQLPKFKNDQYELSTEKNEVKKYLIPTAEVSLTNLARDSIIDSKNLPLRYVASTPCFRKEAGSYGKDTKGMMRQHQFYKVELVSLVEPKDSINELK

SEQ ID NO: 185464 - protein, 300 aa, Unknown
  Bacterial polypetide isolated from the Sargasso Sea
MLDSKLLRKETKEVISNLKRRGFEFDETLWTKLESKRKDLQGSTENQQAKLNELSKNIGIAKQNSEDTKDLEKMASELTAILKEQNNELDNLLEQIDNFVLSIPNLIDHDVPDGKDETSNLELKKIGSPRVFDFPIKDHIEIGRSYEIDMEAGVKLTGSRFKVFRNEIAHLQRALINFMIDTHVQEHGYEELYVPYIVNKESLIGTGQLPKFEEDLFKIDNKNDFYLTSTAEVPVTNLFRDEILNSEKLPIKYVCHTPCFRSEAGSYGKDTKGIMRLHQFEKVELVQAVESSDSDEALEE

SEQ ID NO: 185465 - protein, 247 aa, Unknown
  Bacterial polypetide isolated from the Sargasso Sea
NFMLDVHVNQFKYTEISPPLIVNEDVMFGTGQLPKFEEDQFEIKLDNSEERKFLIPTAEVVLTNLVRKTNLDISELPQRFVAATPCFRKEAGSYGKDTKGMMRQHQFYKVELVSIVEPKHCITELDRMLNCAEEILKKLEIPYQVVLLSSGDMGFSAEKTFDIEVWIPSEKKYREISSCSSCGSFQARRMGAKYKTSSGNEYVGTLNGSGLAAGRLMIALIENNQNEDGSITIPNILKKYMNNLDKI

SEQ ID NO: 185466 - protein, 420 aa, Unknown
  Bacterial polypetide isolated from the Sargasso Sea
MLDPKIIRDKPELIKQMLKDRAVEFDFEKMLELNKTRKEMMMQSDELKQKRNQMSVKIGSEKKAGNDASELLREMGEISKKLDDLESLRKTVDENYHNLSFSIPNLVHDSVPKGADESFNKQVRTWGEIPKFDFEVKDHIDLGLELDIVDIERASKTAGARFYYLKDGLVKLGQALTAFALDFVSNKNYNLIQPPYMINRQSMEGAVIADDFEDVIYKVQDEDLFLIGTSEHAIASMYYDEILEGSKIPLRYASISPCFRREAGAHGKDQKGIFRVHQFEKIEQFIFCRPEESWEEHEKMIKNTEEFYQQLEIPYRLMLLSSGDMGKVSAKTYDIEAWMAGQNAYREIVSCSNCIDYQSRRLKIRFREKSNEDTKYIHTLNSTLVAIERTMVAILENNQTKDGHIEIPKVLQKYFGDNMI

SEQ ID NO: 185467 - protein, 98 aa, Unknown
  Bacterial polypetide isolated from the Sargasso Sea
LGFSAAKTIDIEVWLPSQNCFREISSCSNFRDFQARRINARVKDGKDKFYPHTLNGSALAVGRTLLAIIENFYENGLGVHIPKVLADYLDFDLIEEQK

SEQ ID NO: 185468 - protein, 372 aa, Unknown
  Bacterial polypetide isolated from the Sargasso Sea
MLDIKKIRENPDQIDKALEKRNHPAVSKDLLSADEKNRNLISELQKIQEERNAKSKLIGEYTAKGNVDDTNKLKDEVGNLKTKMQDLEEQQRSSQNSLDLMLSEIPNLPDESVPVGDESQNKEIKTKGKKKEFSFDLKEHFDLGENLDVMSFEKAVNISGARFVIQKGKLANLERAIANFMLDLHTTEFEYEEMNVPILVKDQAVFGTGQLPKFKDDLFKTTNDYWLIPTAEVPLTNMTRESVLDVADLPKRYVAHTPCFRSEAGAAGRDTRGIMRQHQFYKVELVSLTSEDQSKQEHERMLNCAEEVLKRLDLHYRVVILSSQDMGFSAQKTYDIEVWLPGQKEYREISSCSNCGDFQARRMNSRYKDNNT

SEQ ID NO: 185469 - protein, 285 aa, Unknown
  Bacterial polypetide isolated from the Sargasso Sea
MLSIDTISNNKEETLIGLKKRGFKDLKIIDKIIDLNLSRKKIQQELDQILFESNNISKKISEIFKSGNNDDSVSNLKEKSSDLKLKSKNLSDQLEKTKSDIFELLTTIPNIPDNEVPEGLSIDDNIEVYRSNEKIESDKNLKTHWDLAKEYDIIDFELGSKITGSGFPVYKGKGAKLQRGLINYFLDKNTSAGYTEFQVPHLVNSDSAFATGQLPDKDGQMYHVNEDNFYLIPTAEVPLTNIYKDKILSSDEIPVLLTGYTPCFRREAGSYGSEVRGLNRLHQFD

SEQ ID NO: 185470 - protein, 419 aa, Unknown
  Bacterial polypetide isolated from the Sargasso Sea
MHNLKEIRKNFDDFKNALKGRFLKIDFNELKDLDIKNRNFIQKKESLENEKKEISKSKDEKLFKKSKEISNEIDEISKQQKIIKDQLDKILSFIPNIPHKDVPNGKDENDNVEIMKSGQIPNFDFKPLSHYELGEKLGMLDFDLATKTTGARFVFVKNKLALLERAISNFMLDTHILKNGYEEISPPLFASESTMFGTGQLPKFENDQFEIKLDDNGERKFLIPTAEVILTNIVKDQMINQKDLPMRFVASTPCFRKEAGSYGKDTKGMIRQHQFYKVEMVSIVEQEKCLEELERMTKCATSILDLLELPYRKMILCSGDMGFSAEKTYDIEVWLPSEKKYREISSCSSCSTFQAVRMKARYKNQKKETLYVGTLNGSGLAVGRTLIAVIENYQQKDGSIIIPKVLRPYMDNLEKISVK

SEQ ID NO: 185471 - protein, 315 aa, Unknown
  Bacterial polypetide isolated from the Sargasso Sea
MPSDTTPVGRDENDNVEVRRWGTPREFSFPVRDHIDLGEAAKGVDFKNGVKLSGSRFVVMKGQIARLHRALAQFMLDLHTLQHGYTECYVPYLVNPDSLYGTGQLPKFSQDLFNTGIDGEGEEEGKVRKFSLIPTSEVPLTNMARDEIFDEQELPIKMTAHSPCFRSEAGSYGRDTRGLIRMHQFDKVEMVQLVHPEKSWEALEEMAGHAEKVLQLLELPYRVMALSTGDMGFCAAKTYDLEVWLPAQNTYREISSVSNCTDFQARRMQARVRIDGKPQLLHTLNGSGLAVGRTLVAVIENYQQEDGRIAIPAAL

SEQ ID NO: 185472 - protein, 163 aa, Unknown
  Bacterial polypetide isolated from the Sargasso Sea
VLDLKLDHMGLDTKGVIRQHQFEKVELVQIVHPNHSQQALEDITLQARSILDELELPYQIVELCTGDLGFSSQKTYDLEVWFPSQNKYREISSCSNFGDFQSRRLNIKFKEDKKKNFVHTLNGSGLAVGRTLAALVENCFDGKEIIIPSVLHKYLDFKTIELS

SEQ ID NO: 185473 - protein, 296 aa, Unknown
  Bacterial polypetide isolated from the Sargasso Sea
MHNINYIRDNPVEFDNYMKSRGENSISQKIIHIDKEKREAQTALQNLLADRNQLSKTIGKLKSEKKEATNEMAQVDDLKNKINALKELEALKNDELKAILSRLPNIPDSSTPIGANEEENVLYRDWGQKPSFDFDPKQHFEIGENANLMNFDTATKLSGSRFVILKGNLSKLERAIANFMIEKHTSINGYVELHVPYLVKANTLYGTGQLPKFADDLFTAGDDHWLIPTAEIPLTALHSNEILNINQLPMRVTSYTPCFRSEAGAAGKDTRGMLRQHQFTKVELVSLVEPEHSKES

SEQ ID NO: 185474 - protein, 415 aa, Unknown
  Bacterial polypetide isolated from the Sargasso Sea
MIDINLLRADPEKVKNILKIKNYDLDSGLFAEIDSNRKTLQTEVEDLKSLKNNLSKDFGELKKNNQDTSKLSNQLDEIKKNLSEKEELLNKTLSHLNDFLLDIPNIPHQDVEPGNSEEDNKVIKTFGEVQKNDSIDHLEITSDIDIESAVKLAGTRFAVLKDDIAKLHRALISFMLGVAEKNGYEERYVPFMANSRSLTGTGQLPKFEEDLFKVTEDLFLIPTAEVPLTNLYADSILEQGSLPIKVTSHTPCFRSEAGSYGKDTKGLIRQHQFEKVEIVQVVHPDKSDLALEDLLSNAEEILQLLELPYQVVQLCGGDLGFSSAKTYDIEVWIPSQNKYREISSCSNFTDFQSRRSKIRLNEDGTKIFPHTLNGSALAVGRTLVAIVENFYDGNNKIHVPKSLQKYLNKEVITCK

SEQ ID NO: 185475 - protein, 217 aa, Unknown
  Bacterial polypetide isolated from the Sargasso Sea
SLKMDQFEIKIDEKSGRKFLIPTAEVILTNMVREQIINLKDLPLRLVALTPCFRKEAGSYGKDTKGMIRQHQFYKVELVSIVENNECINELERMTKCATMILEKLNLPYRKVILSTGDMGFSAEKTYDIEVWLPSENKYREISSCSSCGTFQSRRMKARYKNRNNETVFLGTLNGSGLAVGRTLIAILENYQNSDGSINIPDVLKPYMNNLQKITNN

SEQ ID NO: 185476 - protein, 419 aa, Unknown
  Bacterial polypetide isolated from the Sargasso Sea
MIDLIDLKENLELYKKGLSAKGCDVDLADLLKRNSQKNSIQTELDKLKSQKNNLSKEIGALTSKGGDTKKLKDESESLNKKIDALQNEFDLLKSDLDSIMLQIPNLPDKDVPIGQDESMNKEINTKIFTQSNEGLDHVEIGEKIGLLDFDLANKLSGSRFVVLKGKLAELQRALIQFMLDEAKNNGYEEMYVPLIVNSDSLIGTGQLPKFEEDQFKVGDGKYLIPTAEVPLTNLLRDEVIADSDLPINLTAHTPCFRAEAGSYGKDTRGMIRQHQFEKIEIVKFTHPDKSDESLNELVAHASQVLDKLELSYRHVVLCTGDLGFSAAKTIDIEVWLPSQNCFREISSCSNFRDFQSRRINARVKKGKDKFYPHTLNGSALAVGRTLLAIIENFYENGVGVHIPKVLKDYLDFDLIEEKK

SEQ ID NO: 185477 - protein, 90 aa, Unknown
  Bacterial polypetide isolated from the Sargasso Sea
DLEIWIPSENKYREISSCSSCGSFQARRMMARYKNEKNITEFVGTLNGSGLAVGRTLIGIMENYQNSDGSITIPNVLRPYMNNLEKIQKN

SEQ ID NO: 185478 - protein, 298 aa, Unknown
  Bacterial polypetide isolated from the Sargasso Sea
MIDANLIKNNSQIVIENLKSRNYDLDYELYESLESDRKKYQTQAEDLQSQRKILSQEFGILKKEGKDDPELSKKIESVNNDLEISSTKLNEVQQALKEFLLDIPNLSDKSVPIGPNEAKNVKIREQGEPNILKGKDHLDITSMIDTESANLLAGSRFAVLKAEIAKLQRALIAFMLDKASEYGYTEHYLPMVANTSSLTSTGQLPKFSDDLFQLSDDYYLIPTAEVPLTNLFRNQILDIDKLPLKLTAHTSCFRSEAGSYGKDTKGLIRQHQFEKVELVQICHPENSFKALEELTSHA

SEQ ID NO: 185479 - protein, 182 aa, Unknown
  Bacterial polypetide isolated from the Sargasso Sea
ILEKTNLPIRVVASTPCFRKEAGSYGKDTKGMIRQHQFYKVELVSIVENDKCSEELERMSNAATMILDALKLPYRKIVLCTGDMGFSAEKTYDIEVWLPSENKYREISSCSSCGSFQARRMKARYKGQNNSKEFVGTLNGSGLAVGRTMIAIMENYQTEDGSILIPDVLKPYMPNIDKISIN

SEQ ID NO: 185480 - protein, 350 aa, Unknown
  Bacterial polypetide isolated from the Sargasso Sea
SKKISEEISKISKNQLISQRNINNVLNIIPNLALDDVPVGKDENSNKLISQNGNIRKFSFKPKSHVEIGLINNEIDFDTSTKLSGARFVVLKNRIALLERALINFMLDVHTTEFKYTEISPPLIVNEDVMFGTGQLPKFEEDQFEIKFENSEQRKYLIPTAEVVLTNLVRKSILNKEQLPLRYVASTPCFRKEAGSYGKDTKGMIRQHQFYKVELVSIVEPNDSTSELDRMLNCAKKILEKLEIPYQVILLSTGDMGFSAEKTFDLEAWIPSENRYREISSCSSCGTFQARRMGAKFKGLNNNEFVTTLNGSGLAVGRLMIALLENNQNEDGSVAIPNILKKYMNNLDKI

SEQ ID NO: 185481 - protein, 428 aa, Unknown
  Bacterial polypetide isolated from the Sargasso Sea
MLDPKFLRNELAVTAERLATRGFILDVAHLTQLEEKRKSLQVATEELQASRNAISKSIGQAKARGEDVDAIMAQVGDLGAQLDAKKVELAAVLEEVNAIAMSMPNLPDESAPIGADETENVEIRRWGTPRSFDFPVKDHIDLGEGLNGLDFKSAVKITGSRFIVMKGQIARLNRALGQFMLDLHTTEHGYTEAYVPLLVNEASLLGTGQLPKFGEDLFHTKPATEEGQGLSLIPTAEVPLTNLVRDSIVDEDELPIKLTAHTACFRSEAGSYGKDTRGLIRQHQFDKVELVQLVKPEDSMAALEALTGHAETVLQRLGLPYRTVILCTGDMGFGSSKTYDIEVWLPGQNTYREISSCSNMKDFQARRMQARYRVKADNKPALLHTLNGSGLAVGRTLVAILENYQNADGSVTIPEALRPYMGGMTQIG

SEQ ID NO: 185482 - protein, 415 aa, Unknown
  Bacterial polypetide isolated from the Sargasso Sea
MLDIRKLRDNFEEVKVALKKRGFDIDQEKFQSLDKKRKVLQVDVENLQAEKNKLSSEFGKLKSAGESTDSLKETIDKKTLELNEKDSELKIILDQIESFLLRIPNISDDSVPDGKNEEDNVVVSTHGSIDSTNTLDHLEITGLIDVDLAVKLAGARFSVLKGDLAKLQRALITFMLDNATGHGYEEYYLPFMANRNSLIGTGQLPKFEEDLFKTYDKLYLIPTAEVPLTNLFRNEFVNEDELPIKVTSHTPCFRSEAGSYGKDTRGLMRQHQFEKVELLQVTHPDSSMKCLDELLANACEILDKLELPYQVVELCTGDLGFSSCKTFDIEVWMPSQNRYREISSCSNFSDFQARRANIKFKNKEGTHFAHTINGSGLAVGRTLIALIENNYNGTDSIKIPSSLQEYFGSDTLKTS

SEQ ID NO: 185483 - protein, 313 aa, Unknown
  Bacterial polypetide isolated from the Sargasso Sea
MIQFQKVQMNHLTKKLEHGGEIPKFDFDVKDHIDLGLELDIVDLERASKTAGARFYYLKDGLVKLGQSLTAFALDFVSSKNYNLIQPPYMINRQSMEGAVIADDFEDVIYKVQDEDLFLIGTSEHAIASMYYDEILEGSKIPLRYASISPCFRKEAGAHGKDQKGIFRVHQFEKIEQFIFCRPEESWEEHEKMIKSTEEFYQQLEIPYRLMLLSSGDMGKVSAKTYDIEAWMAGQNAYREIVSCSNCIDYQSRRLKIRFREKSNEDTKYIHTLNSTLVAIERTMVAILENNQTKDGHVEIPKVLQKYFGDNMI

SEQ ID NO: 185484 - protein, 415 aa, Unknown
  Bacterial polypetide isolated from the Sargasso Sea
MIDINLLRADPEKVKNILKIKNYDLDSGLFTEIDSNRKTLQTEVEDLKSLKNKLSKDFGELKKNNQDTSELSNQLDEIKKNLSEKEELLNKTLSHLNDFLLDIPNIPHQDVEPGNSEEDNKVIKTFGDVQKNDSIDHLEITSDIDTESAVKLAGTRFAVLKDDIAKLHRALISFMLDVAEKNGYQERYVPYMANSRSLTGTGQLPKFEEDLFKITEDLFLIPTAEVPLTNLYADSILEQGNLPIRVTSHTPCFRSEAGSYGKDTKGLIRQHQFEKVEIVQVVHPDKSDSALEDLLSNAEEILQLLELPYQVVQLCGGDLGFSSAKTYDIEVWIPSQNKYREISSCSNFTDFQSRRSKIRLNEDGNKIFPHTLNGSALAVGRTLVAIIENFYDGKNAIHVPKSLQKYLNKEVITCN

SEQ ID NO: 185485 - protein, 273 aa, Unknown
  Bacterial polypetide isolated from the Sargasso Sea
AAKLSGARFALMRGPIARLHRALAQFMIDLHTREHGYEEAYTPYLVQAPALQGTGQLPKFEEDLFKISREGEADFYLIPTAEVSLTNIVAGEILDAKELPLKFVAHTPCFRSEAGASGRDTRGMIRQHQFDKVEMVQIVEPSRSFEALEELTGNAEKVLQLLELPYRVLSLCTGDMGFGATKTYDLEVWVPSQDKYREISSCSNCGDFQARRMQARYRNPETGKPELVHTLNGSGLAVGRTLVAVLENYQQADGSVVVPDVLKPYMGGIEIIG

SEQ ID NO: 185486 - protein, 419 aa, Unknown
  Bacterial polypetide isolated from the Sargasso Sea
MHNLKEIRKDFSKFEKDLEKRSVKIDLNNLKKLDELNRDLIQKKENLEKEKKDISKSKDESLFKKSKEISAELEKISEQQKNTKTELDNILSSLPNIPHQDVPNGKDENDNVEVLKAGKVPEFDFKPKSHYELGENLGMLDFDLATKTTGSRFVFVKKELALLERALSNFMLDTHIIQNGYQEISPPLIASDNTMYGTGQLPKFENDQFEIKFDEGSDRKFLIPTAEVILTNIVKDKIVEKKDLPMRFVASTPCFRKEAGSYGKDTKGMIRQHQFYKVEMVSIVEKENCLEELERMTNCATDILDKLELPYRKVILCSGDMGFSAEKTYDIEVWLPSENKYREISSCSSCSTFQAQRMKSRYKNKNKETIFVGTLNGSGLAVGRTLIAVLENYQQKDGSIVVPKVLRPYMNNSELISAK

SEQ ID NO: 185487 - protein, 428 aa, Unknown
  Bacterial polypetide isolated from the Sargasso Sea
MLDPKFLRNELAVTAERLATRGFILDVAHLTQLEEKRKSLQVATEELQASRNAISKSIGQAKSRGEDVDAIMAQVGDLGAQLDAKKVELAAVLEEVNAIAMSMPNLPDESAPIGADETENVEIRRWGTPRSFDFPVKDHIDLGEGLNGLDFKSAVKITGSRFIVMKGQIARLNRALGQFMLDLHTTEHGYTEAYVPLLVNEASLLGTGQLPKFGEDLFHTKPATEEGQGLSLIPTAEVPLTNLVRDTIVDEDELPIKLTAHTACFRSEAGSYGKDTRGLIRQHQFDKVELVQLVKPEDSMAALEVLTGHAETVLQRLGLPYRTVVLCTGDMGFGSSKTYDIEVWLPGQNTYREISSCSNMKDFQARRMQARYRVKADNKPALLHTLNGSGLAVGRTLVAILENYQNADGSVTIPEALRPYMGGLTQIG

SEQ ID NO: 185488 - protein, 397 aa, Unknown
  Bacterial polypetide isolated from the Sargasso Sea
MFDIKKIRENPEDFDKILSKRNHSPISKEILDLDKKNKDLIAQLQSLQEERNSKSKKIGELSSQGNREEASNLKEEVSALKSKLQELDEAQKNSQNALNDVLSRIPNLPHESVPVGDEIKNKEIKLIGEKKDFSFELKEHFDIGEDLGIMSFEDAASISGARFVIQKGMLSRLERSIANFMLDLHTSEFGYEEVNVPILVRGDALYGTGNLPKFEEDLFKTTNDYFLIPTAEVPLSNLTRGKILDIADLPKRFVSHTPCFRSEAGAAGKDTRGIMRQHQFYKVELVSLTSEQKSEDEHERMLSCAEEVLKKLDLHYRVVILSSEDMGFSAQKTYDIEVWLPGQKAYREISSCSNCGDFQARRMNSRYKDGKDIKFLHTLNGSGLAVGRTLIAIMKII

SEQ ID NO: 185489 - protein, 207 aa, Unknown
  Bacterial polypetide isolated from the Sargasso Sea
EDLFKTSDKLYLIPTAEVPLTNLFRDEFLNEKDLPIKVTSHTPCFRSEAGSYGKDTRGLIRQHQFEKIELVQITHPNNSMDCLENLLDNACEILNKLELPYQIVELCTGDLGFSSSKTFDIEVWMPSQKKYREISSCSNFTDFQARRSNIKFKSKEGNIFAHTINGSGLAVGRCLIALIENNFDGKDTINIPICLEQYFGSNEIKIS

SEQ ID NO: 185490 - protein, 422 aa, Unknown
  Bacterial polypetide isolated from the Sargasso Sea
MHNINFIRDNPIIFDNFMKQRGELPCSKNIIKIDEDKRNTQTILQNLLAERNKLSKEIGILKSQNKDSEVENILKRVEKIKEETSNLKELEKIKEDELHAILSRLPNIPSSTTPQGKNENDNILYREWGDKSDFQFKPKKHYEIGENLNLMNFDLASKLSGSRFVVLKGMLSKLERAIAQFMLDKHTDENGYTEMYVPFLVKNNSLFGTGQLPKFGEDLFTAGENHWLIPTAEVPLTNLVRDKILQSNNLPMRVTSYTPCFRSEAGAAGQDTRGMLRQHQFSKVELVSIVEPQHSVKELERMLESAESILKDLNIHYRVMTLCSGDMGFSANKTYDIEVWLPGENNYREISSCSNCGEFQARRMNAKYKSKDKNIFVHTLNGSGLAVGRTLIAILENYQTEDGNVIIPEVLRKYLNNQSSLI

SEQ ID NO: 185491 - protein, 264 aa, Unknown
  Bacterial polypetide isolated from the Sargasso Sea
MLDSKTLRKETKKVSLSLKKRGSDFDLDSYLKMDQKMRDLISTVEELRSSKNNINKSIASPEISENDKSDLISEVGTINKKLKESEQSLNELSEQTKKMSLEIPNILDESVPEGSSEEENIEIRSWGKLPKFDFEPKDHSELGESNGGIDFESAAKLSGSRFVVMKDGYARLHRALKQFMLDVQTEENGYTEMYVPNIVRSDCLEGTGQLPKFAEDQYKIENEEGLYLIPTAEVPLTNLIRESILEENELPIKMTAHTPCFRQE

SEQ ID NO: 185492 - protein, 363 aa, Unknown
  Bacterial polypetide isolated from the Sargasso Sea
ELSKTKNEKNFKDSKLLSDEINKISLEQKKINNELHNIIKNLPNIALNDVPIGNDETSNKVIRKEGKIKEFNFKIKSHFELGEKEDKMDFKTASKLSGSRFVILKDKLALLERALINFMLDVHTNKFKYTEISPPLIVTEDSMFGTGQLPKFEEDQFEIKLENADIRKFLIPTAEVSLTNLVRESVVDLKKLPIRYVAATPCFRKEAGSYGKDTKGIMRQHQFYKVELVSIVEPQLCDDELNRMLGCAEEILKQLNIPYQVVLLSSGDMGFSAEKTFDIEVWIPYEKKYREISSCSSCGKFQARRMSAKYKSDKGLDFVGTLNGSGLAVGRLLIALIENNQNNDGTVSVPEALKKYMNNLEKI

SEQ ID NO: 185493 - protein, 261 aa, Unknown
  Bacterial polypetide isolated from the Sargasso Sea
MHNIKDIRNNIEEFKNKIKDRNFDNNLDQLLEIDKENRILIQDKEKYEMEKKSISKSKDESLFAKSKEITIKIDELSNKQKVVKDKLDNILSSIPNIPLNDVPSGKNEDSNKEVIKVGNIQKFNFKPKSHYEIGEKLKMLDFDLATKTTGARFVFVIDKLAALERAISNYMIDTHTKINGYTEISPPLLATENTMFGTGQLPKFENDQFEIKFDDKNDRKFLIPTAEVILTNMVKNQIINIKSLPMRLVASTPCFRKEAGS

SEQ ID NO: 185494 - protein, 355 aa, Unknown
  Bacterial polypetide isolated from the Sargasso Sea
LKSSGEDTSALKKTIDLTNAELEPKDLDFQEILNSLNALLLDIPNLPHESVPKGKSEKDNVVIKNYGSIDTSNTLDHLEITNDIDTELAAKLSGSRFAVLKGDLSKLQRSLITFMLDTAIKNGYEEYYVPFMANEESLIGTGQLPKFEEDLFKASDKLYLIPTAEVPLTNLYRNEFINEKDLPIKLTSHTPCFRSEAGSYGKDTKGLIRQHQFEKIELVQITQPEQSMKCLQDLLANACEILDKLELPYQIIELCTGDLGFSSAKTFDIEVWMPSQNKYREISSCSNFTDFQARRANIKFKNKDGNHYAHTINGSGLAAGRCLIALLENNYNGSDSIKVPSCLIQYFGSDTIKIN

SEQ ID NO: 185495 - protein, 386 aa, Unknown
  Bacterial polypetide isolated from the Sargasso Sea
RDLISAVEELRSSKNNINKSIASPDISENDKSDLISEVGTINKKLKESEQSLNELSEQTKKMGLEIPNILDESVPEGSSEEENIEIRSWGKLPKFDFEPKDHSELGESNGGIDFESAAKLSGSRFVVMKDGYARLHRALKQFMIDIQTEENGYTEMYVPNIVRSDCLVGTGQLPKFAEDQYKIENEEGLYLIPTAEVPLTNLIRESILEENELPIKMTAHTPCFRQEAGSYGKDTKGMIRQHQFEKVELVHIVKPDESYKALEELTKNAESILQKLKLPYRLMLLCSGDTGFSAAKTYDLEVWLPSQETYREISSCSNCESFQSRRMKARYKNSKSKQTDYPHTLNGSGLAIGRTLIAVLENYQNEDGSVTIPDVLRPYMQNRERI

SEQ ID NO: 185496 - protein, 276 aa, Unknown
  Bacterial polypetide isolated from the Sargasso Sea
LATKTTGSRFVFVKNKLALLERAISNFMLDIHTSKNGYEEISPPLLASENTMFGTGQLPKFENDQFEVKLEEGSGRKFLIPTAEVILTNIVKDKILDLKTLPMRFVASTPCFRKEAGSYGKDTKGMIRQHQFYKVELVSIVEQNKCLEELERMTNCATGILDLLELPYRKMILCSGDMGFSAEKTYDIEVWLPSENKYREISSCSSCSTFQATRMKARYKNSNKETVFVGTLNGSGLAVGRTLIAILENFQQKDGSISIPKVLRPYMNNLEKISLN

SEQ ID NO: 185497 - protein, 167 aa, Unknown
  Bacterial polypetide isolated from the Sargasso Sea
VASTACFRKEAGSYGKDTKGMLRQHQFYKVELVSIVEPEMCEKELSRMISCAEHILKELKLPYRTVMLCSGDMGFSAQKTIDLEVWIPSENTYREISSCSTCGQFQSRRMKAKYKNKNQTDFLGTLNGSGLAVGRTLIAIMENYQDSEGRVIIPDVLRPYMSNIDKI

SEQ ID NO: 185498 - protein, 219 aa, Unknown
  Bacterial polypetide isolated from the Sargasso Sea
LPKFENDQFEIFFDDKNERKFLIPTAEVILTNMVKNQILNINSLPMRLVASTPCFRKEAGSYGKDTKGMIRQHQFYKVELVSIVENNKCLDELERMTTCATKILDDLKLPYRKIILSTGDMGFSAEKTYDIEVWLPSEEKYREISSCSSCGTFQATRMKARYKNKDNNTEFVGTLNGSGLAVGRTLIAILENYQTEDGSIIIPDVLKPYMGNIDKISIN

SEQ ID NO: 185499 - protein, 113 aa, Unknown
  Bacterial polypetide isolated from the Sargasso Sea
DLVLNGLELGGGSLRIHEASLQREVLKTVGLTDKEIDEKFGFLIEALEMGAPPHGGIAFGLDRITMLIIGADSIRETIAFPKNQQAKCLLTNAPSNVSESQLKELDIEITIDE

SEQ ID NO: 185500 - protein, 179 aa, Unknown
  Bacterial polypetide isolated from the Sargasso Sea
MRTDFCGRITEEYLDQEVTVCGWIHRRRDHGGVIFLDVRDLKGICQAVISPDNKDAFALADSCRSEYVIQVTGKVRPRPEGTVNNKMFTGKVEIDVQNINLLNKAETPAFPLDDYQDVNEDVRLKHRVLDLRRPEMNARILKRSQIVEYIRKFLEKNNFNEIETPILTRATPEGARDYV

SEQ ID NO: 185501 - protein, 261 aa, Unknown
  Bacterial polypetide isolated from the Sargasso Sea
ILFLKLFKSFSNKKILHEKFPRITYKDAMLKYGSDKPDLRNPLEISDLTIIFEREDVKFDIFKKLVKSGSLVRALVTKNTKDKPRSFFDSIDRWAKEQGSSGLAYFTLEKDDKINAKGPIGKFFSENALLEIMKLTNANIGDTLFLSCGKKNDVEKILSVARNKIAEDLNLIDNEIFSFCWIIDYPMYEIDEITKKIKFSHNPFSMPQGEINKLDLSNPLNIKAYQYDIVCNGIELSSGAIRNHVPELMYKLFEIAGYSKK

SEQ ID NO: 185502 - protein, 283 aa, Unknown
  Bacterial polypetide isolated from the Sargasso Sea
TPILIKSTPEGARDYVVPSRIKHGGFYALPQSPQQMKQILMVSGFDRYFQIARCFRDEDLRADRQPEHTQLDLEMSFVHQNDVMNLVESLYIKLIKKIDETIKIDNKFIVMTYDEAMKKYGSDKPDLRYSLEMTDLSDIATKIESNVIQNSLKNSSILKGLVAKNWHNLGRKDFDRLTDLVKKQGAGGLIYISIPENIEGKINLEQTAGPLNKFYTQENLDEIISKTNAQPGDVIFMIIGQENIVNSSLSYLRTHIAKEQNLIDDKEMKFLWVTDFPLLRKMT

SEQ ID NO: 185503 - protein, 337 aa, Unknown
  Bacterial polypetide isolated from the Sargasso Sea
FNEFQTPILTSSSPEGARDFLVPSRLNPGKFYALPQAPQQFKQLIMVSGFDKYFQIAPCFRDEDARADRSPGEFYQLDIEMSFVEQEDVFEVVEKLMVNLFTNFSKKKMIYKKFPRIPFKVAMDKYGTDKPDLRNPLIIFDISKIFNRDDVKFEIFKKLLKSGSLIKAIITKKTNTKPRSFFDNIDKWAKEQGWSGLAYFSIEKDENNKILGKGPVGKFFSEDAIKEIMKITSAEIGDSIFMSCSKENEIFEIMSKSRSKIAEDLNIINENSFAFCWITDFPIFEMDQETKKINFSHNPFSMPQGDLNNLDFSNPLDLKAYQYDIVCNGIELSSGAI

SEQ ID NO: 185504 - protein, 302 aa, Unknown
  Bacterial polypetide isolated from the Sargasso Sea
WQAAMDNYGTDRPDTRYQMLLKDLGGVLGDIGFNIFTKAIKSGGNIKSITVKGGNSSISNVRIKPGGDIFQVAQDAGAGGLAFIRVKGDELETIGAIKNNLSEEHIADILKITEAKDGDLILLGAGDKQIVNQSLDRVRQYIAKDLNLIDKSKWNFLWVTDFPMFERNEEENRYEALHHPFCSPKNIKSKNLENLKKEIESSTANAYDLVLNGLELGGGSLRIHEANLQREVLKTVGLTDKEIDEKFGFLIEALEMGAPPHGGIAFGLDRITMLIIGADSIRETIAFPKNQQAKCLLTNAPS

SEQ ID NO: 185505 - protein, 281 aa, Unknown
  Bacterial polypetide isolated from the Sargasso Sea
MIRHYCNQVNDKDIDKKIKIYGWVAKRRDHGGIIFVDLRDHTGILQLVFNPDDKNLFRNAESIRSEYVLCVEGHVNKRLDGAINKEIATGSIEIIVSKLDILNKSDNPPFKVNDPDINEDMRLQYRYLDIRNDAMQKNIRFRSKLVAIIREYFYSKDFVDIETPILTKTTPEGARDYLVPSRVHERRFFALPQSPQLFKQTLMMGAIDKYFQIAKCFRDEDLRSDRQPEFTQLDVELSFVEQNDIISLVEDLCKKIFKDLMDYEDKLVFERMSYDEAMQTY

SEQ ID NO: 185506 - protein, 284 aa, Unknown
  Bacterial polypetide isolated from the Sargasso Sea
SKIENLSNERKLLIQRIEEINSIRKTTSKEIGESKGQPSDSLIKQMKSFGLELSKKSQKLKDIEENLENILLRLPNLPLDSTLIGENDNDNKVLETFNEKDKINSSIPHWDLGEKYKIIDLEKGVKLTGARWYLLAGKGAMLQRALVQWMLNEHVFNNGYKEIAPPYMVNKNTMTGSGNLPKFEETLFSDKNNDLWLIPTGEVSLNNMFGGEIIKHELPLKYVTHTPCFRDEKSSAGRDTRGIKRVHQFEKVELYRFEHPSNSMNAFNEMVSEVSKLCEALNFT

SEQ ID NO: 185507 - protein, 285 aa, Unknown
  Bacterial polypetide isolated from the Sargasso Sea
MSEAKELPMPVFGENDYPEEIRLKYRFLDIRREELHKNIVLRSSIISHIRKLMSDAGFLEMQTPILTASSPEGARDYLVPSRIHPGKFYALPQAPQQFKQLIMAGGFDKYFQIAPCFRDEDARADRSPGEFYQLDMEMAFVEQDDVFNAIEPILHSVFTTFSDFNVTETPFPRITYADAMSRYGTDKPDLRNPINISNLTKEFNDDKVEFSAFKKIIEEGGEVIGIPAPDSSQKPRSFFDNLNNWARKEMNAAGLGYIVFDKSSSGVEGKGPIAKFIPSEIQEMI

SEQ ID NO: 185508 - protein, 250 aa, Unknown
  Bacterial polypetide isolated from the Sargasso Sea
MNRYGSDKPDVRFDLELVELTEVFSGTDFNAFKAPTIKGIKVEGGAEMGRNQLDQLTDKAKSWGAKGLVWIKVGPSGEVNSPVAKFMSEAEISGLLSAMNAKEGDICYLVADNWRRVVHVLGLLRLELGRPPVNEGGLRFLWVVDFPLFEDVDDEGNPLPAHHPFTMPHADDLELLSNSNTPDDLLKVRSQAYDLVLNGWELGSGSVRIHRRDIQQQIFNLLGINEEESQQKFGFLMDAFRYGAPPHAGF

SEQ ID NO: 185509 - protein, 253 aa, Unknown
  Bacterial polypetide isolated from the Sargasso Sea
PRIKYSEAMLKYGTDKPDLRNPLIIKDVTEIFTRDDVKFEIFKKLVKAGSSVRAIVTKQTKNKPRSFFDNIDNWAKEQGSSGLAYFTIEKNKDIQGKGPIGKFFNTDSINRIMKITSAEVGDTVFLSCGKISEVEKILSLAREKIANDLNLIEKNKFAFCWIVDYPMFEKDEESNQIKFSHNPFSMPQGDLNNINFTKPLDLKAYQYDIVCNGIELSSGAIRNHIPELMYKLFEIAGYDKNIVNEKFSGMINA

SEQ ID NO: 185510 - protein, 264 aa, Unknown
  Bacterial polypetide isolated from the Sargasso Sea
MNKYRTHNCSELTENENNKVVTLSGWVHRKRDHGNLLFIDLRDHFGLTQCVVENSNKFFKMLEKIKPESVISVTGKVLKREKGTENLELSTGKIEVSIQSIKILAEANDLPMPVFGEQDYPEDIRLKYRFLDLRRDSMHKNIILRSKVISFIRSEMLKLGFLEFQTPILTSSSPEGARDFLVPSRLNPGKFYALPQAPQQFKQLIMVSGFDKYFQIAPCFRDEDARADRSPGEFYQLDMEMSFVEQEDVFEVIETLMVNLFKKY

SEQ ID NO: 185511 - protein, 127 aa, Unknown
  Bacterial polypetide isolated from the Sargasso Sea
KIKFSHNPFSMPQGDTENLDLSDPLKLKAFQYDIVCNGIELSSGAIRNHKPDLMYKLFQIAGYSKETVNDKFSGMINALSYGAPPHGGIAPGIDRIVMLLAEEKNIREVTMFPMKSKCPRFNDERTI

SEQ ID NO: 185512 - protein, 136 aa, Unknown
  Bacterial polypetide isolated from the Sargasso Sea
TLPKASKKELIENPNDVLAYAYDVVLNGYEIGGGSLRIYDKNMQEAIFEILNISKKEAESKFGFLLKALSSGCPPHGGIAFGLDRIVMLVTDTANIRDVIAFPKTQSATCLLTDAPSKVDKDQLDELKIISTHKEE

SEQ ID NO: 185513 - protein, 288 aa, Unknown
  Bacterial polypetide isolated from the Sargasso Sea
HGNLLFLDLRDNYGVTQCVIENSHKNFNELEKLSLETVIKVEGKVLERSKETINNELNTGEIEISITSYQLLGTTKELPLPVFSDQEYSEEIRLKYRFLDLRRKKIHQNIILRSKVISFIRSEMEKFGFLEFQTPILTSSSPEGARDFLVPSRLNPGKFYALPQAPQQFKQLIMVSGFDKYFQIAPCFRDEDARADRSPGEFYQLDLEMSFVEQEDVFEVVEKLMINIFKKFSKKKLLNQKFPRITYSDAMLKYGTDKPDLRNPLIINDLTEIFKREDVSFEIFKKLV

SEQ ID NO: 185514 - protein, 345 aa, Unknown
  Bacterial polypetide isolated from the Sargasso Sea
YAEEIRLKYRFLDLRRKKIHENIILRSKVISYIRNEMTKLGFLEFQTPILTSSSPEGARDFLVPSRLNPGKFYALPQAPQQFKQLIMVSGFDKYFQIAPCFRDEDARADRSPGEFYQLDLEMSFVEQEDVFNIVEKLMVNTFKNFSDKKLMYDIFPKIPYSEAMLKFGTDKPDLRNPLIINDITEIFSREDVSFDIFKKLVRSGSKVRSITTKNTKDKPRSFFDNIDKWAKEQGASGLAYFTFEKDNKISAKGPVGKFFSEEALLEIMKFTNSEVGDSIFLACGKQNELEKITALARDKIAQDLDLIDDDTFAFCWIVNYPMFEKDELTDKIKFSHNPFSMPQGN

SEQ ID NO: 185515 - protein, 341 aa, Unknown
  Bacterial polypetide isolated from the Sargasso Sea
GWIHRKRDHGNLLFLDIRDNFGITQCVIENKDKNFKILEKLKPESVISLKGDVVKRSKETENEELKTGMIEIKIKNINVLSEAKELPMPVFGEQEYPEEIRLKYRFIDLRRSEMHKNIQLRSKILSFIRSKMTENNFLEFQTPILTASSPEGARDFLVPSRVHPGKFYALPQAPQQFKQMIMISGFDRYFQIAPCFRDEDGRADRSPGEHYQLDMEMSFVEQEDVLKTVEPIFYDLFIKFGNGKKVNKAPFPRLKYKEALSKYGTDKPDLRNPIEITDATEIFKSKEVNLKIFKEIISKGGIVKAIPVPNTISKPRSFFDGLNNWAISEGASGLAYINFEN

SEQ ID NO: 185516 - protein, 328 aa, Unknown
  Bacterial polypetide isolated from the Sargasso Sea
MVSGFDRYFQIAPCFRDEDARADRSPGEFYQLDIEMSFVEQEDVFEVVEKLMVSLFKNFSKKKMMFEKFPRIPFKETMSKYGTDKPDLRNPLLVYDISKVFKRDDVKFEIFKKLFKSGSLIKSIVTKKTNTKPRSFFDNIDKWAKEQGWNGLAYFSIEKDEKGKIFGKGPVGKFFSEDSLKEIIKITSAEVGDSIFMSCSKENEVNDIMSKSRNKIGEELGIIDQNSFAFCWITDFPIFELDKETSKINFSHNPFSMPQGDLKNLDLSKPLELKAYQYDIVCNGVELSSGAIRNHIPELMYKLFSIAGYDKITVDEKFSGMINALSYG

SEQ ID NO: 185517 - protein, 75 aa, Unknown
  Bacterial polypetide isolated from the Sargasso Sea
FLISALQHGCPPHAGLAIGFDRMIMLMTGSDSIRDVIAFPKTQTASCLLTEAPGQAAQEQLEELHIRFHGLEKED

SEQ ID NO: 185518 - protein, 229 aa, Unknown
  Bacterial polypetide isolated from the Sargasso Sea
MRTNFCGELNKKFIGKEVTICGWIHRRRDHGGVIFLDIRDTTGIVQIVIRPETKETFKIAEQVRSEFVLKATGNVEERPEDSENTTLTTGEIEIDCSSIEVLNTAETPAFPLDQSSEVGEDVRLKHRTLDLRRPIMQENLRLKSKLTKSIRDYLEKHSFVDIETPILTKATPEGARDYLVPSRTNPGNFFALPQSPQLFKQMLMISGFDRYYQIARCFRDEDLRADRQP

SEQ ID NO: 185519 - protein, 95 aa, Unknown
  Bacterial polypetide isolated from the Sargasso Sea
KVVLSLLGINEEQAEEKFGFLTSALQHGCPPHAGLAIGFDRMIMLMTNSESIRDVIAFPKTQTASCLLTDAPGEASNEQLDELHIKFHGLEKEKK

SEQ ID NO: 185520 - protein, 228 aa, Unknown
  Bacterial polypetide isolated from the Sargasso Sea
GGGSRNFCDRMNSFAQKEGLPGMGYIFWREIDGKIDAAGPLAKNIGEEKSELIRQRLNLNIGDSAFFLGGKPSNFEGFSARARNHIGNELKLIKENVFAFAWIIDFPMYEKDSDKDTIDFSHNPFSMPQGGIKSLMGDPLEVKGYQYDLACNGYELLSGAIRNHELETMFKAFEIAGYSKDEVSSKFQGIIEGLKYGPPPHGGCALGIDRMIMLLADEENIREVIIFQ

SEQ ID NO: 185521 - protein, 335 aa, Unknown
  Bacterial polypetide isolated from the Sargasso Sea
EFTQIDIEMSFVDEEDIFSHMEGLTRHIFETVSKINLPDSFPRITYQEAMEIYGSDKPDLRYGLKLVDLKHYTDVSDFKAFSTVERVKGIIVNDGGKYSRKMIDELTDFIKKYKAKGLAWMKLKDSSFDGGISKFFSVELQEKMQNELDIENGDILFMVGDDSKIVLNALGHLRIEIAKREDLINKNKYCPIWVTEFPMFEYDDENERYVAMHHPFTAPRIEDINLLDTEPSRALSRGYDLTMNGYEIAGGSIRIHSTEVQEKVFSLLGFSKKEAVDKFGFLVEALTYGAPPHGGIAFGFDRLVMLLAGTENIRDVIAFPKTTSAASLMDESPSS

SEQ ID NO: 185522 - protein, 307 aa, Unknown
  Bacterial polypetide isolated from the Sargasso Sea
CFRDEDARADRSPGEFYQLDLEMSFVEQEDVFQVVEKLLINTFKKFSNKKLVSDKFPKISYADAIANYGSDKPDLRNPLIINDITDIFSREDVSFDIFKKRVKLGNNVKCIVTKNTKNKPRSFFDNIDKWAKDQGASGLAYFTLEKDKEISGKGPIGKFFSSESLEYIMKITGAKIGDSIFLACDKKKELEKITSLARDKIARELDLIDDNTFSFCWIVDYPMFEKDDQTNKINFSHNPFSMPQGDINKINFEKPLDILAFQYDIVCNGIELSSGAIRNHIPELMYKLFSIAGYGKKQVDEKFSGMI

SEQ ID NO: 185523 - protein, 243 aa, Unknown
  Bacterial polypetide isolated from the Sargasso Sea
KPRSFFDNIDKWAKDQGASGLAYFTFEKDNKISAKGPVGKFFSEEALLEIMKFTNSEVGDSIFLACGKQNELEKITALARDKIAKDLDLIDDDTFAFCWIVDYPMFEKDELTNKIKFSHNPFSMPQGELKDKDFENPLDILAYQYDIVCNGIELSSGAIRNHKPDLMYKLFSIAGYNKGEVDEKFSGMINALRYGAPPHGGIAPGIDRIVMLLANEKNIREVTMFPMNQNAQDLMMNAPSEIN

SEQ ID NO: 185524 - protein, 305 aa, Unknown
  Bacterial polypetide isolated from the Sargasso Sea
IFSDQEYAEEIRLKYRFLDLRRKKIHENIILRSKVISYIRNEMTKLGFLEFQTPILTSSSPEGARDFLVPSRLNPGKFYALPQAPQQFKQLIMVSGFDRYFQIAPCFRDEDARADRSPGEFYQLDLEMSFVEQEDVFSVVEKLMVNTFKNFSTKKLMFDKFPKISYKEAMLKYGTDKPDLRNPLIINDITEIFTREDVSFEIFKKLVKSGSKVRCIITKNTKDKPRSFFDNIDKWAKEEGASGLAYFTFEKDKDISAKGPIGKFFSQDALAEIMKKTNCEIGDSIFMACGKQDELEKITALARDR

SEQ ID NO: 185525 - protein, 220 aa, Unknown
  Bacterial polypetide isolated from the Sargasso Sea
MRNKICEELNNTDIGKLVNLCGWVDRRRDHGGVIFIDLRDHSGFLQITINPDDGADLFKQAETLRNETVIMVSGIINERPKDSINANLSTGELELKVKDLQVLNQIKNNLPFPVSIHDYENTKEELRLKYRYLDLRRGKLLENLKTRHKIIKVAREFLDNFGFTEVETPLLTKSTPEGARDFLVPARLSNGEFFALPQSPQLFKQLLMVGGLDKYYQIAK

SEQ ID NO: 185526 - protein, 270 aa, Unknown
  Bacterial polypetide isolated from the Sargasso Sea
EKFPRITYEDAMLKYGSDKPDLRNPLEISDLTIIFEREDVKFDIFKKLVKSGFLVRALVTKNTKDKPRSFFDGIDRWAKEQGSSGLAYFTLEKDDKINAKGPIGKFFSENALLEIMKLTNANIGDTIFLSCGKKNDVEKILSVARNKIAEDLNLIDNKIFSFCWIIDYPMYEIDETTKKIKFSHNPFSMPQGEINKLDLSNPLNIKAYQYDIVCNGIELSSGAIRNHVPELMYKLFEIAGYSKNDVNSKFSGMINALSYGAPPHGGIAPG

SEQ ID NO: 185527 - protein, 143 aa, Unknown
  Bacterial polypetide isolated from the Sargasso Sea
SFHHAHLEDLEAYGQDQPERIRSRAYDITLNGVEIGGGSIRIHRGDIQDQVFKLLKLEADEIESKFGFLMKALSYGAPPHGGIALGFDRIMMFLLNTESIRDVIAFPKTQRASCLMTEAPSDVSEDQLEELQLRIRASAAKQN

SEQ ID NO: 185528 - protein, 342 aa, Unknown
  Bacterial polypetide isolated from the Sargasso Sea
RQLIKIFILGEIEVKIDSYTLLSISEVLPLPVNSDIEYGEEVRLKNRFLDLRRNKLHKNILLRSKIISSIRKKMNSRGFIEFQTPILTSTSPEGARDYLVPSRIHHGQFYALPQAPQQFKQLLMMAGFDKYFQIAPCFRDEDSRADRSPGEFYQLDFEMSFVTQDDVFNAIEPVLYEVFDENKNYHTNVNVTVSSYPFRRIPYEESLEIYGTDKPDLRNPLSIRDCTEIFKGSDFKIFSSLIEKNYKVKGIVVNNTSNKPRSFFDKLNNWAREEGAAGLGYISYTDNEHKGPIAKNLDTNRLNQFKLKDSESIFFICDNQKEAQLFAGKVRDKLCLDLNLLN

SEQ ID NO: 185529 - protein, 258 aa, Unknown
  Bacterial polypetide isolated from the Sargasso Sea
MVSGFDKYFQIAPCFRDEDSRADRSPGEFYQLDVEMSFVEQEDVFEAVQPVIYNVFKKFTKKEVVKDFVKITFNDAMLKYGTDKPDIRYDVFIQDVTDIFQNSNFKIFASNIEKGSVVRGVPGVDCGSRAFADKMNSWAQSQGAPGMGYIIFSDNEARGPIANALGLEKVQILKEKFNLSDGDALFFSCAIEKEAADLAGKARTKIATEKKMIDENQFKFCWIVDYPMFEKNEITGEIDFSHNPFSMPQGGMKSLIEK

SEQ ID NO: 185530 - protein, 277 aa, Unknown
  Bacterial polypetide isolated from the Sargasso Sea
SLFASLIASKNSVVRAVPGPKCGSRSVADRMNSWAQGEGAPGMGYIIYGDGEAKGPVAGALGKEKCDEIKNRLGLQDGDAAFFSCSNVKDAADLAGKARIKIGIDQGISDKDGYKFCWIIDFPMYELDEKGKIEFSHNPFSMPQGGLEALNNQNPLDIKAWQYDLVCNGVELSSGAIRNHLPEVMYKAFEIAGYSKEIVDANFSGMISAFKFGAPPHGGFAPGIDRIVMLIANEPNIREVILFPMNGKAEDLMMGAPSEVSDDQLKELNIKKNKIIK

SEQ ID NO: 185531 - protein, 132 aa, Unknown
  Bacterial polypetide isolated from the Sargasso Sea
LVNLCGWVDRRRDHGGVIFIDLRDHSGFLQITINPDDGADLFKQAETLRNETVIMVSGIINERPKDSINTNLSTGELELKVKDLQILNQIKNNLPFPVSIHDYENTKEELRLKYRYLDLRRGKLLKNLKTRH

SEQ ID NO: 185532 - protein, 246 aa, Unknown
  Bacterial polypetide isolated from the Sargasso Sea
KMSDLGFLEFQTPILTSSSPEGARDFLVPSRLNPGKFYALPQAPQQFKQLIMVSGFDKYFQIAPCFRDEDARADRSPGEFYQLDLEMSFVEQEDVFQVVEKLMISLFKNFSSKKLLYEKFPRISYEEAMLKYGTDKPDLRNPLLINDITNIFTREDVKFDIFKKLVKSGSSVKAILTKKTKDKPRSFFDNVDKWAKDQGASGLAYFTIEKDQNLSAKGPVGKFFSEDSIKDIMKIKNAEVGDSLFL

SEQ ID NO: 185533 - protein, 184 aa, Unknown
  Bacterial polypetide isolated from the Sargasso Sea
ITSLAREKIAKDLGLIDENIFAFCWIVNYPMFEKDEQTKKIKFSHNPFSMPQGDLNKLDFEKPLDILAYQYDIVCNGIELSSGAIRNHIPELMYKLFSIAGYNKKDVDTKFSGMINALSYGAPPHGGIAPGIDRIVMLLANEKNIREVTMFPMNQNAQDLMMNAPSKIDEDQLKELNLYIKLKK

SEQ ID NO: 185534 - protein, 109 aa, Unknown
  Bacterial polypetide isolated from the Sargasso Sea
YGVELSSGAIRNHKPEIMYKAFEIAGYKKDEVEEKFSGMLNALKFGAPPHGGSAPGIDRIVMLLADEPNIREVIAFPMNQQAMDLMMEAPAEINKERLEELGLRLIEKN

SEQ ID NO: 185535 - protein, 300 aa, Unknown
  Bacterial polypetide isolated from the Sargasso Sea
MPQSPQLFKQILMVSGMDKYFQIVKCFRDEDLRQDRQPEFTQIDIEMSFGNEKILFQMIEEMMATIFKEVLNEKIPTPFPVLKYQDAIDRFGTDKPDMRIDMEIVDLAKIVQGTKFKVFAQVLESGGQIRALNIKNSADALSRKALDDLTEIAKTYGAKGMAWIKVQENELQSPIIKFFEQEMLDRMLEKLESKPGDTIVFIADTPKIVADALAHLRLAIAKLLNLVDESKNAFIWITEFPLVEYDEIEKRHNAMHHPFTAPREEDLDKFESDPRSIKARAYDLVLNGNEIGGGSIRSTK

SEQ ID NO: 185536 - protein, 308 aa, Unknown
  Bacterial polypetide isolated from the Sargasso Sea
FYALPQAPQQFKQLLMMAGFDKYFQIAPCFRDEDSRADRSPGEFYQLDFEMSFVTQEDVFNAIEPVLYEVFDENKNYHTDEKVTVSSYPFKRIAYDEALELYGTDKPDLRNPLLIKDCTDVFQGSDFKIFSNLIEKKYKVKGIVVSNTANKPRSFFDKLNNWAREEGAAGLGYISYSEDEHKGPIAKNLDNERLKQLKLKDNESIFFVCDNQKDAQLFAGKVRDKLCLDLNLLNKNAFEFCWIVDFPMYEIDEKTNKIEFSHNPFSMPQGEMDSLLNKDPLDIKAYQYDIVCNGVELSSGAIRNHRPD

SEQ ID NO: 185537 - protein, 254 aa, Unknown
  Bacterial polypetide isolated from the Sargasso Sea
EKVRNESVITINGKVVQRSDDTINKVLPTGKIEVYVDTLEVIGSSDDIPLPVFGEPDYPEEIRLKYRFLDLRRETLHKNIILRSEIINFIRSKMIENDFLEIQTPIMTASSPEGARDYLVPSRVHQGKFYALPQAPQQFKQLLMTSGFDKYFQIAPCFRDEDARADRSPGEFYQLDIEMSFVNQEDIFESVEPLLRDVFEKFSENMSVNKKFPRISYAESIQKYGTDKPDLRVEIELDDITEVFVDSGFKIFAN

SEQ ID NO: 185538 - protein, 237 aa, Unknown
  Bacterial polypetide isolated from the Sargasso Sea
MNTYRTHFCSDLTINNLNQEVKLSGWIDTIRDHGNLIFIDLRDNYGITQCVIDSQKKFFEEISKLNNECVITIEGQVIKRSDETVNQILPTGEIEIQINSYKLLSNSEILPLPVNSDIDYGEEVRLKNRFLDLRRNKLHKNILLRSKIISSIREKMTSRGFIEFQTPILTSTSPEGARDYLVPSRIHHGQFYALPQAPQQFKQLLMMAGFDKYFQIAPCFRDEDSRADRSPGEFYQL

SEQ ID NO: 185539 - protein, 167 aa, Unknown
  Bacterial polypetide isolated from the Sargasso Sea
QNLFAFCWVVDYPMYEIDDKSGKIKFSHNPFSMPQGDLSKLNLDKPLDIIAYQYDIVCNGIELSSGAIRNHIPDLMYKLFAVAGYDKKSVDEKFSGMINALGYGAPPHGGIAPGIDRIIMLLANEKNIREITMFPLNQNAQDLMMNAPSNVDEGQLKDLNIEIIKKK

SEQ ID NO: 185540 - protein, 303 aa, Unknown
  Bacterial polypetide isolated from the Sargasso Sea
LKNNILLRSEIIQFIRNEMIRLNFKEFQTPILTASSPEGARDYLVASRLHKGKFYALPQAPQQFKQLAMVSGFDKYFQIAPCFRDEDARADRSPGEFYQLDIEMAFCNQEDIFKIVEEVIYNTFTNFSKKKITTLGFPRIPYQDAIDKYGTDKPDLRNPLYLRDATGIFKDQRSNFNIFKNIINKGGVVKAIVAPVGAEKPRSFFDKLNNWAKEQGSSGLGYINFEKNDNDELIGKGPIANNLKDDLLKSLIKDLHINYDDAVFFICDEYDKATRFGSIVINKIGSDLKLINQNEFNFCWIVD

SEQ ID NO: 185541 - protein, 245 aa, Unknown
  Bacterial polypetide isolated from the Sargasso Sea
MNKFRSHNCSELREKDIGKKVKLSGWLHRKRDHGNLLFLDLRDHYGITQCVIENKEKNFQTLEKLKPESVILIEGDVVKRTKETENKDLETGLIEIKIKNFEILSTAEELPMPVFGEQDYPEEIRLKYRFIDLRRKEMHNNIELRSKIISFLRNKMIENNFLEFQTPILTASSPEGARDFLVPSRTHQGKFYALPQAPQQFKQMVMISGFDRYFQIAPCFRDEDGRADRSPGEHYQLDMEMSFVE

SEQ ID NO: 185542 - protein, 128 aa, Unknown
  Bacterial polypetide isolated from the Sargasso Sea
KLDLSNPLNIKAYQYDIVCNGIELSSGAIRNHIPELMYKLFEIAGYSKNDVNSKFSGMINALSYGAPPHGGIAPGIDRIVMLLANEKNIREVTMFPMNQNAQDLMMNAPSEISDNQLKELNLNIKKKK

SEQ ID NO: 185543 - protein, 251 aa, Unknown
  Bacterial polypetide isolated from the Sargasso Sea
MNKYRTHNCNELRKSSVGQKVIVSGWINKKRDHGNLLFIDLRDNYGITQCIIDRDNLKFNELEKIQLETVVKIEGEVVNRSTETINKEIETGEVEVSIKNFEVIGTCKELPLPVFSDQEYSEEIRLKYRFLDLRRKKIHQNIILRSKVISFIRSEMNKLGFLEFQTPILTSSSPEGARDFLVPSRLNPGKFYALPQAPQQFKQLIMVSGFDKYFQIAPCFRDEDARADRSPGEFYQLDLEMSFVDKKTYLM

SEQ ID NO: 185544 - protein, 298 aa, Unknown
  Bacterial polypetide isolated from the Sargasso Sea
NNTDIGKLVNLCGWVDRRRDHGGVIFIDLRDHSGFLQITINPDDGADLFKQAETLRNETVIMVSGIINERPKDSINTNLSTGELELKVKDLQILNQIKNNLPFPVSIHDYENTKEELRLKYRYLDLRRGKLLKNLKTRHKIIKVAREFLDNFGFTEVETPLLTKSTPEGARDFLVPARLSNGEFFALPQSPQLFKQLLMVGGLDKYYQIAKCFRDEDLRADRQPEFTQLDIEMSFISEEEIISFNESLIKKIWKEVLNINFNNAFPRMTWHAAMDNYGTDRPDTRYQMLLKDLGGVLG

SEQ ID NO: 185545 - protein, 265 aa, Unknown
  Bacterial polypetide isolated from the Sargasso Sea
VSFEIFKKLVKSGSRVRCIVTKNTKDKPRSFFDNIDKWAKGEGASGLAYFSIDKDKDISAKGPIGKFFSQDALLEIMKKTNCEIGDSIFMACGKLGELEKITALARDKIAKDLDLIDENIFAFCWIVDYPMFEKDEITNKIKFSHNPFSMPQGNLSEKDFESPLEILAYQYDIVCNGIELSSGAIRNHKPKLMYKLFSIAGYDKKQVDEKFSGMINALSYGAPPHGGIAPGIDRIVMLLANEKNIREVTMFPMNQNAQDLMMNAP

SEQ ID NO: 185546 - protein, 287 aa, Unknown
  Bacterial polypetide isolated from the Sargasso Sea
VFSDQEYAEEIRLKYRFLDLRRKKVHENILLRSKVISYIRKEMTNLGFSEFQTPILTSSSPEGARDFLVPSRLNPGKFYALPQAPQQFKQLIMVSGFDKYFQIAPCFRDEDARADRSPGEFYQLDLEMSFVEQEDIFEVVEKLMLNLFKKFSNKKMLFEKFPKISFYDTMLKYGTDKPDLRNPLVISDLTSIFERQDVKFDIFKKLVKSGSIVRAIITKNTKDKPRSFFDGIDKWAKEQGASGLAYFTFEEDKNISAKGPVGKFFSEESLKEIMKITGAKLGDSIFF

SEQ ID NO: 185547 - protein, 247 aa, Unknown
  Bacterial polypetide isolated from the Sargasso Sea
DLTDKAKKYGAKGLAWMKFQDGNFNGGISKFFSQSLQKNISDKLKVENDDILLLIGDDKNIVTKSLGKLRTIIALKENLANENEFKPLWVTEFPMFDFDDENNRYVAMHHPFTAPRESDIEKLDSDPKRALSRGYDLTMNGHEIAGGSIRIHSPEVQEKVFSLLGLTQEEAVDKFGFLVEALRYGAPPHGGIAFGFDRLVMLLAGTENIRDVIAFPKTTSATSLMDDSPSNVDNHQLQDLGLEIKKD

SEQ ID NO: 185548 - protein, 272 aa, Unknown
  Bacterial polypetide isolated from the Sargasso Sea
LEMAFVEKEDIFDVTEPIFYDLFVKFGKGKKVNKTPFPKITYKESLNKYGTDKPDLRNPIELADVTNLFSSDQTTLKIFKENIKKGGIVKAIPVPNTNAKPRSFFDNLNNWAISEGASGMAYITFEKNGNKVVGKGPIAKFFSEKAISELMKQCKLTEKDSVFFVCNQPSEAIKFSGIARQKIGNELKLIDEKKFIFCWIVDYPMYSYDEKEKKLDFSHNPFSMPKEKMSEFDKKEPLDILAHQYDLVCNGYELSSGAIRNHVPEYLFKVFE

SEQ ID NO: 185549 - protein, 105 aa, Unknown
  Bacterial polypetide isolated from the Sargasso Sea
GVPYTRKDIQQKVFSLLNLSNQEIESKFGFLMEALTYGAPPHGGIALGFDRIMMFLLKTDSIRDVIAFPKTQKAGCLMTDAPSAVDAEQLDDLHIRVKASAQQAE

SEQ ID NO: 185550 - protein, 248 aa, Unknown
  Bacterial polypetide isolated from the Sargasso Sea
MLRSHTCGELNLSDLDKEVTLSGWVQKSRDLGGMTFVDLRDRYGITQLVFNMETNESLCLEARKLGREFVIQVKGKVIERSSKNKNIPTGEVEIEILDLVILNAAKTPPFTIENDTDGGDDLRMKYRYLDLRRNPIRENMILRSKVAIETRKYLADQNFIEVETPVLIKSTPEGARDFVVPSRMNEGQFYALPQSPQTFKQLLMVSGFDKYFQIVKCFRDEDLRADRQPEFTQIDCEMSFVEQGRHLK

SEQ ID NO: 185551 - protein, 271 aa, Unknown
  Bacterial polypetide isolated from the Sargasso Sea
MNKYRSHNCSELNEKDNLKIVSLSGWLHRKRDHGNLLFIDLRDHYGLTQCVIENNNKFFNLLEKAKPETILNIKGKVVKREKGTENLELGTGKIEVNIQEAKILSHSKDLPMPVFGEQDYPEDIRLKYRFLDLRREEMHRNIILRSKVISYIREEMLKLGFLEFQTPILTSSSPEGARDFLVPSRLNPGEFYALPQAPQQFKQLIMVSGFDKYFQIAPCFRDEDARADRSPGEFYQLDLEMSFVEQEDVFEVVEKLMKNVFKKFSSKKINE

SEQ ID NO: 185552 - protein, 173 aa, Unknown
  Bacterial polypetide isolated from the Sargasso Sea
NLVDKNQFAFCWIVDYPMYEIDSLTKKIKFSHNPFSMPQGNIEKLDFNNPLKIKAFQYDIVCNGVELSSGAIRNHIPSLMYKLFSIAGYNKKQVEEKFSGMLNALSYGAPPHGGIAPGIDRIVMLLANEKNIREVTLFPMNQNAQDLMMQAPSEVENKQLKELGIKTDIKKKD

SEQ ID NO: 185553 - protein, 200 aa, Unknown
  Bacterial polypetide isolated from the Sargasso Sea
NDSIFFICDKLNEAQLFSGKVREKICNDLNLLNKNSFEFCWIVDFPMYEIDEKTNKIQFSHNPFSMPQGEMEALEKKDPLDIKAYQYDIVCNGVELSSGAIRNHKPEIMYKAFDIAGYSKEDLEEKFSGMLNALKFGAPPHGGSAPGIDRIVMLLADEPNIREVIAFPMNQQAMDLMMDAPASIDKDRLEELGIKLIDKN

SEQ ID NO: 185554 - protein, 213 aa, Unknown
  Bacterial polypetide isolated from the Sargasso Sea
ERTEAIREQLGLSVGDAAFFLGGTPKSFERVAGKARNVIGDELNLIDKNRFAFAWIVDFPIFEKDDETGKIDFEHNPFSMPQGGLDALNGDPLSVLGYQYDLACNGFELVSGAIRNHQLDLMFKAFEIAGYGEDEVRRRFGGMVNAFQFGAPPHGGCAAGIDRIVMLLANQENIREVIMFPMNQRAEDLMMGAPSEPTSEQLMELNLRTMPNS

SEQ ID NO: 185555 - protein, 294 aa, Unknown
  Bacterial polypetide isolated from the Sargasso Sea
LEFQTPILTSSSPEGARDFLVPSRLNPGKFYALPQAPQQFKQLIMISGFDKYFQIAPCFRDEDARADRSPGEFYQLDIEMSFVEQEDVFLVVEKLMLLLFKKFSSKKILYEKFPRITFKDALLKYGTDKPDLRNPLEICDLTSIFTREDVKFEIFKKLVKSGSIVRAIKTTNTKDKPRSFFDGIDKWAKDQGASGMAYFTIENDKELSAKGPVGKFFSGDSLKEIMKIMNANIGDSIFFLCNKEKEVLKLISSAREKIAQDLNLINEDSFAFCWIIDYPMFEIDENSKKIQFSH

SEQ ID NO: 185556 - protein, 172 aa, Unknown
  Bacterial polypetide isolated from the Sargasso Sea
MDLIDNETFSFCWIVDYPMYEIDETTKKIKFSHNPFSMPQGEINQLDLSNPLNVKAYQYDIVCNGIELSSGAIRNHIPELMYKLFEIAGYSKNDVNIKFSGMINALSYGAPPHGGIAPGIDRIVMLLANEKNIREVTMFPMNQNAQDLMMNAPSEISDEQLKELNLIIKKKK

SEQ ID NO: 185557 - protein, 152 aa, Unknown
  Bacterial polypetide isolated from the Sargasso Sea
LEALHHPFCAANRDDLGNDPQRWAETLPAARAQAYDLVLNGLELGGGSLRIHDAALQQQVLRTIGLPEQEAQEQFGFLLEALEMGAPPHGGIAFGLDRMVMLLAGEDSIRDTIAFPKTQQARCLMTAAPGGASERQLEELHVASTWEEPEEN

SEQ ID NO: 185558 - protein, 276 aa, Unknown
  Bacterial polypetide isolated from the Sargasso Sea
MNKYRTHNCSELNEKNIGKKIKLSGWVHRKRDHGNLLFVDLRDHFGITQCVIENKDKDFKILEKIKPESVIMVEGSVVKRSNETQNKELETGLIEVKINNVKILSEAQELPLPVFGEQEYPEDIRLKYRFIDLRRNEMHENIKLRSNILSFIRSKMIENNFLEFQTPILTASSPEGARDFLVPSRTHPGKFYALPQAPQQFKQMIMISGFDRYFQIAPCFRDEDGRADRSPGEHYQLDMEMSFVEQEDILKVVEPIFYDLFKEFGNGKKINKFPFQ

SEQ ID NO: 185559 - protein, 249 aa, Unknown
  Bacterial polypetide isolated from the Sargasso Sea
KMNNLTDIAKTYGAIGLAWFKVGDNELSGGISKFFDNDLALEMIETLNLSENDILFIVADSHKVACTALGAIRIEIAKHLNLIDVDVFKPVWITDFPMFDYDDMDQLTPMHHPFTAPKIDNINDLNLDQKNILSRAYDLTINGNEVAGGSIRNYDPKIQSKIFELLKMNKDEIDSKFGFFIEALKYGTPPHGGIAFGFDRLVMLLSGSDNIRDVIAFPKTTSANSLMDNSPSNVSNLQLEELNIKINES

SEQ ID NO: 185560 - protein, 119 aa, Unknown
  Bacterial polypetide isolated from the Sargasso Sea
MSKDNFIEVETPILMKSTPEGARDFLVPSRIHQGRFYALPQSPQTYKQLLMVSGFDRYFQICKCFTDEDFRADRQPEFTQVDIEMSFVDQNDIIHMATELITNIWKDTIGVDLPEEFPI

SEQ ID NO: 185561 - protein, 290 aa, Unknown
  Bacterial polypetide isolated from the Sargasso Sea
KVFEKFSAKKVPKSPFPRITYADSMKMYGTDKPDLRNPIVLSNLTSIFSSPEVSFEAFKKLIKDGAEVIGIPCPKGSSQARKFFDSMNNWAIKEMNAPGLGYIIFEETNGTLVAKGPIAKFIPEKHLKEIFELSNLSYGDAIFFSCSQPKSAYELASASRDRIGLELNIIEKDVFRFCWIVDFPMYEFDEQAKKIDFSHNPFSMPQGGLKSLESMNPLDILGYQYDIVCNGIELSSGAIRNHVPEIMYKAFEIAGYSKEEVVEKFGGMINAFSYGVPPHGGIAPGIDRII

SEQ ID NO: 185562 - protein, 318 aa, Unknown
  Bacterial polypetide isolated from the Sargasso Sea
GKKVNKTPFIRLKYKESLEKYGTDKPDLRNPIELKDVTEIFKSEDVKLKIFKEIISKGGIVKAIPVPNTNKQPRSFFDNLNDWAISEGASGLAYITFEKSQNRVIGKGPIAKFFSEESISNLISKCKISDQDSIFFVCNKEKEAIKFSGVAREKIATELKLIDENKFHFCWITDYPMYEFDENEKKIDFSHNPFSMPQTKLEEFDKADPLKILAYQYDLVCNGYELSSGAIRNHIPEFLFKVFEKVGYSKKDVEKNFSGMIKALSYGAPPHGGMAPGIDRIVMLLANQKNIREITLFPLNQNAEDLLMEAPSEVSDKQ

SEQ ID NO: 185563 - protein, 273 aa, Unknown
  Bacterial polypetide isolated from the Sargasso Sea
SFLRNKMIENNFLEFQTPILTASSPEGARDFLVPSRTHQGKFYALPQAPQQFKQMVMIAGFDRYFQIAPCFRDEDGRADRSPGEHYQLDMEMSFVEQEDIFKIVEPIFYELFKKFGKNRTVNKHPFPRITYKDALNKYGTDKPDLRNPIELVDLTSLFSSEEVTLKIFKENIKKGNIVKAIPVKNTDSKPRSFFDNLNNWAISEGASGMAYITFEKKAGKIFGKGPIAKFFSENAIKKLLQTCKLSEKDSVFFVCNNPLEAFKFSGIARQKIG

SEQ ID NO: 185564 - protein, 104 aa, Unknown
  Bacterial polypetide isolated from the Sargasso Sea
PVFSDQEYSEEIRLKYRYLDLRRKKIHENIILRSKVISFIRNEMNKFGFLEFQTPILTSSSPEGARDFLVPSRLNPGKFYALPQAPQQFKQLIMVSGFDKYFQI

SEQ ID NO: 185565 - protein, 280 aa, Unknown
  Bacterial polypetide isolated from the Sargasso Sea
IKNLTECFIDSGFKIFENNIRNGCVVKGIRAPNSAEKPRTWFDKLNNWARENGQKGLGYVIYSENEFKGPIANNLKEKNLKLISKLTALENGDSVFFISDKEDHANKFASIVRNELCNQLDLLKTNEFKFCWIVDYPMYEINPTTNKIDFSHNPFSMPQGGLESLKNKNPLDVLAWQFDIVCNGIELSSGAIRNHKPEIMVKAFEIAGYDIDQLKKKFGFLFNAFKFGAPPHGGSAPGIDRMIMLLADEENLREVVAFPMNQQAEDLMLCSPTEIPEKHL

SEQ ID NO: 185566 - protein, 208 aa, Unknown
  Bacterial polypetide isolated from the Sargasso Sea
MIKRTHTCADLSKDNLKQEISLNGWISKSRDLGGLIFIDLKDRYGITQIVFNEETNKDAFDKVKPLGLQDVIGVTGVVVPRPEDAVNKDMKTGAIDVEVSQIEIYNEADPMPFDVNDRYSAMEENRLKFRYLELRTDEMQNNLKVRHQTALSVRNFLSSENFLEIETPILMKSTPEGARDFLVPSRIHKGKFYALPQSPQTYKQLLMV

SEQ ID NO: 185567 - protein, 197 aa, Unknown
  Bacterial polypetide isolated from the Sargasso Sea
MRSNGCGDLREQNIDNEVQLCGWVDRRRDHGGVIFIDLRDRSGTVQITVDPDLGAEAFTVAEHLRSETVLQVGGKVRARPAESLNDKLATGAVEVLASGITVLNSVKGTLPFPVSVHDEENTREELRLRHRYLDLRRKRMNDNLRLRAKTIQAARRFLEDEGFIEVETPVLTRSTPEGARDYVLPSRVCGGEWFALP

SEQ ID NO: 185568 - protein, 173 aa, Unknown
  Bacterial polypetide isolated from the Sargasso Sea
ALDLSITNSFEFCWIVDFPLFEEDEETGGLQFSHNPFSMPQGGIDSLNKDDPLEVLGFQYDIVCNGVELSSGAVRNHIPEIMYKAFEIVGKNKEFVDENFGGMINAFKFGAPPHAGIAPGIDRIVMLLANAQNIREVILFPMNQGAEDLMMEAPSTVSNEQLRELGLRIIPNE

SEQ ID NO: 185569 - protein, 293 aa, Unknown
  Bacterial polypetide isolated from the Sargasso Sea
KEFCDETLDKFEVLNWHDAMEEYGCDKPDLRIPLKLIEISDLVKDEEFKVFAEPAKDQNSRVVAMRVSNGNSLSRGQIDDYTKFVSKLGAKGLAYIKINDVKDLENGIQSPILKFLKSETISNIVDVLKVKTDDLIFFGAGPQSVVNLSMSSLIKKLGEDLNLYSSKWAPCWIVNFPMFEENAEGDLTPLHHPFTLPQCSKKELLEDPKKSIAHAYDVVLNGYEIGGGSLRIFDKDMQQSIFSILNISKEEADKKFGFLLKALSSGCPPHGGIAFGLDRIIMLVTNTTNIRDV

SEQ ID NO: 185570 - protein, 298 aa, Unknown
  Bacterial polypetide isolated from the Sargasso Sea
DLGEVLGDIGFNIFTKAIKSGGYIKSITVKGGNLSISNVRIKPGGDIFQVAQDSGAGGLAFIRVKGDELETIGAIKNNLSEEHIADILKITEAKDGDLILLGAGDKQIVNQSLDRVRQYIAKDLNLIDKSKWNFLWVTDFPMFERNEEENRYEALHHPFCSPKNIKSKDSENLKKEIENSTADAYDLVLNGLELGGGSLRIHEANLQREVLKTVGLTDKEIDEKFGFLIEALEMGAPPHGGIAFGLDRITMLIIGADSIRETMAFPKNQQAKCLLTNAPSNVSESQLKELDIEITIDE

SEQ ID NO: 185571 - protein, 273 aa, Unknown
  Bacterial polypetide isolated from the Sargasso Sea
TKFSKFKIQNEKFPKITFAEAMLKYGTDKPDLRNPLLIYEVSDVFKRDDVKFDIFKNLVDKGNVVRAIIAPQTSDKPRSFFDNIDKWSKDQGASGLAYFTLEQKNDLSAKGPIGKFFSSDSLKEIIKITGAKVKDTIFFSCGKKKEVENILSLARNKIAEELKLINHNQFSFCWIIDYPMYEINEETKKIQFSHNPFSMPQGPIEKLDFKNPLNIKAYQYDIVCNGIELSSGAIRNHVPDLMYKLFNLAGYDKNAVDEKFSGMINALSYGAPP

SEQ ID NO: 185572 - protein, 144 aa, Unknown
  Bacterial polypetide isolated from the Sargasso Sea
IEFSHNPFSMPQGEMDSLLNKHPLDIKAYQYDIVCNGVELSSGAIRNHRPDIMYKAFEIAGYKKEELESKFSGMLNAMKFGAPPHGGSAPGIDRIVMLLANEPNIREVIAFPMNQQAIDLMMNAPAPVDKERLEELGLKLVDKN

SEQ ID NO: 185573 - protein, 283 aa, Unknown
  Bacterial polypetide isolated from the Sargasso Sea
LSGWVHRKRDHGGLLFIDLRDHFGITQLVFDPDSSAFQEAEKVRNESVITINGKVVQRSDDTINKVLPTGKIEVYVDTLEVIGSSDDIPLPVFGEPDYPEEIRLKYRFLDLRRETLHKNIILRSEIINFIRSKMIENDFLEIQTPIMTASSPEGARDYLVPSRVHQGKFYALPQAPQQFKQLLMTSGFDKYFQIAPCFRDEDARADRSPGEFYQLDIEMSFVNQEDIFESVEPLLRDVFEKFSENMSVNKKFPRISYAESIQKYGTDKPDLRVEIELDDITEV

SEQ ID NO: 185574 - protein, 261 aa, Unknown
  Bacterial polypetide isolated from the Sargasso Sea
IFKKLVKSGSIVRGIITKNTKEKPRSFFDNIDKWAKDQGASGLAYFTIEKDKEIKGKGPVGKFFSEDSLKELMQNCNAEVGDSVFLACGKKKEVEKILSVARNKIANDLSIIDKNQFSFCWIVDYPMFEYDENLKKIIFSHNPFSMPQGKINELKFDNPLDIKAYQYDIVCNGIELSSGAIRNHMPDLMYKLFSVAGYSKKDVNDKFSGMINALSYGAPPHGGIAPGIDRIVMMLADKENIREVTLFPMNQNAQDLMMGAP

SEQ ID NO: 185575 - protein, 302 aa, Unknown
  Bacterial polypetide isolated from the Sargasso Sea
TFFRHQGSFWNNQCVIDNKNKNFKVLEKLRPESVLSIAGKVVRRSKETENKELKTGLIEIKIENIEVLSEAKELPLPVFGEQDYPEDIRLKYRFIDLRREEMHSNIELRSKIISFLRTKMIENNFLEFQTPILTASSPEGARDFLVPSRLHPGKFYALPQAPQQFKQMIMIAGFDKYFQIAPCFRDEDGRADRSPGEHYQLDMEMSFVEQEDIFKIVEPIFYELFKNFGNGKEVNKHPFPKIKYTDSMERYGTDKPDLRNPIELVDVTEIFKSEEVNLKIFKQIISKGGVVKAIPVNNTSSK

SEQ ID NO: 185576 - protein, 304 aa, Unknown
  Bacterial polypetide isolated from the Sargasso Sea
EVLIKSVEILSSAKELPIPVFGEQDYPEEIRFKYRFLDLRRDEMHKNIILRSNIISFIRSEMIKLGFLEYQTPILTSSSPEGARDFLVPSRLNPGKFYALPQAPQQFKQLIMVSGFDKYFQIAPCFRDEDARADRSPGEFYQLDLEMSFVEQENVFEVVEKLMVNLFKKFSTKKIEFEKFPRITFKESMLKYGTDKPDLRNPLLINDITKIFLREDVKFEMFKKLVKAGSLVRAIITKNTKDKPRSFFDNIDKWAKEQGASGLAYFTIEKDKKINGKGPVGKFFSEDSILEIMEITKAEIGDSI

SEQ ID NO: 185577 - protein, 230 aa, Unknown
  Bacterial polypetide isolated from the Sargasso Sea
DKKITAKGPVGKFFSEESLKEIMKITSAEIGDSIFFACGKINEVEKICSLARDKIGKDLNLINENEFTFCWIIDYPMFEKDQTTNKIKFSHNPFSMPQGDIKNIDLKNPLKIKAYQYDIVCNGIELSSGAIRNHIPELMYKLFSVAGYDKNEVDEKFRGMINALSYGAPPHGGIAPGIDRIVMLLANEKNIREVTMFPMNQNAQDLMMNAPSEISEDQLKELNLSLKKKK

SEQ ID NO: 185578 - protein, 246 aa, Unknown
  Bacterial polypetide isolated from the Sargasso Sea
MNKYRSHNCSELRDKDIDQHVTLSGWLHRKRDHGNLLFLDLRDHFGVTQCVIENRNKFFPILEKTKPESVLKINGKVVERAKGTENLELKTGKVEVSIQSVEILSNAKELPIPVFGEQNYPEELRLKYRFLDLRREEMHNNIILRSKIITFIRSEMLKLGFLEYQTPILTSSSPEGARDFLVPSRLNPGKFYALPQAPQQFKQLIMVSGFDRYFQIAPCFRDEDARADRSPGEFYQVDIEMSFVEQ

SEQ ID NO: 185579 - protein, 284 aa, Unknown
  Bacterial polypetide isolated from the Sargasso Sea
KLKIFKDIIAKGGVVKAIPVPNTFLKPRSFFDGLNNWAISEGASGLAYITFESVKNKIVGKGPIAKFFSESAILEIIKNCKITEKDSIFFVCNKEKEAVKFSGIARQKIAEELKLIDEKSFHFCWITDYPMYEYDEKEKKIDFSHNPFSMPQVEMKEFDKTDPLKILAYQYDLVCNGYELSSGAIRNHIPEYLFKVFDKVGYSKNMVEKNFSGMIKALSYGAPPHGGMAPGIDRIVMLLANQKNIREVTLFPLNQNAQDLLMEAPSEITEKQLKELNIKTIKKN

SEQ ID NO: 185580 - protein, 256 aa, Unknown
  Bacterial polypetide isolated from the Sargasso Sea
ALVTKNTRDKPRSFFDSIDRWAKEQGSSGLAYFTLEKDDKINAKGPIGKFFSENALLEIMKLTNASIGDTVFLSCGKKNDVEKILSVARNKIAEDLNLIDNEMFSFCWIIDYPMYEIDETTKKIKFSHNPFSMPQGEINKLDLSNPLNIKAYQYDIVCNGIELSSGAIRNHVPELMYKLFEIVGYSKNDVNSKFSGMINALSYGAPPHGGIAPGIDRIVMLLANEKNIREVTMFPMNQNAQDLMMNAPSEILDDQL

SEQ ID NO: 185581 - protein, 263 aa, Unknown
  Bacterial polypetide isolated from the Sargasso Sea
TPILTRATPEGARDYLVPSRTHPGSFFALPQSPQLFKQLLMVAGFDRYYQIAKCFRDEDLRADRQPEFTQIDLEASFVEEEDIMGITERMVRSVFKELLSVDLPDFPRMPFSEAMQRFGSDKPDLRIALELIDIADLLAGVDFKVFSGPANDPKGRVAAMRVPGGCSLSRKDIDGYTKFVSIYGAKGLAYIKVNDLAAGAEGLQSPILKFLTEDAIKGILERTGAETGDLIFFGADKAKIVNEALGALRVKVGHDLNLVEGEW

SEQ ID NO: 185582 - protein, 116 aa, Unknown
  Bacterial polypetide isolated from the Sargasso Sea
QYDIVCNGVELSSGAIRNHRQDILLKAFEIAGYNIDEIKKRFGAMYDAFGYGAPPHGGIAPGIDRIVMLIAGVENIREVIAFPMNQQAQDLMMNAPSEISSDQLKEIGIKIIEKKE

SEQ ID NO: 185583 - protein, 298 aa, Unknown
  Bacterial polypetide isolated from the Sargasso Sea
QINLDLRNPLIISDYTDVFKHSNFKIFSNQIEKGSVVKGITVSKTADQPRSFFDKLNNWARDEGAAGLGYISYSESNFKGPIAKNLNEDQLLSLKLNDKDSIFFVCDKLNQAQLFSGKVRDKICNDLNLLNKNSFEFCWIVDFPMYEIDEKTNKIQFSHNPFSMPQGEMDSLLNKDPLEIKAYQYDIVCNGVELSSGAIRNHKPEIMFKAFEIAGYSKKDLENKFSGMLNALKFGAPPHGGSAPGIDRIVMLLADEPNIREVIAFPMNQQAMDLMMDAPASIDKERLEELGIKLIDKN

SEQ ID NO: 185584 - protein, 310 aa, Unknown
  Bacterial polypetide isolated from the Sargasso Sea
TQCVIDKSNEFFKKLEKLSLETVIKITGMVIDRSNETINKNISTGEIEVKINNIDILGETKELPMPVFSDQEYAEEIRLKYRFLDLRRKKIHQNIILRSKVISFIRNEMQKLGFLEFQTPILTSSSPEGARDFLVPSRLNPGKFYALPQAPQQFKQLIMVSGFDKYFQIAPCFRDEDARADRSPGEFYQLDVEMSFVEQDDVFGVIETLFLKLFKTFSNKKILHEKFPRITYEDSMLKYGSDKPDLRNPLEISDLTIIFEREDVKFDIFKKLVKAGSIVRALVTKNTNNKPRSFFDGIDKWGKRARFPLV

SEQ ID NO: 185585 - protein, 294 aa, Unknown
  Bacterial polypetide isolated from the Sargasso Sea
RSADTINKDLSTGEVEIKVSSFEILSESKDLPMPVFGEQEYPEETRLKYRFIDLRRHEMHENIVLRSKIISFLRNEMLHSGFLEFQTPILTASSPEGARDFLVPSRIHPGKFYALPQAPQQFKQMIMISGFDKYFQIAPCFRDEDGRADRSPGEHYQLDMEMSFVEQEDIFKTVEPIFFKLFTEFGKGKEISKNPFKKITYKDSMLKYGTDKPDLRNPLEIFDVTSIMNRDDVKLDIFKSIIKKGGVVRAIPAPKTSSKARSFFDGYNNWAKEEGAKGLGYIILEKSNGKFIGK

SEQ ID NO: 185586 - protein, 260 aa, Unknown
  Bacterial polypetide isolated from the Sargasso Sea
KLRPESVILINGSVIKRSKETQNIELKTGLIEVKISSFQILSEAKELPLPVFGEQDYPEEIRLKYRFIDLRRKEMHDNIKLRSEVISFIRSKMIENNFLEFQTPILTASSPEGARDFLVPSRLHPGKFYALPQAPQQFKQMVMIAGFDRYFQIAPCFRDEDGRADRSPGEHYQLDMEMSFVEQEDVFKIIEPIFYDLFSKFGLGKKINKFPFPRISYKTSMEKYGTDKPDLRNPIELLNVTKIFESDEVKLKIFKQIIKK

SEQ ID NO: 185587 - protein, 285 aa, Unknown
  Bacterial polypetide isolated from the Sargasso Sea
GDLREQNIDDAVQLCGWVDRRRDHGGVIFIDLRDRSGTVQITVDPDLGAEAFAVAEHLRSETVLQVNGKVRARPAESLNDKLATGAVEVLASGITVLNSVKGNLPFPVSVHDEENTREELRLRHRYLDLRRKRMNDNLRMRAQTIQAARRFLESEGFIEVETPVLTRSTPEGARDYVLPSRVCGGEWFALPQSPQLFKQLLMVGGIERYYQVARCFRDEDLRADRQPEFTQLDIEMSFMDQEQILELNESLICSIWKGVKGIELPRPFPRMTWHDAMERYGTDRP

SEQ ID NO: 185588 - protein, 312 aa, Unknown
  Bacterial polypetide isolated from the Sargasso Sea
IVYLIKKINNKNVTSFPRIKYEEAILNYGTDKPDIRFDMKIHELNSLAKNKGFNVFDKEELIVAISVPNAASYSRKQIDNLTDWVKKPQIGANGLVWVKYESENNIKSSVDKFFNLSEIKKWIKKCNSTPGDLILIISGKKKESRVQIGNLRLKMAEDLGLRNPQDFAPVWITDFPLFYWDEELKKYNSMHHPFTSPKADDIKFLDSNPEKVKANAYDLVINGNEIGGGSIRIHDTELQRKILKILGFSDKEAERQFGFLMKSFQYGAPPHGGIAFGLDRLVAILKGKETIRNFIAFPKNNNGKRCNDRCSL

SEQ ID NO: 185589 - protein, 154 aa, Unknown
  Bacterial polypetide isolated from the Sargasso Sea
SHVERNKDNNLTSLHHPFTLPAVTVDELKNDPESALACAYDFVLNGYELGGGSLRVYETSMQKEIFKILGISNEEANEKFGFLLSALSSGCPPHGGIAFGLDRIIMLLSDTTNIRDVIAFPKTQSASCLLTEAPSMVSDDQLDELNISSTHNTE

SEQ ID NO: 185590 - protein, 316 aa, Unknown
  Bacterial polypetide isolated from the Sargasso Sea
MIAGFDRYFQIAPCFRDEDGRADRSPGEHYQLDMEMSFVEQEDIFKIVEPIFYDLFLKFGKGKKINKFPFPRISYKTAMEKYGTDKPDLRNPIEIINVTNIFKSEEVKLKIFKEIIKKGGIVKAIPAKNTETKPRSFFDNLNNWAITEGASGLAYITFEKSNGKIIGKGPVAKFFSDKSILELLKECNIDEKGSVFFVCNKEPEASKFAGIARQKIGEELKLVDNSSFKFCWIVDFPMFHYDEKEKKIDFSHNPFSMPQIKIENFDKKNPLEILAFQYDLVCNGYELSSGAIRNHITEYLFKVFSKGWVFKRNGRK

SEQ ID NO: 185591 - protein, 303 aa, Unknown
  Bacterial polypetide isolated from the Sargasso Sea
MNKYRTHKCNELRKEDVDKKISLSGWINKKRDHGNLLFIDLRDNYGITQCIIDKDNKYFSVLEKMQLETVIKVEGKVVNRSKETINSEIDTGEIEVVIENHEVLGTCKELPMPIFSDQEYAEEIRLKYRFLDLRRKKIHENIILRSKVISYIRNEMTKLGFLEFQTPILTSSSPEGARDFLVPSRLNPGKFYALPQAPQQFKQLIMVSGFDRYFQIAPCFRDEDARADRSPGEFYQLDLEMSFVEQEDVFNVVEKLMVNTFKYFSTKKLMFDKFPKISFKEAMLKYGTDKPDLRNPLIINDIT

SEQ ID NO: 185592 - protein, 102 aa, Unknown
  Bacterial polypetide isolated from the Sargasso Sea
NHLPDVMYKAFEIAGYPKSVVDEKFPAMINAFRFGAPPHGGIAPGIDRMVMLIADEPNIREVILFPMNGRAEDLMMAAPSEVVETALADLHIRPVPQIKKVD

SEQ ID NO: 185593 - protein, 224 aa, Unknown
  Bacterial polypetide isolated from the Sargasso Sea
GGISKFINIDIQKEIIESAKIENGDIIFLIGDQKETVLTALGALRLHIGMEEGLCDSNKFNPVWVTDFPMFEYDGDSKRYIAMHHPFTAPQTKNLEDLESEPSLLKSRGYDLTINGYEIAGGSIRNHKPDFQSKIFELLGMDKEEIDSRFGFLVEALKYGTPPHGGIAFGFDRLIMLLSGSRNIRDVIAFPKTTSASSLMDESPSKVSKDQLSDLNIKVVNKNK

SEQ ID NO: 185594 - protein, 140 aa, Unknown
  Bacterial polypetide isolated from the Sargasso Sea
MRTHYCGELNSSHIDQEIELCGWVHRRRDHGGVIFLDLRDRTGLAQIVFDPDRAEPFSIADLIRNEFVIKITGKVRNRPEGTINTDLTTGEIEVLGYSIEVLNKSKTPPIQIDDEHVHDDIKLRYRYIDLRRPLMQKNLQ

SEQ ID NO: 185595 - protein, 52 aa, Unknown
  Bacterial polypetide isolated from the Sargasso Sea
FKQLLMVSGFDRYYQIAKCFRDEDLRADRQPEFTQIDIETSFMDEESIMGLT

SEQ ID NO: 185596 - protein, 293 aa, Unknown
  Bacterial polypetide isolated from the Sargasso Sea
TSLLQCVVDNTSANFTELSKIKNEDVIKITGLITKRSEETINTNLESGEVELKIESFEILSRCSKTLPLEVNSDSDYGEEVRLKYRYLDLRRSKMQRNIRLRNQIINYVRDFMNNEGFMELATPILTAPSPEGARDYLVPSRLHKGSFYALPQAPQQFKQLYMASGVDKYFQIAPCFRDEDSRADRSPGEFYQIDMEMSFATQEDVLDIISRLLFNTFDRFKPKDKLINKLPFPTFTYKDSLESFGCDKPDLRNPLRLANVTNYFEGSGLQIFENLIKKGAIVNCIQALNSEG

SEQ ID NO: 185597 - protein, 304 aa, Unknown
  Bacterial polypetide isolated from the Sargasso Sea
ILKRSKIVSKIRNFLEERNFNEIETPILTRATPEGARDYILPSRIHPGSFYALPQSPQLFKQMLMMGGMDRYYQVARCFRDEDLRADRQPEFTQIDIEASFVEEKDIIELGSSLLKVLLKDFANHNLDHIDEIDYAHAINKYGSDKPDLRIPLELLEISDEAKNEEFKVFSDPAKNDGSRVVALKVDGGNKLTRSQIDEYTNFVGKLGAKGLAYIKINDVSDIENGLQSPILKFLSKKFITALFSKLNPTNDDLIFFGAGSSEIVNLSMSSLIKRLGKDLDLYKKDWAPCWITNFPNVRKWMLI

SEQ ID NO: 185598 - protein, 238 aa, Unknown
  Bacterial polypetide isolated from the Sargasso Sea
VRLRPAGAVNKNMASGGIEVLGYELEVLNESETPPFPLNEYSDVGEETRLRYRFLDLRRPEMAEKLRLRSRMTTSIRRFLDENGFLDVETPILTRATPEGARDYLVPSRTHAGSFFALPQSPQLFKQLLMVAGFDRYYQIAKCFRDEDLRADRQPEFTQIDIETSFLDEKEIMGLTEQMIRNLFKEVLDLEFGEFPHMTFEEAMRRYGSDKPDLRNPLELVDVADQLKDVDFKVFSGP

SEQ ID NO: 185599 - protein, 288 aa, Unknown
  Bacterial polypetide isolated from the Sargasso Sea
SGFDKYFQIAPCFRDEDARADRSPGEFYQLDLEMSFVEQEDVFNVVEKLFVNTFKKFSNKKLLFNQFPRISFKESMIKYGTDKPDLRNPLIISDITEIFLREDVSFEIFKKLVKSGSKVRCIVTKNTKDKPRSFFDNIDKWAKEEGASGLAYFTIEKEKEISAKGPVGKFFSKDSLNEIMIKTEAKVGDSIFLACGKLEEVEKITALARDKIGKDLGLIDENVFAFCWIVDYPMYEIDNQTKRIKFSHNPFSMPQGDINKINFEKPLEILAYQYDIVCNGIELSSGCN

SEQ ID NO: 185600 - protein, 299 aa, Unknown
  Bacterial polypetide isolated from the Sargasso Sea
LHPKGLGIILVPSRIHEGKFYALPQSPQLYKQILMISGFDRYFQIVKCFRDEDLRSDRQPEFTQIDIEMSFVDEDQVMDYMEKLTKHVFKTVKNIELDTPFKKLTWSKAMDSYGSDKPDLRFDLELIDIKEYALKSSFKNFFEADTIKTVIINNANLFTRKKIDNLTDIAKTYGAKGLAWFKVGNNELSGGISKFFNEDLALEMIETLNLSENNILFIVADSHKVACTALGAIRIEIAKNLNLIDVDAFKPVWITDFPMFDHDDMDQLTPMHHPFTAPKINHINDLNLDPNEIFYREHM

SEQ ID NO: 185601 - protein, 237 aa, Unknown
  Bacterial polypetide isolated from the Sargasso Sea
RLNPGKFYALPQAPQQFKQLIMISGFDKYFQIAPCFRDEDARSDRSPGEFYQLDIEMSFVTQEDVFDVVEKLLTKIFTKFSSKSLVNEKFPRIPYEEAMLKYGSDKPDLRNPLVIKDVTEIFLRDDVKFEIFKKFVKSGSFVRCIVTKNTKDKPRSFFDSLDKWAKDEGSGGLAYFTFEKNEKISGKGPVGKFFSEESLLAIMKLTNAEVGDSIFFACGKKNEVEKITSLARDKICD

SEQ ID NO: 185602 - protein, 297 aa, Unknown
  Bacterial polypetide isolated from the Sargasso Sea
DKDNKYFSDLEKMQLETVIKVEGKVVNRSKETINSEIDTGEIEVFIEQHEVLGTCKELPMPIFSDQEYAEEIRLKYRFLDLRRKKIHENIILRSKVISYIRNEMTKLGFLEFQTPILTSSSPEGARDFLVPSRLNPGKFYALPQAPQQFKQLIMVSGFDRYFQIAPCFRDEDARADRSPGEFYQLDLEMSFVEQEDVFNVVEKLMVNTFKNFSTKKLLFDKFPKISYKEAMLKYGTDKPDLRNPLVVNDITEIFTREDVSFEIFKKLVKSESKVRCIITKNTKDKPRSFFDNIDKWA

SEQ ID NO: 185603 - protein, 130 aa, Unknown
  Bacterial polypetide isolated from the Sargasso Sea
SDIDKLDNDPRKALSRGYDLTMNGHEIAGGSIRIHSPEVQEKVFSLLGLTQEEAVDKFGFLVEALRYGAPPHGGIAFGFDRLVMLLAGTENIRDVIAFPKTTSATSLMDDSPSDVDDHQLRDLGLEIKKD

SEQ ID NO: 185604 - protein, 277 aa, Unknown
  Bacterial polypetide isolated from the Sargasso Sea
FRFKKNKLHNNILLRNKVISSIRKKMVDRGFYEFQTPILTSASPEGARDYLVPSRLHHGKFYALPQAPQQFKQLLMIAGFDKYFQIAPCFRDEDSRADRSPGEFYQLDFEMSFVTQEDVFSALEPVLYEIFEENKNYSKKNSVEVSNFPFPRIPYEVSLEKYGTDKPDLRNPLIIEDYTNIFKDSNFKIFSEQIKKHAIVKGIKVKNVADRPRSFFDKLNDWAREEGAQGLGYINFIENNFKGPIAKNLNQAQLSGFKLTENESVFFVCDNIKNAQS

SEQ ID NO: 185605 - protein, 237 aa, Unknown
  Bacterial polypetide isolated from the Sargasso Sea
MKFTWNQRQSCHDITEAHVNQTVTLAGWVDTTRDHGHLLFIHLRDRSGTMQVVCDENLNQGIYQQSKTLRSEYVIKITGTVQMRSKETINSDMVSGTIEVIATDIDILSKAKTPPFMVSEKSTEKLDMSVDEDLRLQYRYLDLRRQPMQKNIIGRANIVQALRDTLNQAEFLDIETPFLTKSTPEGARDYLVPSRTHKNTFFALPQSPQLFKQLLMMSGLERYYQVVKCFRDEDLRP

SEQ ID NO: 185606 - protein, 300 aa, Unknown
  Bacterial polypetide isolated from the Sargasso Sea
VETLLINTFKSFSNKKLMFNKFPKIPYSDSILKYGTDKPDLRNPLLINDITEIFKRDDISFEIFKKLVKSGSKVRCIVTKNTKDKPRSFFDNIDKWAKEQGASGLAYFTFEKDKAITAKGPIGKFFSNDALVEIMNITKAEVGDSIFLACDKEKEVQKITSQARDKIAQDLKLIDENTFAFCWIVDYPMFEKDEITKKIQFSHNPFSMPQGSIKEINFEKPLDILAYQYDIVCNGIELSSGAIRNHIPELMYKLFSIAGYNKKQVDEKFSGMINALSYGAPPHGGIAPGIDRIVMLLANE

SEQ ID NO: 185607 - protein, 198 aa, Unknown
  Bacterial polypetide isolated from the Sargasso Sea
DTIFMSCGKKSEVEKLLYKARNKIANELNLIDDNVFSFCWVVDYPMFEFDENTKKIEFSHNPFSMPQGDTNNLDLSEPLKLKAFQYDIVCNGIELSSGAIRNHKPNLMYKLFEIAGYSKETVNDKFSGMINALSYGAPPHGGIAPGIDRIVMLLADEKNIREVTMFPMNQNAQDLMMNAPSEVDDNQLKELNISKRKN

SEQ ID NO: 185608 - protein, 131 aa, Unknown
  Bacterial polypetide isolated from the Sargasso Sea
LEKKWKNFGFNEFQTPILTSSSPEGARDFLVPSRLNPGKFYALPQAPQQFKQLIMVSGFDRYFQIAPCFRDEDARADRSPGEFYQLDIEMSFVEQEDVFKVVENLMVSLFSNFSKKKLIYKKFPRIPFKEA

SEQ ID NO: 185609 - protein, 245 aa, Unknown
  Bacterial polypetide isolated from the Sargasso Sea
MHQYRTHNCNGLRAEDINQEVRLSGWVHRKRDHGGLLFIDLRDHFGLTQLVFDPDSSAFKEAEKVRNESVITINGKVVQRSDDTINKVLPTGKIEVYVDTLEVIGSSDDIPLPVFGEPDYPEEIRLKYRFLDLRRETLHKNIILRSEIINFIRNKMIKNDFLEIQTPIMTASSPEGARDYLVPSRVHQGKFYALPQAPQQFKQLLMTSGFDKYFQIAPCFRDEDARADRSPGEFYQLDIEMSFVN

SEQ ID NO: 185610 - protein, 231 aa, Unknown
  Bacterial polypetide isolated from the Sargasso Sea
MRKLVYAGLNSPILKYLSKKCLESILNNLELKKDSLVFFGAGDKKIVNDYMSKLISRIGLDLSLLDDGYQFCWVTDFPMFERSSDGTLTSLHHPFTSPEEDDPKKLIKIDPIKMNSRAYDMVVNGIEIGGGSIRIHRNDTQKQIFSILGLTEEETKEKFGFFLKALKTGCPPHGGIAFGLDRLAMIMTNSESIRDVIAFPKTQSALCLLTEAPGSVPDKSLEELKIERKED

SEQ ID NO: 185611 - protein, 290 aa, Unknown
  Bacterial polypetide isolated from the Sargasso Sea
KELPIPVFGEQDYPEDIRLKYRFLDLRREEVHKNIILRSKVISFIRSEMLKLGFLEYQTPILTSSSPEGARDFLVPSRLNPGKFYALPQAPQQFKQLIMIAGFDKYFQIAPCFRDEDARADRSPGEFYQLDLEMSFVEQEDVFKVIEKLMVNVFKQFSSKKILSTTFPRITFSDAMDKYGTDKPDLRNPLIIKDITKIFMRTDVKFEIFKNLVKKGAKVKAIVTKNTKDKPRSFFDSIDRWAKEQGSAGLAYFTFEKKENLSGKGPVGKFFETEAIKEIMNISDAKIGDS

SEQ ID NO: 185612 - protein, 209 aa, Unknown
  Bacterial polypetide isolated from the Sargasso Sea
MKICNAQVGDSIFMACGKINEVERILSISRDKIANDLKLIKNDQFNFCWIIDYPMFELDEQTKKIKFSHNPFSMPQGDLIKLDFSKPLDIKAYQYDIVCNGVELSSGAIRNHIPDLMYKLFSIAGYDKFQVESKFSGMINALSYGAPPHGGIAPGIDRIVMLLANEKNIREVTLFPMNQNAQDLMMNAPSEVDSKQLKELSIKTEIKKN

SEQ ID NO: 185613 - protein, 308 aa, Unknown
  Bacterial polypetide isolated from the Sargasso Sea
ILRSKVISYIRNEMTKLGFLEFQTPILTSSSPEGARDFLVPSRLNPGKFYALPQAPQQFKQLIMVSGFDRYFQIAPCFRDEDARADRSPGEFYQLDLEMSFVEQEDVFNVVEKLMVNTFKNFSTKKLMYDKFPKISYKESILKYGSDKPDLRNPLIINDITEIFTREDVSFEIFKKLVKSGSKVRCIVTKNTKDKPRSFFDNIDKWAKEEGASGLAYFTFEKDKDISAKGPIGKFFSKDALAEIMKKTNCEIGDSIFMACGKQNELEKITALARDKIAKDLDLIDENVFAFCWIVDYPMFEKMKQQQD

SEQ ID NO: 185614 - protein, 251 aa, Unknown
  Bacterial polypetide isolated from the Sargasso Sea
NIILRSNVISFIREQMNELGFLEFQTPILTSSSPEGARDFLVPSRLNPGKFYALPQAPQQFKQLIMVSGFDKYFQIAPCFRDEDARADRSPGEFYQLDLEMSFVEQEDVFSVVEKLMMKLFKNFSSKKLINNKFPRIPYEEAMLKYGTDKPDLRNPLLIYDLTNIFTREDVKFDIFKKLVKSGSKVRAIVTKNTKDKPRSFFDNIDKWAKDEGASGLAYFTIENQNEISAKGPVGKFFSKNSLEEIMKITG

SEQ ID NO: 185615 - protein, 325 aa, Unknown
  Bacterial polypetide isolated from the Sargasso Sea
ARDFVVPSRINKGEFYALPQSPQTFKQLLMVGGIDKYCQVVKCFRDEDLRSDRQPEFTQIDCEMSFVNQDDVLLVFENLIKNIFKKCIGVELDNFPKISYWEAIENYGSDKPDTRFDMKIFDCTKSSKGKGFKILDDSEYVCGITVDSAEPLSRKQIDQYTDLVKQPQIGAKGLIWIKHNNDGSFKSSIDKFYNHDELLKIVGNFSEDSTTFLISGNKMKSLTQLGQLRLKIADDLKLINPKKFCPLWVNDFPLFDWDEDDKKYHSIHHPFTSPKDKNIHEIKEPSNVVADAYDLVINGNEIGGGSIRIHNRDLQNQIFFILGFS

SEQ ID NO: 185616 - protein, 217 aa, Unknown
  Bacterial polypetide isolated from the Sargasso Sea
SEESIEEIMKICNASPGDSIFFSCGKQSEIEKILSLARNKIGQELNLIDDNQFAFCWIVDYPMYELDVKTNKIKFSHNPFSMPQGDINNLDFKNPLKIKAFQYDIVCNGVELSSGAIRNHIPDLMYKLFSIVGYSEKDVNEKFSGMINALSYGAPPHGGIAPGIDRIVMLLANKQNIREITLFPMNQNAQDLMMRAPSKVNDDQLKELGIKLDIKKN

SEQ ID NO: 185617 - protein, 271 aa, Unknown
  Bacterial polypetide isolated from the Sargasso Sea
SKVRSITTKNTKDKPRSFFDNIDKWAKDQGASGLAYFTFEKDNKISAKGPVGKFFSEDALLEIMKITKSELGDSIFLACGKQNELEKITALARDKIAKDLDLIDDDTFAFCWIVDYPMFEKDELTNKIKFSHNPFSMPQGELKDKDFENPLDILAYQYDIVCNGIELSSGAIRNHKPGLMYKLFSIAGYNKAEVDEKFSGMINALRYGAPPHGGIAPGIDRIVMLLANEKNIREVTMFPMNQNAQDLMMNAPSEINQDQLKELNLTIKTKN

SEQ ID NO: 185618 - protein, 287 aa, Unknown
  Bacterial polypetide isolated from the Sargasso Sea
QITVDPDQGQDLFSIAESLRNETVLLINGLVRARPDEAINTKIPTGEVEVLAKNIKILNNVTSTLPFSVSIHDEESVKEEIRLRHRYLDLRRERMNNNLRLRHNTVKAARSFLENEGFIEVETPILTRSTPEGARDYLVPSRVCGGEFFALPQSPQLFKQLLMVGGVERYYQIARCFRDEDLRADRQPEFTQLDIEMSFMEEKEIIELNEKLIVNIWKKIKGIDLQTPFPRMTWQEAMDRFGTDRPDTRYGMELVNTSDLFSKSGFKVFSNAISSGGCVKCITIDDG

SEQ ID NO: 185619 - protein, 179 aa, Unknown
  Bacterial polypetide isolated from the Sargasso Sea
RDKLCLEMNLLDMNSFKFCWIVDFPMYELDEKTNKIQFSHNPFSMPQGELESLETKNPLDIKAFQYDIVCNGVELSSGAIRNHKPEIMYKAFEIAGYKKEEVEKKFSGMLNALKFGAPPHGGSAPGIDRIVMLLADEPNIREVIAFPMNQQAMDLMMEAPAEINKERLEELGLKLIEKN

SEQ ID NO: 185620 - protein, 301 aa, Unknown
  Bacterial polypetide isolated from the Sargasso Sea
GEELRMEYRYLDLRRSVVKNNLLLRNKVSLETRKYMDSQGFMDVETPVLIKSTPEGARDFVVPSRMNEGQFYALPQSPQTFKQLLMVSGIDRYYQIVKCFRDEDLRADRQPEFTQIDCEMSFVEQEDVLQTFEGMIKHLFASILNVSFTDEFPRITYSDAMKLYGSDKPDIRFGMKFVDISDEAKGKGFGIFDNSEAILSINVSEAASFTRKQLDKLIDWVKRPQIGAKGMIYLKYNEDGTFKSSVDKFYNSDDLKKWADKAEMQKGDLLLVLSGEKQQTQKQLSELRLHVADERGLRNPK

SEQ ID NO: 185621 - protein, 284 aa, Unknown
  Bacterial polypetide isolated from the Sargasso Sea
EFTQLDIEMSFVTENDLIALMEKMIKQLFSSVLEVSLVEPFHRMSYKDAMEKYGTDRPDLRNPLELVELSETVRGCEFQVFAEPAAADNGRVALLKVPEARSITRSQIDSYTDLVCQHGAKGLAYIKVNDLEKGIEGLQSPILKFLSEPIVNAILEAADARNGDLIFFGAGKSKIVNESLGVLRLKLGEDLGLTEDQWRFCWVQDFPMFEKNDSGALTPLHHPFTASYQDVEVLQQKPESAISRAYDLVLNGLEIGGGSIRIDDIKTQLAVLKVLGINQGKHKK

SEQ ID NO: 185622 - protein, 227 aa, Unknown
  Bacterial polypetide isolated from the Sargasso Sea
KSRGPVGKFFSEDSLKEMMKNFNAEIGDSVFLAAGQEKEMEKILSLAREKIATDLHIIDKEKFAFCWIVDYPMYEYDENLKKITFSHNPFSMPQGKINELNFDEPLDIKAYQYDIVCNGIELSSGAIRNHIPELMYKLFSIAGYSKKLVNEKFSGMINAFSYGAPPHGGIAPGIDRIVMLLAGKENIREVTLFPMNQNAQDLMMQAPSEVDDNQLKELNIKKNIKKI

SEQ ID NO: 185623 - protein, 192 aa, Unknown
  Bacterial polypetide isolated from the Sargasso Sea
ADKREIVNASLGALRVKMAEDFGLIKDGWFPLWITDFPMFHWDEKEKRWSSEHHPFTSPVNPDPEELKNNPKDSLSKGYDMVLNGHEIGGGSIRIHSEEMQQAVFSILGINEEEADEKFGFFLEALKYGCPPHGGIAFGIDRIVMLMTGSSSIRDVIAFPKTQTASCLLTDAPSLAGKSQLNELGISVKKKS

SEQ ID NO: 185624 - protein, 296 aa, Unknown
  Bacterial polypetide isolated from the Sargasso Sea
GIADITEIFKRDDVNFEIFKRLVIKGSIVRGIVTKNTSEKPRSFFDGIDKWAKDEGSSGLAYFSIENSDKLSAKGPVGKFFSDESLKEIMTKMNAEVGDTIFMSCGNKSEVEKLLSNARNKIANELNLIDENVFSFCWVVDYPMFEIDENTKKIEFSHNPFSMPQGDIGNLDISEPLKLKAFQYDIVCNGIELSSGAIRNHNPDLMYKLFEIAGYSKDTVNEKFKGMINALSYGAPPHGGIAPGIDRIVMLLAEEKNIREVTMFPMNQNAQDLMMNAPSEVDENQLKELNISKRNK

SEQ ID NO: 185625 - protein, 167 aa, Unknown
  Bacterial polypetide isolated from the Sargasso Sea
QDSFAFCWIIDYPMFETNDQTGKIEFSHNPFSMPQGNLKKINFQKPLDILAYQYDIVCNGVELSSGAIRNHIPELMYKLFLIAGYDKKQVDEKFSGMINALSYGAPPHGGIAPGIDRIVMLLANEKNIREVTMFPMNQNAQDLMMKAPSEINEKQLKELNLSLKVKK

SEQ ID NO: 185626 - protein, 221 aa, Unknown
  Bacterial polypetide isolated from the Sargasso Sea
MHAFRSHTCAELTEANVGQPVRLSGWVNRKRDHGQLVFVDLRDHYGLTQCVVDSSDPTFVAVEATRLESVVTITGTVLKRSDDTINTSLPTGHIEVRIEQFEVQSAADTLPLQVNSDADSGEETRLRYRYLDLRRSRPHDNIMLRARIIQSIRARMVTQGFTEFQTPILTASSPEGARDFLVPARLHPGKFYALPQAPQQFKQLVMVSGFDRYFQIAPCFR

SEQ ID NO: 185627 - protein, 217 aa, Unknown
  Bacterial polypetide isolated from the Sargasso Sea
KFFSDSLQKEIVKNLSINDGDILFMVGDKKNIVLKALGNLRVLVAQREGLVNKDVFKPIWVTEFPMFDYDEDNNRYIAMHHPFTAPRESDMDKLDSDPGNTLSRGYDLTMNGHEIAGGSIRIHSPKIQEKVFSLLGLTNTQAVEKFGFLVEALQYGAPPHGGIAFGFDRLVMLLAGTDNIRDVIAFPKTTSASSLMDDSPNYVDIKQLDELGLKLKD

SEQ ID NO: 185628 - protein, 303 aa, Unknown
  Bacterial polypetide isolated from the Sargasso Sea
YSEEFRLKYRFLDLRRKKIHQNIILRSEVISFIRSEMEKLGFLEFQTPILTSSSPEGARDFLVPSRLNPGKFYALPQAPQQFKQLIMVSGFDKYFQIAPCFRDEDARADRSPGEFYQLDLEMSFVEQEDVFDVVEKLMTNVFKKFSNKKMLYNKFPKISYSDAMIKYGTDKPDLRNPIIINELTEIFERDDVSFDIFKKLVSKGSIVRGIITKKTKDKPRSFFDGIDKWAKNQGASGLAYFTIEKEDKIKGKGPVGKFFSSDAIEKIMKISSAEVGDSVFLACGKKKEVENILSLAREKIANE

SEQ ID NO: 185629 - protein, 231 aa, Unknown
  Bacterial polypetide isolated from the Sargasso Sea
AGSKIVGKGPIAKFFSEAALIKLLKLCKINQKDSIFFVCNKEKEAINFSGIVRQKIAEDLKLIDSNSFKFCWITDYPMYEYDEKEKKIDFSHNPFSMPQIEMKDFDKTDPLQILAYQYDLVCNGYELSSGAIRNHIPDYLFKVFSKVGYTEKMVKQNFSGMIKALSYGAPPHGGMAPGIDRIVMLLANQKNIREVTLFPLNQNAEDLLMEAPSEANEKQLKELHIKTVKKN

SEQ ID NO: 185630 - protein, 255 aa, Unknown
  Bacterial polypetide isolated from the Sargasso Sea
FQIAPCFRDEDGRADRSPGEHYQLDIEMSFVEQEDIFKTVEPIFFKLFTEFGNGKSVSKAPFKKITYKDSMLKYGTDKPDLRNPIEIFDVTEIMQRDDVKLDIFKKLIKTGSVVRAIPAPNSASKPRSFFDGYNTWAKDEGGKGLGYIQLEKNKGKLAGKGPIAKFFSEEAIKKLAETINLKEGDALFFSCDKLKNSEKISGLARQKLGQDLNLIDLNKFEFCWIVDYPMYQYNEIDKKIDFSHNPFSMPQVNLK

SEQ ID NO: 185631 - protein, 243 aa, Unknown
  Bacterial polypetide isolated from the Sargasso Sea
NCNELRVKDVNNKVALSGWINKKRDHGNLLFIDLRDNYGITQCIIDKENSGFATLERIQLETVLKIEGRVVNRSSETINKDISTGEIEVKISNFEILGSCKELPMPIFSDQEYSEEIRLKYRFLDLRRKKIHENIILRSKVISFIRNEMNKLGFLEYQTPILTSSSPEGARDFLVPSRLNPGKFYALPQAPQQFKQLIMVSGFDKYFQIAPCFRDEDARADRSPGEFYQLDLEMSFVEQGGCI

SEQ ID NO: 185632 - protein, 274 aa, Unknown
  Bacterial polypetide isolated from the Sargasso Sea
RVLGIPAPKSSMQPRSFFDNLNNWAKKEMNAPGLGYIIFEEIDGILTGKGPIAKFIPSNIQLEIAKKANLNSGDSIFFACDKGKLVYDIAAAARNKIGEILDLVEKDVFRFCWIIDFPMYEQDRDTGKIDFSHNPFSMPQGGLEALENSDPLDVLGYQYDIVCNGIELSSGAIRNHMPEIMYKAFEISGYTKKQVQDKFGGMINAFSYGVPPHGGIAPGIDRIVMLLAQEKNIREVILFPMNQQAEDLMMLAPAEVDMKTLDELSLKLIPNEKN

SEQ ID NO: 185633 - protein, 146 aa, Unknown
  Bacterial polypetide isolated from the Sargasso Sea
IKFNSVTILFLCLKEKIDSLNNKDPLDIKAFQYDIVCNGVELSSGAIRNHKPEIMYKAFEIAGYDKDFVNNNFSGMISALKFGAPPHGGSAPGIDRIIMLLANEPNIREVIAFPMNQQAMDLMMNAPNEVEKNKLEDLGLKLIDKN

SEQ ID NO: 185634 - protein, 230 aa, Unknown
  Bacterial polypetide isolated from the Sargasso Sea
ENGIDGLQSPILKFLNDSVINQLIEKLSLENGDTVFFGADKKDIVNASLGALRVKMAEDFGLIRDGWFPLWVTDFPMFHWDEKEKRWSSEHHPFTSPVNLDPEELKNNPKDALSKGYDMVLNGHEIGGGSIRIHSEAMQQAVFSILGINEEEADEKFGFFLEALKYGCPPHGGIAFGIDRIVMLMTGSSSIRDVIAFPKTQTASCLLTDAPSLAGKAQLNELGISVKKKS

SEQ ID NO: 185635 - protein, 271 aa, Unknown
  Bacterial polypetide isolated from the Sargasso Sea
DRSPTDFYQLDIEMSFVEQHDVFRLIEKVFVKLFENFSDGYMVNNKFPIISFAQSIEWYGTDKPDLRNPIKMMDVSEFFVSSGFKIFSDILTKDGTQIKAIPAKGGGSRKFCDRMNKFAQEQGLPGMGYIFWRSDDNGELEAAGPIAKNLGKEKTEAIRNFIGLEKGDAAFFLGGVPNHFNDIAGKSRDIVGLELGITNSNSYEFCWITDFPMYEIDKETKKIEFSHNPFSMPKVDLLDEDIDPLSVLGMQYDLSCNGYEILSGAIRNHKL

SEQ ID NO: 185636 - protein, 270 aa, Unknown
  Bacterial polypetide isolated from the Sargasso Sea
MPVFGEQNYPEETRLKYRFIDLRRAEMHENIVLRSKVISFIRNKMLGEGFLEFQTPILTASSPEGARDFLVPSRTHHGKFYALPQAPQQFKQMVMTSGFDKYFQIAPCFRDEDGRADRSPGEHYQLDIEMSFVEQEDIFKTVEPIFLKLFTEFGKGKTVSKPPFKKITYKTSMLKYGTDKPDLRNPIEIFDVTEIMKRKDVKLDIFKKLIEKGGVVRAIPAPNTSSKPRSFFDGYNNWAKRRRSKRPRIYYFRKKRWKISRKRTYRKIFF

SEQ ID NO: 185637 - protein, 206 aa, Unknown
  Bacterial polypetide isolated from the Sargasso Sea
RVISEKISSKPGDIIFIMSGEYKKTLEQLGSLRVELASKFNLIDQEKICPLWVTDFPLFEWDEEEKRFFSMHHPFTSPKPEFLDILDKEPEKVIANAYDLVLNGNEIGGGSIRIHDFDTQMKVFELLGMSKEEYTSQFGFLIEALKYGAPPHGGIAFGLDRLAAVLKGKDVIRDFIAFPKNNSGKDLMIDAPSKLTKEQLKDLSQK

SEQ ID NO: 185638 - protein, 238 aa, Unknown
  Bacterial polypetide isolated from the Sargasso Sea
MSKYRTHTCNELRKEDVDKKVFLSGWINKKRDHGNLLFIDLRDNYGVTQCIIDKDNKNFTNLEKTQLETVVKIEGKVVARSDDTINNDIGTGEIEVTIDTYEELGSCKELPMPVFIDQEYAEEIRLKYRFLDLRRKKIHENIILRSKVISHIRNEMTKLGFLEFQTPILTSSSPEGARDFLVPSRLNPGKFYALPQAPQQFKQLIMVSGFDKYFQIAPCFRDEDARADRSPGEFYQLD

SEQ ID NO: 185639 - protein, 236 aa, Unknown
  Bacterial polypetide isolated from the Sargasso Sea
LAYFTIDKEKNYYAKGPVGKFFSSESIERIMKISSAKEGDSIFLACGKKSEVEKILSLARNKIANDLNLVDNDSFAFCWIVDYPMFELDEKTNKVIFSHNPFSMPQGDLNNLNLSKPLEIKAYQYDIVCNGVELSSGAIRNHIPDLMYKLFKIAGYESKIVDEKFSGMINALSYGAPPHGGIAPGIDRIVMLLADEKNIREVTMFPMNQHAQDLMMNAPSEVTEEQLKELNLKIKK

SEQ ID NO: 185640 - protein, 306 aa, Unknown
  Bacterial polypetide isolated from the Sargasso Sea
EDLRADRQPEFTQIDCEMSFVNESDVLEQFEGLILHLLKKFGKTVKAFPKLTYKDAIENYGTDKPDLRFDMKINEITDNVMGKDFNIFDKAEYIGCLVLNDKAELSRKEIDELTEWVKRPQVGANGILWIKNNADGSIKSSFDKFFTSDDLTSLTKDIGSKSGDLILIMAGTKKETLEHLGTLRVEIGKRYDFINFDLFCPAWVTDFPLFEYDEEEKKFKSMHHPFTSPNKESLGHLDSDPEKVIANAYDLVLNGNEIGGGSIRIHDYNTQMKIFEILGMSKKEYESQFGFLIEALKYGAPPHGGI

SEQ ID NO: 185641 - protein, 132 aa, Unknown
  Bacterial polypetide isolated from the Sargasso Sea
ARRFIKYKLFKPLEIKAYQYDIVCNGIELSSGAIRNHKPDLMYKLFSVVGYSKLEVQKKFKGMINALNYGAPPHGGIAPGLDRIVMLLANEKNIREVTLFPMNQNAQDLMMDAPSEINESQLKELGLQIKKK

SEQ ID NO: 185642 - protein, 293 aa, Unknown
  Bacterial polypetide isolated from the Sargasso Sea
QRTKIVASMRSAMADAGFGEYSTPILTASSPEGARDFLVPSRIHQGKFYALPQAPQQYKQLLMVAGFDRYFQIAPCFRDEDPRADRLPGEFYQLDVEMSFVTQEDVWETMEPVMTGVFEKFADGKPVTKKWPRIPYDEAIRKYGSDKPDLRNPIVMEAVTEHFAGSGFKVFAGMIEKNPKVEVWAIPAKTGGSRAFCDRMNSWAQGQGQPGLGYIFWRKEGESLDGAGPLAKNIGPERTEAIRAQLGLDEGDACFFVAGEPSKFYKFAGEARTRVGDELGLTDKDRFELCWIV

SEQ ID NO: 185643 - protein, 265 aa, Unknown
  Bacterial polypetide isolated from the Sargasso Sea
SDRIKLRAKASSFVRRFLDENGFLDIETPVLTKATPEGARDYLVPSRVHKGSFYALPQSPQLFKQLLMMSGFDRYYQIVKCFRDEDLRADRQPEFTQIDLETSFMSSDQVRGMTEKMIREMWQSLLNVDLGDFPIMPYSEAMSLYGSDKPDLRNPMKLIDVADLVKDVEFKVFSGPANDEKGRVAVLTVPGGASLSRKQLDDYTKFIGIYGAKGLAWMKVNDRDAGVEGVQSPIAKFLNEDVITQLLERTNAQTGDIILFGADKR

SEQ ID NO: 185644 - protein, 280 aa, Unknown
  Bacterial polypetide isolated from the Sargasso Sea
RADRSPGEFYQLDIEMSFVEQDDVFIVVEKLMLLLFKKFSTKKILFEKFPRITFKDALLKYGTDKPDLRNPLEICDLTSIFTRKDVKFEIFKKLVKSGSIVRAIKTTNTKDKPRSFFDGIDKWAKDQGASGMAYFTIENDKEITAKGPVGKFFSEDAIKEIMKIMNANIGDSIFFSCDKEKEVLKLISSARDKIAQELNLINEDSFAFCWIVDYPMFEIDENTKKIQFSHNPFSMPQGDLSKINFSNPLEIKAYQYDIVCNGIELSSGAIRNHKPDLMYK

SEQ ID NO: 185645 - protein, 268 aa, Unknown
  Bacterial polypetide isolated from the Sargasso Sea
DETLDKFEVLNWHDAMEEYGCDKPDLRIPLKLIEISDLVKDEEFKVFAEPAKDQNSRVVAMRVSNGNSLSRGQIDDYTKFVSKLGAKGLAYIKINDVKDLENGIQSPILKFLKSETISNIVDVLKVKTDDLIFFGAGPQSVVNLSMSSLIKKLGEDLNLYSSKWAPCWIVNFPMFEENAEGDLTPLHHPFTLPQCSKKELLEDPKKSIAHAYDVVLNGYEIGGGSLRIFDKDMQQSIFSILNISKEEADKKFGFLLKALSSGCPPHGG

SEQ ID NO: 185646 - protein, 175 aa, Unknown
  Bacterial polypetide isolated from the Sargasso Sea
LIPENEFRFVWVTDFPLFEYSESEKRFVSSHHPFTMPNLEDLEAYGQDQPERIRSRAYDITLNGVEIGGGSIRIHRGDIQDQVFKLLKLEEDEIESKFGFLMKALSYGAPPHGGIALGFDRIMMFLLNTESIRDVIAFPKTQRASCLMTEAPSNVSEDQLEELQLRIRTSAAKQN

SEQ ID NO: 185647 - protein, 252 aa, Unknown
  Bacterial polypetide isolated from the Sargasso Sea
DLRDNFGITQCVIDKSNEIFKKIEKLSLETVIKITGIVIERSNETINKNISTGEIEVKINNIDILGATKELPMPVFSDQEYAEEIRLKYRFLDLRRKKIHQNIILRSKVISFIRNEMQKLGFLEFQTPILTSSSPEGARDFLVPSRLNPGKFYALPQAPQQFKQLIMVSGFDKYFQIAPCFRDEDARADRSPGEFYQLDVEMSFVEQEDVFDVIETLFLKLFKSFSSKKILHEKFPRISYEDAMLKYGSDKP

SEQ ID NO: 185648 - protein, 294 aa, Unknown
  Bacterial polypetide isolated from the Sargasso Sea
DFLVPSRKQNGAFYALPQSPQMYKQLFMVSGFDKYYQIAKCYRDEDSRKDRQPEFTQLDLEISNGSPEIVREITESIVKNLLTDVYELEVEIPFIEMTYDEAINKYGTDKPDLRIKNTIQEFTNIFKNTEIKFIKSAIESNGFVKGFVTEEILSRSQIDELDEIVKDNGSNGLGWFKIDKNEVSGPLSKIITDDEKNDILQLGEGMLIFQSGTKEIYPILDILRRSIFKPDDTLNFLWIYDFPYFETEDGEIQPSHHPFTAPKDVDSFVEDPSSSKALHYDLVLNGSELGSGHK

SEQ ID NO: 185649 - protein, 106 aa, Unknown
  Bacterial polypetide isolated from the Sargasso Sea
GSIRIHKKELQEEVFSILGYSKDETNELFAQLLNSFEYGAPPHGGIAPGIDRIVMLLSGTENIRDVIAFPKTQSGFDPLFESPSELTSEQLAELGITIKKPENNLN

SEQ ID NO: 185650 - protein, 265 aa, Unknown
  Bacterial polypetide isolated from the Sargasso Sea
MRDNFGITQCVIEKSNEIFRKIEKLSLETVIKITGIVIERSDETINKNISTGEIEVKINNIDILGETKELPMPVFSDQEYSEEIRLKYRFLDLRRKKIHENIILRSKVISFIRNEMQKQGFLEFQTPILTSSSPEGARDFLVPSRLNPGKFYALPQAPQQFKQLIMVSGFDKYFQIAPCFRDEDARADRSPGEFYQLDMEMSFVEQEDVFDVIETLFLKLFKTFSNKKILHEKFPRISYEDALLKYGSDKPDFRNPLEISDLTNI

SEQ ID NO: 185651 - protein, 283 aa, Unknown
  Bacterial polypetide isolated from the Sargasso Sea
FKRYYGLTQCVIENNNIYFSIIENIKPESVLTISGSVVKREKGTENLQLKTGKIEINIKEIKILSEAKDLPMPVFGEQDYPEDIRLKYRFLDLRREEMHKNIILRSNIISFIRTEMIKLGFLEYQTPILTSSSPEGARDFLVPSRLNPGKFYALPQAPQQFKQLIMVSGFDKYFQIAPCFRDEDARADRSPGEFYQLDIEMSFVHQEDVFLVLEKLMINLFEKFSSIKIKDKKFPQITFQEAMLKYGTDKPDLRNPLIIKDITSIFKRDDVKFDIFKKLVNTG

SEQ ID NO: 185652 - protein, 281 aa, Unknown
  Bacterial polypetide isolated from the Sargasso Sea
ISDLTSIFERQDVKFDIFKKLVKSGSIVRAIITKNTEDKPRSFFDGIDKWAKEQGASGLAYFTFEGDKNISAKGPVGKFFSEESLKEIMKITGAKLGDSIFFVCNKENEVLKFISLARDKIANDLNLIDQNTFAFCWVVDYPIFEIDEKTKKIKFSHNPFSMPQGDEKKIDFSKPLEMKAYQYDIVCNGVELSSGAIRNHKPDLMYKLFSIAGYTKKDVDNKFKGMINALSYGAPPHGGIAPGVDRIVMLLSNEKNIREVTLFPNESKCSRFNDELTFRSK

SEQ ID NO: 185653 - protein, 96 aa, Unknown
  Bacterial polypetide isolated from the Sargasso Sea
KPEIMYKAFDIAGYSKEDLEEKFSGMLNALKFGAPPHGGSAPGIDRIVMLLADEPNIREVIAFPMNQQAMDLMMDAPASIDKERLEELGIKLIDKN

SEQ ID NO: 185654 - protein, 210 aa, Unknown
  Bacterial polypetide isolated from the Sargasso Sea
HSKITKKLNMDNGDILFIIGDDIKTTQLSLGALRIAIAKKEEYAKSNDFKPVWITDFPMFEYNQEDKRYHSLQHPFTQPKSNDLEKLKSSPESIPSKQYDLIINGYEVAGGSVRIHNSDMQKVIFDILGIDRKEANERFGFFIDALKYGTPPHGGIAFGFDRLVMLLAGTNNIRDVIAFPKTTSAMSLMDGAPSPVSKTQMKELGIQIKK

SEQ ID NO: 185655 - protein, 289 aa, Unknown
  Bacterial polypetide isolated from the Sargasso Sea
SFVSTEDIIKIGEDLVISLLSKFTDYKKTSVPRISYVKSIEMYGCDKPDLRIPLQLKDIAEIVKDEEFKVFSGPANDHESRVVALKVPDAASMTRKKIDHYTDYVGKLGAKGLAYIKVLELDSDNGLQSPILKFLKKETVDSILSALDAKNNDIIFFGAGKAKIVNLSMSSLIKSIGEDMNLITSSWAPCWIVDFPMFERNKDNNLTSLHHPFTLPAVSVSELKDDPDKALACAYDFVLNGYELGGGSLRVYEPSMQKEIFSILGISNEEANEKFGFLLSALSSGCPPH

SEQ ID NO: 185656 - protein, 262 aa, Unknown
  Bacterial polypetide isolated from the Sargasso Sea
MNKYRTHNCSELNKTNKNQSVVLSGWINKKRDHGNLLFIDLRDNYGLTQCVVDKSNESFKELEKIQLETVVKIIGKVVERSKDTINPELKTGEVEVNINEFEILGHCKELPMPVFSDQEYAEEIRLKYRFLDLRRKKIHQNIILRSEVISFIRNEMTKLGFLEFQTPILTSSSPEGARDFLVPSRLNPGKFYALPQAPQQFKQLIMVSGFDKYFQIAPCFRDEDARADRSPGEFYQLDLEMSFVEQEDVFKVVEKLLINLFK

SEQ ID NO: 185657 - protein, 215 aa, Unknown
  Bacterial polypetide isolated from the Sargasso Sea
SRTGAQPGSLILFGAGDTATVNKALDRVRQYLAKELEMVPAEAWNFLWVVDFPMFEFNADENRLEALHHPFCAANPEDLGDDPTQWSERLPKARAQAYDLVLNGLELGGGSLRIHDAALQNQVLQTIGLAQEEAQEQFGFLLEALEMGAPPHGGIAFGLDRMVMLLAGEESIRDTIAFPKTQQARCLMTSAPGGASDKQLEELHVASTWVEPEEN

SEQ ID NO: 185658 - protein, 273 aa, Unknown
  Bacterial polypetide isolated from the Sargasso Sea
ADPDSPVFSEVEKIKQEWCVCVEGEVRKREDGLINSKIETGEIEVFVKKISVLGQSEELPLPVFGDLTYPEETRLKYRFLDLRKETIHKNMILRSKIIEFIRKEMWKLDFNEFQTPIITSSSPEGARDFLIPSRLHPGQFYALPQAPQIYKQLIMVAGFDKYFQIAPCFRDEDPRSDRSPTDFYQLDVEMSFVSQEDVFELIEKVFVKLFEKFSGGYSVNTKFPIISYKEALNWFGTDKPDLRNPIKMVDVSNFFVSSGFKIFSDLLKKNGNE

SEQ ID NO: 185659 - protein, 294 aa, Unknown
  Bacterial polypetide isolated from the Sargasso Sea
SGKNTFELAKKCGPLYVIKIQGEVFERLSKNPHLDTGDIEIKVSEMEFLNKSDVPPFTIEDETDGGEDLRMKYRYLDLRRSPLKENIILRHSLMQETRNYLNSKNFLEIETPVLIKSTPEGARDFIVPSRMNSGEFYALPQSPQTFKQLLMVSGFDKYYQLVKCFRDEDLRADRQPEFTQIDCEMSFVNREDILENFGGLITRLFKNILNKDLGEIPIMEYDEAIKLYGSDKPDLRFGMKFNDLTSNVKGKGFKVFDDSEVILSINVEGCSNYSRKQIDELTEFVKTPQIGSKG

SEQ ID NO: 185660 - protein, 285 aa, Unknown
  Bacterial polypetide isolated from the Sargasso Sea
HKNILLRNKVIFEIRKKMNERGFIEFQTPILTSSSPEGARDYLVPSRIHQGKFYALPQAPQQFKQLLMIAGFDRYFQIAPCFRDEDSRADRSPGEFYQLDFEMSFVTQEDVFEAIEPVLFEIFEENKKNNEIKVSSYPFRRIPYNESMEVYGSDKPDLRNPLVIDDYTNVFKDSNFKIFSNQIEKGSVVKGIIVKNTGDQPRSFFDKLNNWAREEGAAGLGYISFVQNSFKGPIAKNLNEDQLLLFKLEENDSIFFICDKLKEAQLFSGKVREKICNDLNLLNKN

SEQ ID NO: 185661 - protein, 307 aa, Unknown
  Bacterial polypetide isolated from the Sargasso Sea
FKESMEVYGSDKPDLRNPLVIDDYTNVFKGSNFKIFSNQIEKGSVVKGIVVKNTGNQPRSFFDKLNNWAREEGAAGLGYISFAENSYKGPIAKNLNEDQLLLLKLEENDSIFFICDKLKEAQLFSGKVREKICNDLNLLNKNSFEFCWIVDFPMYEIDEKTNKIQFSHNPFSMPQGEMEALEKKDPLDIKAYQYDIVCNGVELSSGAIRNHKPEIMYKAFDIAGYSKEDLEEKFSGMLNALKFGAPPHGGSAPGIDRIVMLLADEPNIREVIAFPMNQQAMDLMMDAPASIDKERLEELGIKLIDKN

SEQ ID NO: 185662 - protein, 147 aa, Unknown
  Bacterial polypetide isolated from the Sargasso Sea
DGNLTPLHHPFTLPKCSVKEIQENPEDAIAYAYDVVLNGYEIGGGSLRIFDNKMQKAIFNILNITSDEAKNKFGFLLKALSSGCPPHGGIAFGLDRIVMLVTNTPNIRDVIAFPKTQSATCLLTEAPSKVDKDQLDELKIISTHKEE

SEQ ID NO: 185663 - protein, 296 aa, Unknown
  Bacterial polypetide isolated from the Sargasso Sea
KTFYKLFTKFSKFKIQNEKFPKITFADAMLKYGTDKPDLRNPLLIYEVSDVFKRDDVKFDIFKNLVNKGNVVRAIIAPQTSDKPRSFFDNIDKWSKDQGASGLAYFTLEQKSDLSAKGPIGKFFSSDSLKEIIKITGAKVKDTIFFSCGNKKEVENILSLARNKIAEELKLINHNQFSFCWIIDYPMYEINEETKKIQFSHNPFSMPQGPIEKLDFKNPLNIKAYQYDIVCNGIELSSGAIRNHVPDLMYKLFNLAGYDKNAVDEKFSGMINALSYGAPPHGGIAPGIDRIVMLLA

SEQ ID NO: 185664 - protein, 90 aa, Unknown
  Bacterial polypetide isolated from the Sargasso Sea
VFSLLGLSHDEAVEKFGFLVEALTYGAPPHGGIAFGFDRLVMLLAGTENIRDVIAFPKTTSATSLMDQSPSSVSKSQLKELGITINDPED

SEQ ID NO: 185665 - protein, 304 aa, Unknown
  Bacterial polypetide isolated from the Sargasso Sea
VKCFRDEDLRADRQPEFTQIDIEMSFVDEEDIYIYMENLTRYIFQKVKDIKLSDPFPRMTYAEAMERYGSDKPDLRYEMELIDIKSFTDESDFKAFSDAESVKALLVKTGAKYSRKVIDDLNDKAKKYGAKGLAWMKFEDGKFNGGISKFFSESLQKNISEDLKVENDDILLFVGDDKNIVTKSLGKLRTVIASKENLANGNEFKPLWVTEFPMFDFDDENNRYVSMHHPFTAPRDSDIEKLDSDPSIALSRGYDLTMNGHEIAGGSIRIHSPEVQEKVFSLLGLTQKEAVDKFGFLVEALRYG

SEQ ID NO: 185666 - protein, 136 aa, Unknown
  Bacterial polypetide isolated from the Sargasso Sea
MPQGGLEALNNSDPLNILGYQYDIVCNGVELSSGAIRNHVPEIMYKAFEIAGYSKDQVHEKFGGMINAFTYGVPPHGGIAPGIDRIVMLLAQEKNIREVILFPMNQQAQDLMMLAPAEVDKTTLDELNLEVKPTDE

SEQ ID NO: 185667 - protein, 205 aa, Unknown
  Bacterial polypetide isolated from the Sargasso Sea
KQLIMISGFDKYFQIAPCFRDEDPRSDRSPTDFYQLDVEMSFVEQQDVFDTIQPILTGIFEEFSQGKEVDSEWPQITYRQSMLWYGTDKPDLRNPIKMQNVSEHFIDSGFEIFENILKNEDSEIFAIPAPKGGSRKFCDRMNAFAQKEGLPGMGYIFWRDGDSGLEGAGPLSKNIGHERTEQIRLQLDLQIGDAAFFLAGNQKIS

SEQ ID NO: 185668 - protein, 286 aa, Unknown
  Bacterial polypetide isolated from the Sargasso Sea
TVTKRSDETINDNLPTGKIEINLSELEIISQSKALPLQVNSDEDYGEETRLKFRYLDLRRSRPHENIVLRSNVIQTIRNKMLELGFLEFQTPILTASSPEGARDFLVPSRLNKGKFYALPQAPQQFKQLIMVSGFDKYFQIAPCFRDEDSRADRSPGEFYQLDLEMSYVEQEDVFEAVEPVIKEVFKKYSDKSIDEFFPKITYKDSMLKYGNDKPDLRFALEIKDVTNIFRNSSFTIFAKSIENGSVVRAVPGPNCGSRSVADRMNNWAQGEGAPGMGYIIFSENT

SEQ ID NO: 185669 - protein, 173 aa, Unknown
  Bacterial polypetide isolated from the Sargasso Sea
EFDLLEKNAFKFCWIIDFPMYELNEDTNKIQFSHNPFSMPQGELDALNNEDPLNIKAFQYDIVCNGVELSSGAIRNHKPEIMYKAFNIAGYDKKFVEENFSGMLNALKYGAPPHGGSAPGIDRIVMLLADEPNIREVITFPMNQQAVDMMMEAPTSVDKARLDELGIKLVNKN

SEQ ID NO: 185670 - protein, 125 aa, Unknown
  Bacterial polypetide isolated from the Sargasso Sea
MDPLEIKAFQYDIVCNGVELSSGAIRNHRQDILLKAFEIAGYNIDEIKKRFGAMYDAFGYGAPPHGGIAPGIDRIVMLIAGVENIREVIAFPMNQQAQDLMMNAPSEILSDQLKEIGIKIIEKKE

SEQ ID NO: 185671 - protein, 76 aa, Unknown
  Bacterial polypetide isolated from the Sargasso Sea
FGGMLNAFKYGAPPHGGIAPGIDRIVMLLAEEKNIREVILFPMNQQAQDLMMSAPADVPDSNLKDLNIQTLELKED

SEQ ID NO: 185672 - protein, 206 aa, Unknown
  Bacterial polypetide isolated from the Sargasso Sea
KTNCEIGDSIFMACGKQNELEKITFLARDKIARDLDLIDANIFAFCWIVDYPMFEKNELTNKIEFSHNPFSMPQGNLSEKDLENPLDILAYQYDIVCNGIELSSGAIRNHKPELMYKLFSIAGYDKKQVDEKFSGMINALSYGAPPHGGIAPGIDRIVMLLANEKNIREVTMFPMNQNAQDLMMKAPSEVNPDQLKELNLSLKIKK

SEQ ID NO: 185673 - protein, 283 aa, Unknown
  Bacterial polypetide isolated from the Sargasso Sea
VPFKKITYKNSMLKYGTDKPDLRNPIEISDVTEIFKREDVKLDIFKKLIEKGAVVRAIPAPNTSSKPRSFFDEYNNWAKDEGGKGLGYIILEKKDGNLIGKGPIGKFFSEKAINELAKVCKLSEKDSVFFSSDKQKEAERISGIARQKLGKELNLIDNKKFEFCWITDYPMYEYDEKEKKIDFSHNPFSMPQIDIKDFDKSDPLSILAYQYDLVCNGYEISSGAIRNHLPELMYKVFSKVGYSKEEVNSKFGGMIKALSYGAPPHGGMAPGIDRIVMILAGKE

SEQ ID NO: 185674 - protein, 287 aa, Unknown
  Bacterial polypetide isolated from the Sargasso Sea
DLDISLPLPQVTWTECMERYGHDAPDMRFGLEIVDLTEVTKNSDFRVFKSAVESGGRVRGILVSSAAEKFSRKDLDGLTEMAVEAGAKGLVWLKLDSSGSWTGPVAKNLGSDVAENIRQSLSAKPGDLALISADSFDVTCKALHALRKHLGKELELYDENTMHVSWVIDFPMFARDEETGNWAAMHHPFTAPHPEDVEKLTSNPAACRAIAYDLVINGSEAGGGTIRIHDQATQQKVFELLGISPEIAKERFGFLLDALASGAPPHGGIALGIDRWVMLFGHLNSIR

SEQ ID NO: 185675 - protein, 301 aa, Unknown
  Bacterial polypetide isolated from the Sargasso Sea
MQHRTHTFGQLTSKENNLNVVLNGWVNSIRLHGQIIFIDLRDRYGKTQLVFDSKTFLGDFENVKKLSLEDVLSIEGIVSLRAQSAINKDIITGQIEILVSNVLLFNEAKPLPFVISDRNSAEENLRLKYRYLELRTEDLQRNLIIRHKTYQAVRSYLSNNDFLEIETPVLMKSTPEGARDYLVPSRIHEGKFYALPQSPQLYKQILMISGFDRYFQIVKCFRDEDLRSDRQPEFTQIDIEMSFVDEGHVIDYMEKLTKHVFKNVKNIELDTPFEKLTWSKAIDSYGSDKPDLGYDLELIDF

SEQ ID NO: 185676 - protein, 313 aa, Unknown
  Bacterial polypetide isolated from the Sargasso Sea
TPILTASSPEGARDFLVPSRLHPGKFYALPQAPQQFKQMIMISGFDRYFQIAPCFRDEDGRADRSPGEHYQLDMEMSFVEQEDVLKVVEPIFYQLFTRFGNGRKINKPPFQRIKYKTSLEKYGTDKPDLRNPIELFDVTKIFKSTDVKLKIFKDIIEKGGIVKAIPAPNTFSKPRSFFDGLNNWAISEGANGLAYITFEKASNKIIGKGPIAKFFSEKAITELIKTCKISEKDSVFFVCNKEKEAIRFSGVVRQKIGYELKLIDEISFNFCWITDYPMYEYDEKEKKIDFSHNPFLMPQVPINEFDKIDPLKI

SEQ ID NO: 185677 - protein, 268 aa, Unknown
  Bacterial polypetide isolated from the Sargasso Sea
EALGEHYQLDIEMAFVEQEDIFKTLEPIFYELFTEFGKNKTVSKVPFPRIKFKDAMSKYGTDKPDLRNPIEIKDVTHIMKMEDVKLDIFKKLINKGALVKAIPAPNTSKKTRSFFDNLNTWAKDEGASGLAYMSFEKKEGKIVGTGPIAKFFSENSLNKIISECSLSEKDSVFFSCDKKNSVEKIAGLARQKIAIELNLIDQDKFNFCWITDFPMYQYDEVEKKIDFSHNPFSMPQIDIESFDKADPLSILAYQYDLVCNGTELSSGA

SEQ ID NO: 185678 - protein, 241 aa, Unknown
  Bacterial polypetide isolated from the Sargasso Sea
KRRDHGNLIFIDLRDKSGVLQVVFNPEVSSDAHDLASNLRSEWVVQIKGIIVKRISGAENDSISTGSVELQASELKILNKSKTPPFEISNEIEIDDQTRLAYRFVDLRRPKMQKLFTLRHKITKLIWDYLSDKDFIHIETPILLKSTPEGARDYVVPSRIHPGKFYALPQSPQQLKQILMVSGFDRYFQIARCFRDEDLRADRQPEHTQLDLEMSFVHQDDVMNLVEGLYKHVTCEILGEN

SEQ ID NO: 185679 - protein, 140 aa, Unknown
  Bacterial polypetide isolated from the Sargasso Sea
HNPFSMPQGDLSEKDFESPLDILAYQYDIVCNGIELSSGAIRNHKPELMYKLFSIAGYDKNQVDEKFSGMINALSYGAPPHGGIAPGIDRIVMLLANEKNIREVTMFPMNQNAQDLMMNAPSEVNSDQLKELNLALKNKK

SEQ ID NO: 185680 - protein, 277 aa, Unknown
  Bacterial polypetide isolated from the Sargasso Sea
VFSEPANDKNSRIAALIVPEGEKIGRGQIDRYTDFVKEFGAKGLAYIKVDGGSIADLSSPILKYLSEECLKNILTALKVKKGDLIFFGAGKEKIVNDYMSRLIAKIGIDLNLLKDGFEACWITDFPMFEETSDGSLTSLHHPFTCPVETELEKLGKLSPLEINSKAYDMVINGVEIGGGSIRIHKKALQEKVFELLGLSEDEAQKKFGFFLKTLTTGCPPHGGIAFGLDRLAMLMVGAESIRDVIAFPKTQSALCLLTEAPGPVTDESLDELHISRK

SEQ ID NO: 185681 - protein, 284 aa, Unknown
  Bacterial polypetide isolated from the Sargasso Sea
MRNKICKELNNTDIGKLVNLCGWVDRRRDHGGVIFIDLRDHSGFLQITINPDDGAELFKQAETLRNETVIMVIGIINERPKDSINTNLSTGELELKVKDLQILNQIKKNLPFPVSIHDYENTKEELRLRYRYLDLRRGKLLENLKTRHKIIKVAREFLDNFGFTEVETPLLTKSTPEGARDFLVPARLSNGEFFALPQSPQLFKQLLMVGGLDKYYQIAKCFRDEDLRADRQPEFTQLDIEMSFISEEEIISFNESLIKKIWKEVLNINFNNAFPKNVMAGSNG

SEQ ID NO: 185682 - protein, 129 aa, Unknown
  Bacterial polypetide isolated from the Sargasso Sea
SEKDFENPLNILAYQYDIVCNGIELSSGAIRNHKPELMYKLFSIAGYDKKQVDEKFSGMINALSYGAPPHGGIAPGIDRIVMLLANEKNIREVTMFPMNQNAQDLMMNAPSQVNPDQLKELNLALKTKK

SEQ ID NO: 185683 - protein, 180 aa, Unknown
  Bacterial polypetide isolated from the Sargasso Sea
DRDNDQWNFLWVVDFPMFEFNSDENRYEALHHPFCAPNAEDLGSDASQWADTLPAARAQAYDLVLNGLELGGGSLRIHDSALQRQVLQTVGLPLEEAQEQFGFLMDALDVGAPPHGGLAFGVDRMVMLLAGEESIRDTIAFPKTQQARCLMTNAPGGVADKQLEELHVASTWVDPSENDA

SEQ ID NO: 185684 - protein, 175 aa, Unknown
  Bacterial polypetide isolated from the Sargasso Sea
AKDLDLIDESTFAFFWIVDYPMFEKDEVTNKIEFSHNPFSMPQGDLSEKDFDNPLDILAYQYDIVCNGIELSSGAIRNHKPELMYKLFSIAGYDKNQVDEKFSGMINALSYGAPPHGGIAPGIDRIVMLLANEKNIREVTMFPMNQNAQDLMMNAPSEVNQDQLKELSLALKTKK

SEQ ID NO: 185685 - protein, 183 aa, Unknown
  Bacterial polypetide isolated from the Sargasso Sea
MNKYRSHNCNELRKKNVGSNILLSGWINKKRDHGNLLFLDLRDNYGITQCIVDKENKNFKDLEKIQLETVINIEGKVVNRSTETINKEIETGEIEVTIENFVVLGKCKELPMPVFSDQEYSEEIRLKYRYLDLRRKKIHENIILRSKVISFIRNEMNKFGFLEFQTPILTSSSPEGARDFLVP

SEQ ID NO: 185686 - protein, 134 aa, Unknown
  Bacterial polypetide isolated from the Sargasso Sea
PQGGMEALLEQDPLKIKAYQYDIICNGIELSSGAIRNHDIDIMLKAFEIAGYQESDIIKKFPSLHNAFQYGAPPHGGIAPGIDRIVMLIANEPNIREVIMFPMNQKAEDLLMGAPNEVSNQQLKDLHIKVVPDE

SEQ ID NO: 185687 - protein, 278 aa, Unknown
  Bacterial polypetide isolated from the Sargasso Sea
EEIRLKYRYLDLRRKKIHENIILRSKVISFIRSEMNAIGFLEFQTPILTSSSPEGARDFLVPSRLNPGKFYALPQAPQQFKQLIMVSGFDKYFQIAPCFRDEDARADRSPGEFYQLDLEMSFVEQEDVFKVVEELLINTFKKFSNKKLISEKFPRISYADALVKYGSDKPDLRNPLIINDITEVFLRDDVSFEIFKKLVKLGSQVRCIVTRETKDKPRSFFDNIDKWAKAEGSSGLAYFTLEKNNEISAKGPVGKFFSKESLEAIMKKTGAEIGDSIF

SEQ ID NO: 185688 - protein, 200 aa, Unknown
  Bacterial polypetide isolated from the Sargasso Sea
GDTIFLSCGKKNDVEKILSAARNKIAEDLDLIDNETFSFCWIVDYPMYEIDETTKKIKFSHNPFSMPQGELNKLDLLNPLNIKAYQYDIVCNGIELSSGAIRNHIPELMYKLFEIAGYSKNDVNKKFSGMINALSYGAPPHGGIAPGIDRIVMLLANEKNIREVTMFPMNQNAQDLMMNAPSEVSDDQLKELNLNIKKKK

SEQ ID NO: 185689 - protein, 308 aa, Unknown
  Bacterial polypetide isolated from the Sargasso Sea
VIEQHEVLGTCKELPMPIFSDQEYSEEIRLKYRFLDLRRKKIHENIILRSKVISYIRNEMTKLGFLEFQTPILTSSSPEGARDFLVPSRLNPGKFYALPQAPQQFKQLIMVSGFDRYFQIAPCFRDEDARADRSPGEFYQLDLEMSFVEQEDVFNVVEKLMVNTFKNFSNKKLMFDKFPKISYKEAMLKYGTDKPDLRNPLIINDITEIFTRDDVSFEIFKKLVKSGSKVRCIVTKNTKDKPRSFFDNIDKWAKEEGASGLAYFTFEKDKDISAKGPIGKFFSKDALAEIMKKTNCEIGDSIFMACGK

SEQ ID NO: 185690 - protein, 208 aa, Unknown
  Bacterial polypetide isolated from the Sargasso Sea
MIKTGAQIGDSIFFACNKLNELEKITALARDKIAIELNLIDENLFSFCWIVDYPMFEKDELTNKIKFSHNPFSMPQGDLNKIDYKKPLEILAYQYDIVCNGIELSSGAIRNHIPELMYKLFSIAGYDKKQVDEKFSGMINALSYGAPPHGGIAPGIDRIVMLLANEKNIREVTMFPMNQNAQDLMMNAPSKVNDDQLKELSLALKIKK

SEQ ID NO: 185691 - protein, 100 aa, Unknown
  Bacterial polypetide isolated from the Sargasso Sea
GSLRIHDPKIQEKIFKILGLNHKEAEEKFGFLIEALSYGAPPHGGIAFGFDRLVMLLAGTENIRDVIAFPKTTSATSLMDGSPSPVASSQLKELGIKNKF

SEQ ID NO: 185692 - protein, 200 aa, Unknown
  Bacterial polypetide isolated from the Sargasso Sea
NDTIFFSCGKKKDVENILSLARKKIAEELKLIDYKTFSFCWIIDYPMYELNDETKKIQFSHNPFSMPQDSLEKIDFKNPLNIKAYQYDIVCNGIELSSGAIRNHIPELMYKLFKVAGYDKETVDEKFSSMINALSYGAPPHGGIAPGIDRIVMLLANEENIREITMFPMNQNAQDLLMKAPSEVDDKQLKELGIEIKRKK

SEQ ID NO: 185693 - protein, 294 aa, Unknown
  Bacterial polypetide isolated from the Sargasso Sea
MVGDLMKDVEFKVFSQPANDEDSRVACLVLKNKPDISRKQIDDYTEFVSNYGAKGLAYIRVNAIKEGVKGMQSPILKFLDEDCISSLTDRLSIEDGDTVFFGADKAETVNASLGALRERLATDFDLIESGWHPLWVTDFPMFHWEPKEKRWVCEHHPFTSPLNDDPQDLIANPKSAISLGYDLVLNGNEIGGGSIRIHSQEMQSAVFKTLGISPEEASEKFGFFLEALKYGCPPHGGIAFGIDRIVMLMTESTSIRDVIAFPKTQTASCLLTDAPSQAGKGQLKELGISIKSKK

SEQ ID NO: 185694 - protein, 212 aa, Unknown
  Bacterial polypetide isolated from the Sargasso Sea
MHKFRSHTCGQLNATNKGQLVRLSGWVHRVRDHGGVLFIDLRDHYGFTQVLADPDSNVFLEVEKVRSEWCIRIDGLVKLREPELINEKLPTGEIEVFIDDMEVLGKSEELPMPVFGDLEYPEETRLKYRFLDLRKEKLHKNILLRSKVVSSLRRRMEKIGFNEFQTPIITASSPEGARDFLVPSRLHAGKFYALPQAPQQFKQLIMISGFDK

SEQ ID NO: 185695 - protein, 126 aa, Unknown
  Bacterial polypetide isolated from the Sargasso Sea
NFSDPLNIKAYQYDIVCNGIELSSGAIRNHIPELMYKLFDIAGYSKKNVDEKFSGMINALSYGAPPHGGIAPGIDRIVMLLAKEKNIREVTMFPMNQNAEDLMMNAPSEVNKEQLKELNILLKNNK

SEQ ID NO: 185696 - protein, 260 aa, Unknown
  Bacterial polypetide isolated from the Sargasso Sea
VKGIIVQNTKDKPRSFFDKLNNWAREEGAAGLGYVSFDNGEYKGPIAKNLSNEKLSKMNLQDGNSIFFVCDNLKSAQIFSGKVRDKLCKEMNLLNKNSFEFCWIVDFPMYEIDEKTNKIVFSHNPFSMPQGELNSLLNENPLEVKAFQYDIVCNGVELSSGAIRNHKPEIMYKAFEIAGYTKEELEEKFSGMLNALKYGAPPHGGSAPGIDRIIMLLADEPNIREVIAFPMNQQAMDLMMDAPAEVDKKQLNDLGLKIVD

SEQ ID NO: 185697 - protein, 210 aa, Unknown
  Bacterial polypetide isolated from the Sargasso Sea
MNKYRSHNCSELTEKDSGKRISISGWLHRKRDHGNLLFIDLRDHYGLTQCVIENNNKLFPVLEKIKPESVLTITGKVVKREKGTENSEISTGKIEVNIQEIKVLSESKELPMPVFGEQNYPEDIRLKYRFLDLRRDEMHKNIILRSKVISFIRSEMLKLGFLEYQTPILTSSSPEGARDFLVPSRLNPGKFYALPQAPQQFKQLIMVSEI

SEQ ID NO: 185698 - protein, 274 aa, Unknown
  Bacterial polypetide isolated from the Sargasso Sea
IFKNSDFKIFSNLIQKNFKVKGIVVSNTADKPRSFFDKLNNWAREEGAAGLGYISYGNDEHKGPIAKNLDTERLNKLKLNNDDSIFFICDQEKEAQLFAGKVRDKLCLDLNLLNKNSFEFCWIVDFPMFEIDEQTNKIAFSHNPFSMPQGEMDSLKNKDPLDIKAFQYDIVCNGVELSSGAIRNHKPDIMYKAFEIAGYKKEELESKFSGMLNAMKFGAPPHGGSAPGIDRIVMLLANEPNIREVIAFPMNQQAIDLMMNAPAPVDKERLEELG

SEQ ID NO: 185699 - protein, 190 aa, Unknown
  Bacterial polypetide isolated from the Sargasso Sea
KRTDVEKLLSNARNKIANDLKLIDESVFSFCWVVDYPMFEIDENTKKIEFSHNPFSMPQGNIDNLNLSDPLKLKAYQYDIVCNGIELSSGAIRNHKPDLMYKLFEIAGYSKEKVNEKFSGMINALSYGAPPHGGIAPGIDRIVMLLADEKNIREVTMFPMNQNAQDLMMNAPSEVDENQLKELNISKRKK

SEQ ID NO: 185700 - protein, 283 aa, Unknown
  Bacterial polypetide isolated from the Sargasso Sea
IFNSIIDAGGAIKGFALPGLANELSKNMLQNDLASKAIQACGGKGLTWMKVLPDNQFESNIVQFFSNEQLIAARDAVNAEVGDVMMFVADASLDTVNQVLGRFRIYLAERFNLIPENVYAGCWVTDFPLFEKTDAGLTSLHHPFTQPSSPIHDGMSEADILNINARAYDIVINGQEVGGGSIRIHDSAQQALIFKLLNLSDEEIEQKFGFFVNALAHGTPPHGGLAIGIDRLVSVILATPSIRDVIAFPKNRVAFCPLTKAPNVVDQAQLDDLNITHKAPIEA

SEQ ID NO: 185701 - protein, 128 aa, Unknown
  Bacterial polypetide isolated from the Sargasso Sea
KINFNQPLDIKAYQYDIVCNGIELSSGAIRNHIPDLMYKLFAVAGYDKKSVEEKFSGMINALSYGAPPHGGIAPGIDRIVMLLANEKNIREITMFPLNQNAQDLMMNAPSSVDNNQLKELNINVIKKK

SEQ ID NO: 185702 - protein, 141 aa, Unknown
  Bacterial polypetide isolated from the Sargasso Sea
MPQGGMEALINKDPLDILAYQFDIVCNGVELSSGAIRNHRPEIMYKAFEIAGYGKEVVEEKFSSLLNAFKFGAPPHGGSAPGIDRIVMLLAGEPNIREVILFPMNQQAEDLMMGAPAEISKERYRELDLKHIPTKKEKTIK

SEQ ID NO: 185703 - protein, 153 aa, Unknown
  Bacterial polypetide isolated from the Sargasso Sea
YETDEITKKIKFIHNPFSMPQGEINKLDFSNPLKIKAYQYDIVCNGIELSSGAIRNHVPELMYKLFEIAGYSKKDVNSKFSGMINALSYGAPPHGGIAPGIDRIVMLLANEKNIREVTMFPMNQNAQDLMMNAPSEISDDQLKELNLTIKNKK

SEQ ID NO: 185704 - protein, 274 aa, Unknown
  Bacterial polypetide isolated from the Sargasso Sea
DQEYSEEVRLKYRFLDLRRKKIHKNIILRSKVISFIRYEMEKYGFLEFQTPILTSSSPEGARDFLVPSRLNPGKFYALPQAPQQFKQLTMISGFDKYFQIAPCFRDEDARSDRSPGEFYQLDIEMSFVEQDDIFQIVEKLINSLFKKFSKNKILYQKFPKVSYSDAMLKYGTDKPDLRNPLLISDLTNIFEREDVKFEIFKKLIKSGSIVRAIVTKKTKDKSRSFFDNIDKWAKEYGANGLAYFTFVNENGIKGKGPIGKFFSEESLKEIMNIT

SEQ ID NO: 185705 - protein, 208 aa, Unknown
  Bacterial polypetide isolated from the Sargasso Sea
IEVYIDELSILNRSETPPISPWEPQDTSEALRLKHRFLDLRGPELQRNLKMRYNITRVARNEMHRQGFMEVETPMLTKSTPEGARDYLVPSRLNPQKFYALPQSPQLFKQILMVSGMDKYFQIVKCFRDEDLRQDRQPEFTQIDIEMSFGNEKIIFQMIEDMMAAIYKEVLNEEISTPFPILKYQDAINRFGTDKPDMRIDMEIVDLA

SEQ ID NO: 185706 - protein, 300 aa, Unknown
  Bacterial polypetide isolated from the Sargasso Sea
GKKFSYLGWINKKRDHGNLLFIDLRDNYGITQCIVDKDNSSFSNLEKIQLETVVKINGEVVNRSEDTINKEIQTGEIEVSIESYSVLGICKELPMPVFSDQEYSEEIRLKYRFLDLRRKKIHENIILRSKVISFIRDEMNKLGFLEFQTPILTSSSPEGARDFLVPSRLNPGKFYALPQAPQQFKQLIMVSGFDRYFQIAPCFRDEDARADRSPGEFYQLDLEMSFVEQEDVFKVVEKLLVNTFKKFSNKKLMFEKFPKISYSDSMLKYGSDKPDLRNPLIIDDITEIFSREDVTFEIFK

SEQ ID NO: 185707 - protein, 246 aa, Unknown
  Bacterial polypetide isolated from the Sargasso Sea
MNKYRTHLCSELNISNLNDKVTLSGWVDTIRDHGNLIFIDLRDNYGITQCVVDSQNNTFDDISKLSNESVITIHGKVIKRSDETINKNISTGEIEIKIETYILLSSSDILPLPVNSDIDYGEEVRLKNRFLDLRRNKLHKNIILRSKIISSIRDKMISRGFTEFQTPILTSTSPEGARDYLVPSRIHHGQFYALPQAPQQFKQLLMMAGFDKYFQIAPCFRDEDSRADRSPGEFYQLDFEMSFVLK

SEQ ID NO: 185708 - protein, 292 aa, Unknown
  Bacterial polypetide isolated from the Sargasso Sea
SGFDKYFQIAPCFRDEDARADRSPGEFYQLDVEMSFVEQEDVFDVIETLFLKLFKSFSNKKILHEKFPRITYEDSMLKYGSDKPDLRNPLEITDLTNIFEREDVKFEIFKKLVRKGLIVRALVTKNTHHKPRSFFDGIDKWAKDQGSSGLAYFTLEKEDKISAKGPIGKFFSETSLIEVINQTKADIGDTVFLYCGNKDDVEKILSAARNKIAEDLDLIDNDTFSFCWIVDYPMYEIDDTTKKIKFSHNPFSMPQVELNKLDLSNPLNIKAYQYDIVCNGIELSSGAIRNHI

SEQ ID NO: 185709 - protein, 246 aa, Unknown
  Bacterial polypetide isolated from the Sargasso Sea
DEGGKGLGYIFLEKENNNLVPKGPISKFFSKNAIEELIKTCSLKDGDSIFFSCDKKTMVEKISGLARQKLGTALNLIDKNKFIFCWIVDFPFYKYNEEEKKIDFSHNPFSMPQINIENFDKADPLSITAYQYDLVCNGFEISSGAIRNHLPEFMYKVFSKVGYSKNEVNNRFQGMIKALSYGAPPHGGMAPGIDRIVMLLADKQNIREVTLFPMNQNAEDLLMGAPSIPKDEQLKELGVKTIKKEK

SEQ ID NO: 185710 - protein, 270 aa, Unknown
  Bacterial polypetide isolated from the Sargasso Sea
YFQIAPCFRDEDGRADRSPGEHYQLDMEMSFVEQDDVFNTVEPIFYDLFKEFGEGKKVNMAPFPRIKYRDSLNKYGTDKPDLRNPIELVDVTEIFASKEVNLKIFKDLISKGGIVKAIPAPNTLSKPRSFFDSLNNWAIKEGASGLAYITFEKSGNKINGKGPIAKFFAEKSISELLKKCKISEKDSVFFVCNKENEANNFAGIARQKIAEELKIIDTNSFKFCWITDYPMYEYDEKEKKIDFSHNPFSMPQLDIKDFDKTDPLKILAYQ

SEQ ID NO: 185711 - protein, 279 aa, Unknown
  Bacterial polypetide isolated from the Sargasso Sea
ESAPLPFMLDNRNNAEEDLRLKYRYLELRMEELQKNLLTRHETYQATRNYLSENQFVEVETPILMKSTPEGARDYLVPSRVHRGKFYALPQSPQIYKQILMISGYDRYFQIVKCFRDEDLRADRQPEFTQIDIEMSFVDEEDVFRYMEGLTRHIFETVSKINLPDSFPRITYQEAMETYGSDKPDLRYGLKLIELKSYTDVSDFKAFSSVERVKGIIVNGGEKYSRKMIDELTDFIKKFKAKGLAWMKLKDNSFDGGISKFFSIELQKKMQSELDIKNG

SEQ ID NO: 185712 - protein, 283 aa, Unknown
  Bacterial polypetide isolated from the Sargasso Sea
RDNYGITQCVIDGTHSLFEEVSKLSNESVLTISGEVVKRSDETINKNLQTGEIEIKIQDYKILSKSEILPLPVNSDIEYGEEIRLKYRFLDLRRNKLHKNIILRSKIISDIRKKMIDRNFVEFQTPILTSSSPEGARDYLVPSRIHQGKFYALPQAPQQFKQLLMIAGFDKYFQIAPCFRDEDSRADRSPGEFYQLDFEMSFVTQEDVFDAIEPVLFEIFDENKKNNETKVSPYPFRRIPYKESMEVYGTDKPDLRNPLVIDDYTNVFKGSNFKIFSNRIEKG

SEQ ID NO: 185713 - protein, 238 aa, Unknown
  Bacterial polypetide isolated from the Sargasso Sea
MMSGFDRYYQIARCFRDEDLRADRQPEFTQLDVEMSFVDQDDIKSEMESMVRELFKSVLDIDLEKQFSQITHAEAMDRFGSDSPHLGIEMELTEVSDLMRDVEFKVFAGPANDDDSRVACLVLRDSSDLSRKQIDDYTDFVSNYGAKGLAYIRVNEIEKGIDGLQSPILKFLNDSVTNQLIETLSLKNGDTVFFGADKREIVNASLGALRVKMAEDFGLIKDGWFPLWITDFPYVSLG

SEQ ID NO: 185714 - protein, 159 aa, Unknown
  Bacterial polypetide isolated from the Sargasso Sea
WVTEFPLVEYDEAEKKYAAMHHPFTAPHEEDLDKFESDPGAIKARAYDLVLNGNEIGGGSIRIHQKDVQEKMFKLLGIGKEEAEAKFGFLLDALQYGAPPHCGIAMGLDRIVMLLAGADSIRDVIAFPKTQKATCLMTQAPSQVDKKQMKELKLKADLS

SEQ ID NO: 185715 - protein, 282 aa, Unknown
  Bacterial polypetide isolated from the Sargasso Sea
ITDRKSAEEDFRLKYRFLELRTKELQSNIEVRHKTYQAVRKFLSNNNFLEVETPVLMKSTPEGARDYLVPSRIHNGKFYALPQSPQMYKQLLMISGFDRYFQIVKCFRDEDLRADRQPEFTQIDIEMSFVDENDVMKKCEELTRSIFKDVKNIDLVNPFPKMSYSEAMSKYGTDCPDLRYDIMLNDFKPFSEKSDFKAFDSAESVMGIVVPGGAKYSRKEIDIFTDHVKRYKAKGLAWMKSIEGKLNGGISKFFNDDLQKEIIASLNVNDGDILFLIGDDNK

SEQ ID NO: 185716 - protein, 111 aa, Unknown
  Bacterial polypetide isolated from the Sargasso Sea
CNGVELSSGAIRNHVPEIMYKAFEIAGYNKDQVHEKFGGMISAFTYGVPPHGGIAPGIDRIVMLLAQEKNIREVILFPMNQQAQDLMMLAPAEVDKTTLDELNLEVKPTEE

SEQ ID NO: 185717 - protein, 255 aa, Unknown
  Bacterial polypetide isolated from the Sargasso Sea
MTKFRTHNCSELTEKDVGKDIKLSGWLHRKRDHGNLLFIDLRDHFGITQCVIENKDKNFKILEKLKPESVVLIQGNVAKRSPDTQNKELKTGMIEVKIKEFEILSSAKELPMPVFGEQDYPEDIRLKYRFIDLRRNEMHENIKLRSEILSFLRTEMVKNNFLEFQTPILTASSPEGARDFLVPSRVHPGKFYALPQAPQQFKQMIMISGFDRYFQIAPCFRDEDGRADRSPGEHYQLDMEMSFVEQEDIFKIVEP

SEQ ID NO: 185718 - protein, 304 aa, Unknown
  Bacterial polypetide isolated from the Sargasso Sea
FVNNNFLEVETPVLMKSTPEGARDYLVPSRLQNGKFYALPQSPQIYKQILMISGYDRYFQIVKCFRDEDLRADRQPEFTQIDIEMSFVDEEDVFLNMENLTRDIFLSVRGIKLPNTFPRITYKKAMETYGSDKPDTRYEMKLVDLKSYTDRSNFKAFSSVESVYGIVVEKGASYSRKIIDELTDEVKKHNAKGLAWMKYESGEFGGGVSKFFSDSLQKEIVENLNINDGDILFMVGDKKNIVFKALGNLRVLVAQREGLINKDVFEPIWVTEFPMFDYDEDNDRYIAMHHPFTAPRESDIDKLD

SEQ ID NO: 185719 - protein, 283 aa, Unknown
  Bacterial polypetide isolated from the Sargasso Sea
FKELEKIQLESVIKINGKVLERTKETINSELRTGEIEVNIISFEILGKSKELPMPIFSDQDYSEEIRLKYRFLDLRRKKIHENIILRSKVISFIRSKMLELGFLEFQTPILTSSSPEGARDFLVPSRLNPGKFYALPQAPQQFKQLVMVSGFDKYFQIAPCFRDEDSRADRSPGEFYQLDLEMSFVEQEDVFNIVEKLMSSLFKKFSSKKILFDKFPKISYEESMLKYGTDKPDLRNPLIINDLTDIFTREDVKFDIFKKLVKSGSKVRSIITKKTKDKPKKF

SEQ ID NO: 185720 - protein, 147 aa, Unknown
  Bacterial polypetide isolated from the Sargasso Sea
TKKIKFSHNPFSMPQGEINKLDLSNPLNIKAYQYDIVCNGIELSSGAIRNHVPELMYKLFEIAGYSKNDVNSKFSGMINALSYGAPPHGGIAPGIDRIVMLLANEKNIREITMFPMNQNAQDLMMNAPSEISEDQLKELNLSLKKKS

SEQ ID NO: 185721 - protein, 156 aa, Unknown
  Bacterial polypetide isolated from the Sargasso Sea
MKYQPGEIEIKIKNFEILGKTKELPMPVFSDQEYSEEIRLKYRFLDLRRKKIHKNIILRSKVISFIRKEMEKLGFNEFQTPILTSSSPEGARDFLVPSRLNPGKFYALPQAPQQFKQLIMVSGFDRYFQIAPCFRDEDARADRSPGEFYQLDIEMS

SEQ ID NO: 185722 - protein, 146 aa, Unknown
  Bacterial polypetide isolated from the Sargasso Sea
MRSHYCGQLNESLADQEVTLCGWVHRRRDHGGVIFLDIRDREGLAQVVFDPDRAETFAKADRVRSEYVVKVTGKVRLRPEGARNANMASGAIEVLGYELEVLNEAETPPFPLNEYTDVGEETRLRYRFIDLRRPEMAEKLKLRSRI

SEQ ID NO: 185723 - protein, 236 aa, Unknown
  Bacterial polypetide isolated from the Sargasso Sea
MHRYRSHNCGELNKKATGSTVKISGWLHKKRDHGNLLFLDIRDNYGITQCVIDQSNKLFKKLEKTSLETVLLIEGDVVERSKDTINKDLPTGEIEIHITKYENLGECSGLPMPVFSDQEYAEEIRLKYRYIDLRRKKIHENILLRSKIISFIRENLKSMGFNEFQTPILTSSSPEGARDFLVPSRLNPGKFYALPQAPQQFKQLIMVAGFDKYFQIAPCFRDEDARADRSPGEFIN

SEQ ID NO: 185724 - protein, 289 aa, Unknown
  Bacterial polypetide isolated from the Sargasso Sea
MNKYRTHNCGQLSKKNSKSNVVLSGWINKKRDHGNLLFIDLRDNFGITQCLVDKDNKYFKELEKIQLESVIKINGVVNERTSDTKNKELKTGEIEVKIISYEILGTCKELPMPVFSDQEYAEEIRLKYRFLDLRRKKVHENIILRSKVISFIREEMINLGFLEFQTPILTSSSPEGARDFLVPSRLNPGKFYALPQAPQQFKQLIMISGFDKYFQIAPCFRDEDARADRSPGEFYQLDLEMSFVEQEDVFDVVEKLMLKLFKKFSDKKILSEKFPKITFEDSMLKYGTD

SEQ ID NO: 185725 - protein, 221 aa, Unknown
  Bacterial polypetide isolated from the Sargasso Sea
NYKIIEDSIIESLLSTLEVQEGDIIFFGAGKRNIVNDSLAALRDLVAKDLDLLTCEWAPCWVVDFPMFEKNKSGDLTPLHHPFTAPKCTADELKNNPLGALTEAYDIVLNGTELGGGSVRIHDRLMQETVLKLLNINEKEAEEKFGFLIAALQHGCPPHAGLAIGFDRMIMLMTGSDSIRDVIAFPKTQTASCLLTEAPGQAAQEQLEELHIRFHGLEKED

SEQ ID NO: 185726 - protein, 283 aa, Unknown
  Bacterial polypetide isolated from the Sargasso Sea
SIELGREDVIQVKGNVIERESKNPNISTGSIELQVNELTILNKAQTPPFTIENETDGGDELRMQYRYLDLRRNPVKENLILRHRVTMSIRNFLSKADFIDVETPYLIKSTPEGARDFIVPSRMNNGQFYALPQSPQTFKQLLMVGGFDKYFQIVKCFRDEDLRADRQPEFTQIDCEMSFVEQEDVLSQFEELIKHLFQEIKGIKLTEFPRISYAKAMEKYGSDKPDIRFGMTFGNLNEIAKGKGFNVFDSQELIIGIAVPGGANYTRKEIDNWIDWVKKAPSG

SEQ ID NO: 185727 - protein, 266 aa, Unknown
  Bacterial polypetide isolated from the Sargasso Sea
MGESKGQPSGSLIKQMKSFGLELSKKSQKLKEIEENLENILLRLPNLPLDSTLVGKNDKNNKVIETFNEKDKINSSVPHWDLGEKFKIIDLEKGVKLTGARWYLLAGKGAMLQRALVQWMLNEHVFNNGYKEIAPPYMVNKNTMTGSGNLPKFEETLFSDKNNDLWLIPTGEVSLNNMFGNEIIKHELPLKYVTHTPCFRDEKSSAGRDTRGIKRVHQFEKVELYRYEHPSNSMKAFNEMVSEVSKLCEALNFTYRVVELCTGDIG

SEQ ID NO: 185728 - protein, 220 aa, Unknown
  Bacterial polypetide isolated from the Sargasso Sea
MIKRTHTCGELSILNENENVSLNGWISKRRDLGGLIFFDLRDRYGSTQIVFDDKKNAEAFNIAKKLGFEDVIGITGLVIKRPVEAINNKMVTGEIDILVNKILVYNESIPPPFDINDRNSASEEHRLKFRYLELRTKELQFYMKTRHETSLEVRKFLSDQNFFEIETPILMKSTPEGARDFLVPSRIHKGKFYALPQSPQTYKQLLMVSGYDRYFQIVKC

SEQ ID NO: 185729 - protein, 264 aa, Unknown
  Bacterial polypetide isolated from the Sargasso Sea
DINESSKDLVNQVKKIGREYVVSVKGIVEERQSKNPNIKTGDIEISLSEVEILNESKIPPFTIDDNTDGGEELRMKYRYLDLRRNLIKNNLIFRNNVTLEIRKYLNESGFIDVETPYLIKSTPEGARDFIVPSRINKGEFYALPQSPQTFKQLLMVGGIDKYYQIVKCFRDEDLRSDRQPEFTQIDCEMSFVGQDDVLMLFENLVKNTFKKCINVTLEDFPKITYQEAIETYGSDKPDTRFEMKIFDCSESSKEKGFKIWTIVN

SEQ ID NO: 185730 - protein, 272 aa, Unknown
  Bacterial polypetide isolated from the Sargasso Sea
MGKQVMVSGWVHRRRDHGGVIFIDLRDVSGILQLVFDPENQDLFATAEKIRSEFVLSVTGIVRERPHGTINDQMKTGEVELLVEKGEVLSASETPPFHHDEATSEDIRLKYRYLDLRREDMSNNIKVRHEITKSLREYLNNASYFEIETPILTKATPEGARDYLVPSRTQQGNFFALPQSPQLFKQLLMMSGFDRYYQIARCFRDEDLRADRQPEFTQLDVEMSFVDQDDVKSQMESMVKDLFKSVLGIDLEKQFPQITHAEAMDRFGSDSP

SEQ ID NO: 185731 - protein, 230 aa, Unknown
  Bacterial polypetide isolated from the Sargasso Sea
MIKLFGKGPVGKFFSEESLIELMKLTNSEIGDTIFLSCGKQKDVEKILSLARTKIAEELNLIQDNEFAFCWIVDYPIFELDELTNKIKFSHNPFSMPQGDIHNLDLSKPLNLKAYQYDIVCNGIELSSGAIRNHIPELMYKLFDIAGYSKKDVDDKFSGMINALSFGAPPHGGIAPGIDRIVMLLANEKNIREVTMFPMNQNAQDLMMNAPSKVNEIQLKELNLALKTKK

SEQ ID NO: 185732 - protein, 279 aa, Unknown
  Bacterial polypetide isolated from the Sargasso Sea
LTQCVIDKSNKYFKDLEKIQLESVIKINGTVIERSKETINSDLKTGEIEINIVSFEVLGNCKELPMPIFSDQDYAEEIRLKYRFLDLRRKKIHENIILRSKVISFIRNKMQELDFLEFQTPILTSSSPEGARDFLVPSRLNPGKFYALPQAPQQFKQLVMVSGFDKYFQIAPCFRDEDARADRSPGEFYQLDLEMSFVEQEDIFNVVEKLMVSLFKKFSSKKIINENFPRISYEDSMLKYGTDKPDLRNPLLISDLTNIFTREDVKYDIFKKLVSKGSK

SEQ ID NO: 185733 - protein, 255 aa, Unknown
  Bacterial polypetide isolated from the Sargasso Sea
LRFTSVSTLFKQTLMASGFEKYFQFAKCFRDEDLRADRQPEFTQLDIEMSFADSKEVMSLITKMIKQVFKESLSVDLGDFVEITYLEAIEKYGVDKPDLRNPLELVEVKELFKECDFKVFNEPANDKDSRIAAIKVPNGKLLTRKQIDEYTEFVGNYGAKGLAYIRVEDPSKGKEGLQSPIIKFIEDSIIESLIETLEVQDGDIIFFGAGKRNIVNDSLAALRDLVAKDLDLLTCEWAPCWVVDFPMFEKTKVEI

SEQ ID NO: 185734 - protein, 168 aa, Unknown
  Bacterial polypetide isolated from the Sargasso Sea
VETPMLIKSTPEGARDFVVPSRMNAGQFYALPQSPQTFKQVLMVAGMDRYFQIVKCFRDEELRADRQPEFTQVDCEMSFVTQEDVLSTFEGLIRKVFKELAGADLPPFPRMEYVDAMRDYGIDKPDLRFDMKLADLTGLVQGQAGCASFPMFSGAGLVVAIAVPTLGT

SEQ ID NO: 185735 - protein, 225 aa, Unknown
  Bacterial polypetide isolated from the Sargasso Sea
MRTHFAGELNAAAIGQTVTLAGWVARRRDHGGVIFVDLRDSSGIAQVVFRKADVAEQAHHLRSEYCIKVTGVVEARPEGSENQNLASGEIEINVSELEVLNSCAPLPFQLDDEPGEEIRLRYRYLDLRRDKPAYDLRLRSKVNAAAREVLAQHDFVEIETPTMTRSTPEGARDFLVPARLQPGTFYALPQSPQLFKQLLMVAGMERYYQIARCYRDEDFRADRQP

SEQ ID NO: 185736 - protein, 169 aa, Unknown
  Bacterial polypetide isolated from the Sargasso Sea
DKQQFAFCWIVDYPMFERNSVTKKIEFSHNPFSMPQGDLKQLNFNEPLEMKAFQYDIVCNGVELSSGAIRNHLPELMYKLFSIVGYDKDDVKEKFSGMLNALSYGAPPHGGIAPGIDRIVMLLAGVQNIREVTLFPMNQNAQDLMMGAPTKVDDKQLKELNIKIETKKN

SEQ ID NO: 185737 - protein, 192 aa, Unknown
  Bacterial polypetide isolated from the Sargasso Sea
FGAGSSEIVNLSMSSLIKRLGKDLDLYQKDWAPCWITNFPMFESDADNLKALHHPFTRPKENLENFRKDPSEAQAYAYDLVLNGYEIGGGSLRVHDSKMQSAIFDALNISNEEANLKFGFLLDALKTGCPPHGGIALGLDRIVMLLTQTENIRDVIAFPKTQSASCLLTDAPNIVDESQLNELHIKKDLDEE

SEQ ID NO: 185738 - protein, 193 aa, Unknown
  Bacterial polypetide isolated from the Sargasso Sea
IIGDDIKTTQLSLGALRIAIAKKEEYTKSNDFKPVWITDFPMFEYNQEDKRYHSLQHPFTQPKSNDLEKLKSSPESIPSKQYDLIINGYEVAGGSVRIHNSNMQKVIFDILGIDRKEANERFGFFIDALKYGTPPHGGIAFGFDRLVMLLAGTNNIRDVIAFPKTTSAMSLMDGAPSPVSKTQMKELGIQIKK

SEQ ID NO: 185739 - protein, 212 aa, Unknown
  Bacterial polypetide isolated from the Sargasso Sea
MNKYRTHTCGELTLNNKDQTIKLSGWINKKRDHGNLLFLDLRDHYGLTQCVIDKGKKIFKEIEKLPLETVLQVEGKVLVREKDTINKNLNTGEIEVGIEKYKILARTKELPLPVFSDQEYSEEIRLKYRFLDLRRNKIHNNIILRSKIISFIRSEMQKYGFLEYQTPILTSSSPEGARDFLVPSRLNPGKFYALPQAPQQFKQLIMVSGFDN

SEQ ID NO: 185740 - protein, 290 aa, Unknown
  Bacterial polypetide isolated from the Sargasso Sea
NLLFIDLRDHYGITQCVIENNNKYFPILEKIRPESVLKISGKVLARSEGTINSELSTGKIEIAIDTVDILSESKELPIPVFGEQDYPEDIRLKYRFLDLRREEMHNNIILRSKVISFIRTEMLKLGFLEYQTPILTSSSPEGARDFLVPSRLNPGKFYALPQAPQQFKQLIMVSGFDKYFQIAPCFRDEDARADRSPGEFYQLDLEMSFVSQEDIFSVVEKLMVGLFKKFSTKKILFEKFPRIPFNESIEKYGTDKPDLRNPLIINNITQVLNREDVKFQIFKKLIKSGS

SEQ ID NO: 185741 - protein, 166 aa, Unknown
  Bacterial polypetide isolated from the Sargasso Sea
KFAFCWITDYPMFELDEKNNNIVFSHNPFSMPQGDINNLDFNKPLNIKAFQYDIVCNGIELSSGAIRNHIPDLMYKLFSVAGYKKTDVDKKFSGMINALSFGAPPHGGIAPGIDRIVMLLANKQNIREVTLFPMNQNAQDLMMQAPSEVETKQLKDLGIKIENKKN

SEQ ID NO: 185742 - protein, 293 aa, Unknown
  Bacterial polypetide isolated from the Sargasso Sea
EMQKLGFLEFQTPILTSSSPEGARDFLVPSRLNPGKFYALPQAPQQFKQLIMISGFDKYFQIAPCFRDEDARADRSPGEFYQLDVEMSFVEQEDIFQVIETLFLKLFKKFSNKKILHEKFPRISFEDAMLKYGSDKPDLRNPLEISDLTNIFEREDVKFEIFKKLIKNGSMVRALVTKNTADKPRSFFDGIDKWAKDQGSSGLAYFSLEKEQKISAKGPIGKFFSEASLFEIMKQTNANAGDTVFLSCGKKNDVEKILSVARNKIAEDLNLIDNECFSFCWVVDYPMYEIDET

SEQ ID NO: 185743 - protein, 189 aa, Unknown
  Bacterial polypetide isolated from the Sargasso Sea
MHAYRTHTCGELRAENAGSEGRLSGWVHRKRDHGNLLFVDLRDHYGLTQCVIEVDSDIFPQIEALRLETVVCVTGRIEERSDETKNADLPTGAVELRIDSCELLGTSEPLPLEVNSDRDYGEEVRLRYRFLDLRRDKVHHNIILRNSIISSIRRRMIDQGFLEFQTPILTSTSPEGARDFLVPSRLHPG

SEQ ID NO: 185744 - protein, 123 aa, Unknown
  Bacterial polypetide isolated from the Sargasso Sea
NPLNIKAYQYDIVCNGVELSSGAIRNHIPELMYKLFSIAGYEKKHVDQKFSGMINALSYGAPPHGGIAPGIDRIVMLLANEKNIREVTMFPMNQNAQDLMMKAPSEVDLEQLKELNLSVIKKK

SEQ ID NO: 185745 - protein, 142 aa, Unknown
  Bacterial polypetide isolated from the Sargasso Sea
FSHNPFSMPQGELESLNNKNPLDIKAYQYDIVCNGVELSSGAIRNHSPEIMYKAFEIAGYSKKFVEKNFSGMLNALKYGAPPHGGSAPGIDRIVMLLADEPNIREVIAFPMNQQAMDLMMEAPAEINKERLEELGLKLIEKN

SEQ ID NO: 185746 - protein, 258 aa, Unknown
  Bacterial polypetide isolated from the Sargasso Sea
INKKRDHGNLLFLDLRDHYGLTQCVIDEGKTIFKDIEKLPLETVLQVEGKVLVREKDTINKNLNTGEIEVGIEKYRILANTKELPLPVFSDQEYSEEIRLKYRFLDLRRNKIHNNIILRSKIISFIRSEMQKYGFLEYQTPILTSSSPEGARDFLVPSRLNPGKFYALPQAPQQFKQLIMVSGFDKYFQIAPCFRDEDARADRSPGEFYQLDLEMSFVEQEDVFKIVEELFVNLFKKFSSKSLLHEKFPRIPFDEAML

SEQ ID NO: 185747 - protein, 246 aa, Unknown
  Bacterial polypetide isolated from the Sargasso Sea
KENPSFSELENIQLETVVRIEGIVVNRSQETINKEIETGEIEISIKGFSTLGECKELPMPVFSDQEYAEDIRLKYRFLDLRRKKIHENIILRSNVISFIRNEMKSLGFLEFQTPILTSSSPEGARDFLVPSRLNPGKFYALPQAPQQFKQLIMVSGFDKYFQIAPCFRDEDARADRSPGEFYQLDLEMSFVEQEDIFEVVEKLIIKTFQKFSKKKILSKAFPKISYNESMIKYGTDKPRLEKPINY

SEQ ID NO: 185748 - protein, 282 aa, Unknown
  Bacterial polypetide isolated from the Sargasso Sea
PQQFKQLIMVSGFDKYFQIAPCFRDEDARADRSPGEFYQLDLEMSFVEQEDVFQVVEKLMKNLFKKFSKKKILFENFPRIPFKEAMEKYGTDKPDLRNPLLIKDITQIFTREDVKFDIFKKLVKAGSLVRAIVTKNTKDKPRSFFDNLDKWAKDQGASGLAYFSIEQEKSLLGKGPIGKFFSEESIKELMKITNATPGDSIFLACGKQHEIEKILSLARNKIGDELNLINNEEFAFCWIVDYPMYERDDKTNKIKFSHNPFSMPQGDLKNLDFKNPLKIKAY

SEQ ID NO: 185749 - protein, 256 aa, Unknown
  Bacterial polypetide isolated from the Sargasso Sea
KGLVVPNGSEFSRRQIDDIVNYSKELGSAGLIWIVLESEFEFKSIVKKYLDENFVKTLAQSSGAKSGDMILMVAGKNKNTLEILGNLRSKLGRDLQLYDQNELKFCFITDFPLFEWNEDSQKWESSHHPFTMPHEEYLSNVADNPGKIRAYCYDMVANGYELASGSIRIHKKELQEQIFSVLGYSNKQTNEQFSQLLNSFEYGAPPHGGIAPGIDRIVMLLAGTENIRDVIAFPKTQSGFDPLFESPKRIIERTVR

SEQ ID NO: 185750 - protein, 258 aa, Unknown
  Bacterial polypetide isolated from the Sargasso Sea
MLSGWINKKRDHGNLLFIDLRDNYGITQCIIDKDNSNFSILEKIQLETVVKIEGEVINRSKETINKEIETGEIEIKIKKFEVLGTCKELPMPVFSDQEYSEEIRLKYRFLDLRRKKIHENIILRSKVISFIRNEMNSYGFLEYQTPILTSSSPEGARDFLVPSRLNPGKFYALPQAPQQFKQLIMISGFDKYFQIAPCFRDEDARADRSPGEFYQLDLEMSFVEQDDIFRIVEKLLINTFKKFSDKKIMYEKFPKISY

SEQ ID NO: 185751 - protein, 139 aa, Unknown
  Bacterial polypetide isolated from the Sargasso Sea
CSPKNIRSKDSENFKKEIENSTANAYDLVLNGLELGGGSLRIHEANLQREVLKTVGLTDKEIDEKFGFLIEALEMGAPPHGGIAFGLDRITMLIIGADSIRETIAFPKNQQAKCLLTNAPSNVSESQLKELDIEITIDE

SEQ ID NO: 185752 - protein, 129 aa, Unknown
  Bacterial polypetide isolated from the Sargasso Sea
SDKDLKNPLDILAYQYDIVCNGVELSSGAIRNHKPELMYKLFSIAGYEKSQVDEKFSGMINALSYGAPPHGGIAPGIDRIVMLLANEKNIREVTMFPMNQNAQDLMMKAPSEVTEDQLKELSLNLKLKK

SEQ ID NO: 185753 - protein, 76 aa, Unknown
  Bacterial polypetide isolated from the Sargasso Sea
KFGFLLDALKTGCPPHGGIALGLDRIVMLLTQTENIRDVIAFPKTQSASCLLTDAPNIVDESQLNELHIKKDLDEE

SEQ ID NO: 185754 - protein, 122 aa, Unknown
  Bacterial polypetide isolated from the Sargasso Sea
PLDILAYQYDIVCNGIELSSGAIRNHKPELMYKLFSIAGYDKNQVDEKFSGMINALSYGAPPHGGIAPGIDRIVMLLANEKNIREVTMFPMNQNAQDLMMNAPSEVNPDQLKELNLALKTKK

SEQ ID NO: 185755 - protein, 261 aa, Unknown
  Bacterial polypetide isolated from the Sargasso Sea
TFPRITYEEAMETYGSDKPDIRYEMKLVDLISYTDRSDFNAFNSVESVYGIIVEKGAAYSRKIIDELTEEVKKHNAKGLAWMKYESGKFGGGVSKFFSDSLQKEIVKNLNINDGDILFMVGDKKNIACKALGNLRVLVAQREGLINKDEYKPIWVTEFPMFDYDEDNDRYIAMHHPFTAPRESDIDKLDSDPGNALSRGYDLTMNGHEIAGGSIRIHSPAIQEKVFSLLGLSHEQAVEKFGFLVEALQYGAPPPWRDSIWL

SEQ ID NO: 185756 - protein, 287 aa, Unknown
  Bacterial polypetide isolated from the Sargasso Sea
RNYLDKNEFHEIETPILTKATPEGARDYILPSRIQPGSFYALPQSPQLFKQLLMIGGLDKYYQIARCFRDEDLRADRQPEFTQIDIEASFLNQEEIMKLSEKMIKDVIKEFSGEKLEKFKMIDWHDAMEDYGCDKPDLRIPLKLIEISDLVKNEEFKVFSDPAKKEGSRVVALKVPNGNTMSRGQIDDYTKFVSKLGAKGLAYIKINDVKDLVSGIQSPILKFLNKETIQNIFKTLEVKTDDLIFFGAGTESIVNLSMSSLIKKLGHDLDLYVSKWAPCWIVNFPNV

SEQ ID NO: 185757 - protein, 247 aa, Unknown
  Bacterial polypetide isolated from the Sargasso Sea
MRTNFCGELNKKFIGKEITICGWIHRRRDHGGVIFLDIRDTTGIVQVVIRPEAKETFKIAEQVRSEFVLKASGIVEERPEDSENTTLTTGEIEINCSSIEVLNTAETPAFPLDQSSEVGEDVRLKHRTLDLRRPVMQENLRIKSKLTKSIRDYLEKHSFVDIETPILTKATPEGARDYLVPSRTNPGNFFALPQSPQLFKQMLMISGFDRYYQIARCFRDEDLRADRQPEFSQIDIEASFVEENDVM

SEQ ID NO: 185758 - protein, 294 aa, Unknown
  Bacterial polypetide isolated from the Sargasso Sea
LDMEMSFVEQEDIFKIVEPIFSELFSKFGKGKKINKFPFPRISYKTSLDKYGTDKPDLRNPIELCNVTNIFKSDDVKLKIFKELINKGAIVKAIPLKNTVSQPRSFFDNLNNWAISEGASGLAYITFEKNNGKITGKGPIGKFFSEKGISEILKLCKLDEKGSVFFVCNKEEEANKFAGIARQKIAEELNLIDNSLFNFCWIVDFPMFHYDEKEKKIDFSHNPFSMPQTEIEDFDQIDPLNVLAYQYDLVCNGYELSSGAIRNHITEYLFKVFKKVGYSKEMVEKNFSGMIKAL

SEQ ID NO: 185759 - protein, 144 aa, Unknown
  Bacterial polypetide isolated from the Sargasso Sea
KIKFSHNPFSMPQGDIDNLDLSDPLKLKAFQYDIVCNGIELSSGAIRNHKPDLMYKLFNIAGYSRETVNEKFSGMINALSYGAPPHGGIAPGIDRIVMLLADEKNIREVTMFPMNQNAQDLMMNAPSDVDENQLKELNISKRKK

SEQ ID NO: 185760 - protein, 206 aa, Unknown
  Bacterial polypetide isolated from the Sargasso Sea
KTNAEVGDSIFLACNKKDEVEKITSLARDKIAQDLGLIDDNVFAFCWVVDYPMYEKDEITNKIKFSHNPFSMPQGDLRQINFEKPLDILAYQYDIVCNGIELSSGAIRNHIPELMYKLFSIAGYDKKNVDEKFSGMINALSYGAPPHGGIAPGIDRIVMLLANEKNIREVTMFPMNQNAQDLMMNAPSEINENQLKELNLSLKLKK

SEQ ID NO: 185761 - protein, 243 aa, Unknown
  Bacterial polypetide isolated from the Sargasso Sea
SKPETVLKIIGKDVKRSSGTENLDLKTGKIEISIESVEVLSNAKELPMPVFGEQDYPEDIRLKYRFLDLRRDEMHKNIILRSQVISFIRSEMLKLGFLEYQTPILTSSSPEGARDFLVPSRLNPGKFYALPQAPQQFKQLIMVSGFDKYFQIAPCFRDEDARADRSPGEFYQLDLEMSFVEQEDVFNIVEKLMINLFKKFSSKKILEEKFPRIPYQEAMRKYGTDKPDLRNPLIINEITDLFK

SEQ ID NO: 185762 - protein, 307 aa, Unknown
  Bacterial polypetide isolated from the Sargasso Sea
MSLERTMVGKSIIISGWINKKRDHGNLLFIDLRDNFGITQCIINQENKNFKELEKIQLETVIKVEGKVVNRSKETINKDIETGEIEISIENFTVLGTCKELPMPVFTDQEYSEEIRLKYRYLDLRRKKIHENIILRSKVISFIRAEMNNNGFLEFQTPILTSSSPEGARDFLVPSRLNPGKFYALPQAPQQFKQLIMVSGFDKYFQIAPCFRDEDARADRSPGEFYQLDLEMSFVEQEDVFKVVEKLLINTFKKFSNKKLISEKFPRISYAEALAKYGSDKPDLRNPLIINDITEIFLGDDVSFENL

SEQ ID NO: 185763 - protein, 284 aa, Unknown
  Bacterial polypetide isolated from the Sargasso Sea
PSRINKGKFYALPQAPQQFKQLIMVSGFDRYFQIAPCFRDEDSRADRSPGEFYQLDLEMAFVEQQDVFNATQPVIYEVFKKFSNKKVDKNFEKITFKDAMIKYGTDKPDLRFDIEIQDVTDVFIGSDFKIFANSINSGSVVRALPGKKCGSRSIADKMNSWAQTQGSPGMGYIIYGEGEAKGPIANAIGSGKSSELKNRFNLNDGDALFFCCSKESVASDLAGKARLMIAEEMNMIDKNLFKFCWIVDYPMYEINDQTNKIEFSHNPFSMPQGGLKALYEKNPL

SEQ ID NO: 185764 - protein, 220 aa, Unknown
  Bacterial polypetide isolated from the Sargasso Sea
KGNKNFLDLEKTQLETVIKIEGKVVNRSNETVNKDIKTGEIEVAIDKFEILGTCKELPMPVFSDQEYAEEIRLKYRFLDLRRKKIHENIILRSKVISFIRDEMIKFGFLEFQTPILTSSSPEGARDFLVPSRLNPGKFYALPQAPQQFKQLIMVSGFDKYFQIAPCFRDEDARADRSPGEFYQLDLEMSFVEQEDIFNVVEKLLVNTFKKFSNKKLMYSK

SEQ ID NO: 185765 - protein, 233 aa, Unknown
  Bacterial polypetide isolated from the Sargasso Sea
KQLLMMAGFDKYFQIAPCFRDEDSRADRSPGEFYQLDFEMSFVTQDDVFNAIEPVLYEVFDENKNYHTDEKITVSSYPFKRIPYDEALELYGTDKPDLRNPLLIKDCTDIFKGSEFKIFSNLIEKKYKVKGIVVSNTADKPRSFFDKLNNWAREEGAAGLGYISYDDEHKGPIAKNLDNERLKQLKLKDNESIFFVCDNQKDAQLFAGKVRDKLCLDLNLLNKNAFEFCWIVD

SEQ ID NO: 185766 - protein, 188 aa, Unknown
  Bacterial polypetide isolated from the Sargasso Sea
MSFRSLSCGSVSQDHIDQEIEVAGWIHRRRDHGGVIFFDLRDSSGLLQVVYNPEDREVFSIAEGCRNEFVIKAKGIVCKRPEGTVNPGLPTGMVELNASNLEILNPSKPLPFSLDEHTSVGEETRLKYRFLDLRREEMQRNLRLRSKVSQEIRKYLEKNDFLEIETPILTKATPEGARDYIVPSRTYP

SEQ ID NO: 185767 - protein, 276 aa, Unknown
  Bacterial polypetide isolated from the Sargasso Sea
DLRDNYGLTQCVIDKSNSIFKDIEKLPLETVLKINGEVLERTKETINLNIQTGKIELSIKKFEILGMTKELPMPIFSDQEYAEEIRLKYRFLDLRRKKIHQNIILRSKVISFIRSEMQKLGFLEFQTPILTSSSPEGARDFLVPSRLNPGKFYALPQAPQQFKQLVMISGFDKYFQIAPCFRDEDARADRSPGEFYQLDIEMSFVEQEDIFNVIEKLFVQVFNKFSSKKILKDKFPRISFSEAMLKYGSDKPDLRNPILIYDLTEIFKRDDVKLKF

SEQ ID NO: 185768 - protein, 221 aa, Unknown
  Bacterial polypetide isolated from the Sargasso Sea
GKFFSENSLKELMKKCNAEVGDSVFLACGKKKEIEKILSLARDKIANDLNLIAKDQFSFCWIIDYPMYEFDENSKKIVFSHNPFSMPQGNINNLNLDKPLDLKAYQYDIVCNGVELSSGAIRNHIPELMYKLFAIAGYSINEVNNKFSGMINALNYGAPPHGGIAPGIDRIVMLLAEKENIREVTLFPMNQNAQDLMMQAPSEIDDKQLKELNIKKDIKNN

SEQ ID NO: 185769 - protein, 293 aa, Unknown
  Bacterial polypetide isolated from the Sargasso Sea
IELVDVTNLFDSSDVTLKIFKDKIKKGGIVKAIPVPNTNEKPRSFFDNLNNWAISEGASGMAYITFEKNKDKIIGKGPIAKFFSEKAISELIKILKLTEKDSAFFVCNQPLEALKFSGIARQKIAQELELIDKNKFSFCWIVDFPMYHYDENEKKIDFSHNPFSMPQEKLEDFDKKDPLKILAHQYDLVCNGYELSSGAIRNHMPEYLFKVFEKVGYSKEMVTKNFSGMINALSYGAPPHGGMAPGIDRIVMLLANQKNIREVTLFPLNQNAEDLLMGAPSSIDEKQLKELNI

SEQ ID NO: 185770 - protein, 247 aa, Unknown
  Bacterial polypetide isolated from the Sargasso Sea
DNGSVVKGIVVNNTAHQPRSFFDKLNNWARDEGAAGLGYISLIDNSFKGPIAKNLNEGQLLALKLKDNESIFFICDKLREAQIFSGKVREKICNDLNLIDKNLFEFCWIVDFPMYEIDEKTNKIQFSHNPFSMPQGEMQALENNNPLEIKAYQYDIVCNGVELSSGAIRNHKPEIMYKAFEIAGYSKKELEDKFSGMLNALKFGAPPHGGSAPGIDRIVMLLADEPNIREVIAFPMNQQAMDLMMDA

SEQ ID NO: 185771 - protein, 220 aa, Unknown
  Bacterial polypetide isolated from the Sargasso Sea
MRSHHCGNLNIKNLNEEVTICGWIHRRRDHGGVIFLDVRDTTGIVQVVVNPENVEAFKIAEDIRSEYVIKAFGQVEGRPEDSQNDQLTTGDIEIKCSSIELLNEAETPAFPLDQSSEVGEDVRLKNRTLDLRRPEMQKNLRLKSDLTKSIRDYLEKNNFVDIETPILTKATPEGARDYLVPSRTSAGNFFALPQSPQLFKQMLMISGFDRYYQIARCFRD

SEQ ID NO: 185772 - protein, 288 aa, Unknown
  Bacterial polypetide isolated from the Sargasso Sea
EFTQIDLETSFMSSDQVRGMTEKMIREMWQSLLNVDLGDFPIMPYSEAMSLYGSDKPDLRNPMKLVDVADLVKDVEFKVFSGPANDEKGRVAVLTVPGGAKLSRKQLDDYTKFIGIYGAKGLAWMKVNDRDAGAEGVQSPIAKFLNEDVITQLLERTNAQTGDIILFGADKRNTVNEAMGALRLKIGVDLEITNLNSWAPLWVVDFPMFEEDDEGTLHAVHHPFTAPKDISASELEANPAAAISDAYDMVLNGYEVGGGSVRIHNADMQEAAFRILGIDAQEQQDKFG

SEQ ID NO: 185773 - protein, 268 aa, Unknown
  Bacterial polypetide isolated from the Sargasso Sea
EALSKNIKLRSSIISSIRNRMVNQGFQEFQTPILTASSPEGARDYLVPSRIHSGKFYALPQAPQIFKQLIMVSGFDKYFQIAPCFRDEDARADRSPGEFYQLDVEMSFCTQEDVFQNLEPVLSGVFEEFSEGKTVTVSPFPQIRYKDSMLKYGSDKPDLRNPIIIYDVSDEFRDSKFGIFAKIVAAGGVVRAIPAVGSANNPRSFFDKLNDWAREEGFGGLGYIMFNDDEGKGPIARNLESERSMTIRDKLGLTNGDSVFFVANLDEV

SEQ ID NO: 185774 - protein, 304 aa, Unknown
  Bacterial polypetide isolated from the Sargasso Sea
VRLSGWVHRKRDHGGLLFIDLRDHFGLTQLVFDPDSSAFQEAEKVRNESVITINGKVVQRSDDTINKVLPTGNIEVYVDTLEVIGNSDDIPLPVFGEPDYPEEIRLKYRFLDLRRETLHKNIILRSEIINFIRSKMIENDFLEIQTPIMTASSPEGARDYLVPSRIHQGKFYALPQAPQQFKQLLMTSGFDKYFQIAPCFRDEDARADRSPGEFYQLDIEMSFVNQEDIFESVEPLLRDVFEKFSKNMAVNSQFPRISYAESIQKYGTDKPDLRVEIEIDDITEVFVNSGFKIFADQISKNEKI

SEQ ID NO: 185775 - protein, 297 aa, Unknown
  Bacterial polypetide isolated from the Sargasso Sea
LTSSSPEGARDFLVPSRLNPGKFYALPQAPQQFKQLIMVSGFDKYFQIAPCFRDEDARADRSPGEFYQLDLEMSFVEQEDVFNVVEKLMINLFKNFSSKKLINNKFPKIPYEEAMLKYGTDKPDLRNPLLIYDLTNIFTREDVKFDIFKKLVKSGSNVRAIVTKNTKDKPRSFFDNIDKWAKNEGASGLAYFTIENQNEISAKGPVGKFFSKKSLEEIMKITEAKVGDSIFFACGKLKEVEKISSLARAKIAEDLNLINHDSFAFCWIVDYPMFEIDDENKIKFSHNPFSMPQGNMK

SEQ ID NO: 185776 - protein, 263 aa, Unknown
  Bacterial polypetide isolated from the Sargasso Sea
MFEKIEKIPLETVVQFGGQVVKREKDTINKDLNSGEIEIKITDFKILGNTKELPLPVFSDQEYSEEIRLKYRFLDLRRNKIHKNINLRSRVISFIRKEMESFGFLEYQTPILTSSSPEGARDFLVPSRLNPGKFYALPQAPQQFKQLIMVSGFDKYFQIAPCFRDEDARSDRSPGEFYQLDIEMSFVDQKDIFDIVEKLLNKVFKKFSSKKILNEKFPKITFYESMLKYGTDKPDLRNPLVICDLTKIFERQDVKFEIFKKWV

SEQ ID NO: 185777 - protein, 144 aa, Unknown
  Bacterial polypetide isolated from the Sargasso Sea
MNAFRSHNCDELNASNDGDFVRLSGWVHRVRDHGGILFIDLRDHYGFTQILADPDSKAFSNVEKVRSEWCIRIDGQVKLRGTDLINEKIPTGEIEVFIHELEVLGQSDELPLPVFGEQDYPEETRLKYRFLDLRRDKLHKNMML

SEQ ID NO: 185778 - protein, 251 aa, Unknown
  Bacterial polypetide isolated from the Sargasso Sea
ILKRSKIVSTIRNFLEERNFNEIETPILTRATPEGARDYILPSRVHPGSFYALPQSPQLFKQMLMMGGMDRYYQVARCFRDEDLRADRQPEFTQIDIEASFVEEKDIIELGSSLLKLLLKDFADHNIDSIDELDYADAINKYGSDKPDLRIPLELIEISEEAKKEEFKVFSDPAKNDGSRVVALKVDGGNKLTRSQIDEYTNFVGKLGAKGLAYIKINDASDIENGLQSPILKFLSKDFITALFGRLNPVN

SEQ ID NO: 185779 - protein, 326 aa, Unknown
  Bacterial polypetide isolated from the Sargasso Sea
RLHGKIVFVDLRDRYGKTQIVFDQNQFLDDFDTIKKLSFEDVISIKGVVKSRDEAAINPKMRTGVIEVVVVEFSLLNKAATLPFVLKDRDSSEEPLRLKYRYLELRFEELQKNLIIRHKTYQAVRGYLSDNDFLEVETPILMKSTPEGARDFLVPSRIHRGKFYALPQSPQIYKQILMISGYDRYFQIVKCFRDEDLRADRQPEFTQIDIEMSFIDEEIIFTFMENLTRHVFSSVKNLDLPDPFPRITYADAMERYGSDKPDTRFGMELINFKPFSDKSDFNAFSDVDSVKAIIVSEGAKYSRKIIEQLTEDAKKNGAKGLAWMKL

SEQ ID NO: 185780 - protein, 277 aa, Unknown
  Bacterial polypetide isolated from the Sargasso Sea
DFNAFRSVERVKGIVVKGGAKYSRKIIDELTEFVKKYKAKGLAWMKVQQDGFEGGISKFFSVDLQDSLQNELGLKENDILFMIGDDSSIVLNALGQLRSKIAKMEDLANKDEFKPVWVTEFPMFDHDDEMGRFVAMHHPFTAPREEDVELLDSDPSKALSRGYDLTMNGYEIAGGSIRIHAPKIQEKVFSLLGLSHDEAVEKFGFLVEALTYGAPPHGGIAFGFDRLVMLLAGTENIRDVIAFPKTTSATSLMDQSPSSVSQSQLKELGITINDPED

SEQ ID NO: 185781 - protein, 203 aa, Unknown
  Bacterial polypetide isolated from the Sargasso Sea
LKSMTGSKAGDLTFIISGDKKKTLTQLGSLRIHVAEKLGLRDKNKFNALWVTDFPMFEWDEDSKRYHAMHHPFTSPVENKIGEDPGSTLANAYDLVINGNEIGGGSIRIHDQKLQEEVFSILGFSKKEAFDQFGFLLEAFNYGAPPHGGIAFGLDRLAAVMNGEESIRDYIAFPKNNSGRDVMIDSPSKIDKDQLDDLNIKLK

SEQ ID NO: 185782 - protein, 279 aa, Unknown
  Bacterial polypetide isolated from the Sargasso Sea
LRLEDAGSKVSLAGWINRKRDHGNVLFVDLRDHYGVTQCVIEKTNTILLKLVDSLRVESVIKIDGNVVEREPDTINKSLNTGTIEIAVDSVEVLSEAKELPMPVFGENDYPEEIRLKYRFLDIRREELHKNIVLRSSIISHIRKLMSDAGFLEMQTPILTASSPEGARDYLVPSRIHPGKFYALPQAPQQFKQLIMAGGFDKYFQIAPCFRDEDARADRSPGEFYQLDMEMAFVEQDDVFNAIEPILHSVFTTFSDFNVTEVPFPRITYADAMRKYGSD

SEQ ID NO: 185783 - protein, 299 aa, Unknown
  Bacterial polypetide isolated from the Sargasso Sea
ESNLNKKIVLSGWLHRKRDHGNLLFIDLRDHYGITQCVIENNNNHFNILEKTRPESVLKITGKVVKRSEGTENIELKTGKIEVAIESVEVISTAKELPIPVFGEQDYPEDIRLKYRFLDLRRDEMHKNIILRSKVISFIRTEMLKLGFLEYQTPILTSSSPEGARDFLVPSRLNPGKFYALPQAPQQFKQLIMVSGFDKYFQIAPCFRDEDARADRSPGEFYQLDLEMSFVEQEDVFEVIEKLMINLFKNFSSKKIVSEKFPRISFRESMKKYGTDKPDLRNPLVINDITKIFSRDDVK

SEQ ID NO: 185784 - protein, 236 aa, Unknown
  Bacterial polypetide isolated from the Sargasso Sea
AYFTFEKNTDIEAKGPVGKFFSPKALKEIMNITSAKIGDSIFFSCDKETNVLQLMSSAREKIARDLNLVDENVFAFCWIVDYPMYEKDKITGKIKFSHNPFSMPQGDEKKIDFKNPLNIKAFQYDIVCNGTELSSGAIRNHKPELMYKLFEIAGYDKTEVENKFKGMINALNFGAPPHGGIAPGIDRIIMLLANEKNIREVTLFPMNQTAQDLMMNAPSEISEKQLKELYISLKKK

SEQ ID NO: 185785 - protein, 285 aa, Unknown
  Bacterial polypetide isolated from the Sargasso Sea
PSRTHQGKFFALPQSPQIFKQLLMMSGFDRYYQIVRCFRDEDLRADRQPEFTQLDIEMSFVDQQSVMNKMQDLIRYVFDQVMNISLPEVFPVMPYAEAMKRFGSDKPDLRIPMELVDLSDIMKEVEFKVFSGPAKDKDGRVAALAVPGGSSLSRKEIDDYTSFVARYGAKGLAYIKIEDISKKKDGMQSPILKFLPDEVIDELVNRVDINDGDIIFFGADKENIVNDALGALRVRIGKDLNLLEEGWQPLWVTDFPMFEKDKNSNNWTSLHHPFTAPSIDDAEKL

SEQ ID NO: 185786 - protein, 261 aa, Unknown
  Bacterial polypetide isolated from the Sargasso Sea
MYRSHNCGELKISDVGKNVKLAGWVQKIRNKGFLIWIDLRDRYGITQLIINSEKSSKKVIESVKDIGREFVIQVEGEVIKREAINKNISTGEIEILVSEISVLNSSKLPPFTIENDTDGGEELRMKYRYLDLRRSILKDNIIFRNELTFQVRKYLKEQGFIDIETPYLIKSTPEGARDFVVPSRINAGEFYALPQSPQTFKQLLMVSGFDKYVQIVKCFRDEDLRADRQPEFTQIDCEMSFVNQEDVLNTFEGLVQNLFKV

SEQ ID NO: 185787 - protein, 125 aa, Unknown
  Bacterial polypetide isolated from the Sargasso Sea
MSNPLKIKAYQYDIVCNGIELSSGAIRNHIPELMYKLFEIAGYSKNDVDGKFSGMINALSYGAPPHGGIAPGIDRIVMLLANEKNIREVTMFPMNQNAQDLMMNAPSEISDDQLKELNLTIKNKK

SEQ ID NO: 185788 - protein, 237 aa, Unknown
  Bacterial polypetide isolated from the Sargasso Sea
MNSFRSHNCGELSSKDIDKSVVLSGWINKKRDHGGLLFIDLRDHYGITQCVFDSNIKNFNKIESLKLESVLKISGKVIERSEETINQSLLTGRVEILVESFEILNESNQIPFQIAVDDDSPEELRLKYRYLDLRRGEVHKKIKLRSDVINSLRKKMISRGFLEIQTPILTASSPEGARDFLVPSRLNNGKFYALPQAPQIFKQLLMVSNFDKYFQIAPCFRDEDARADRSPGEFYQL

SEQ ID NO: 185789 - protein, 177 aa, Unknown
  Bacterial polypetide isolated from the Sargasso Sea
KIAKDLNLINNEIFAFCWVVDYPMFEKDETTKKIGFSHNPFSMPQGEIDQINFDTPLDILAYQYDIVCNGVELSSGAIRNHIPELMYKLFLIAGYSKQDVDEKFSGMINALSYGAPPHGGIAPGIDRIVMLLANEKNIREVTMFPMNQNAQDLMMDAPSNVSDKQLKELNISLKSKK

SEQ ID NO: 185790 - protein, 95 aa, Unknown
  Bacterial polypetide isolated from the Sargasso Sea
QQTVFRVLGISEEEQQEKFGFLLDALKYGAPPHGGLAFGLDRLVMLMTGASSIREVIAFPKTQSAACVMTQAPGVVDAKSLRELHIRLREQPKAE

SEQ ID NO: 185791 - protein, 130 aa, Unknown
  Bacterial polypetide isolated from the Sargasso Sea
YDVNKLDRDPGSALSRGYDLTMNGHEIAGGSIRIHSPEIQEKVFSLLGLSQKEAVKKFGFLVEALRYGAPPHGGIAFGFDRLVMLLAGTDNIRDVIAFPKTTSATSLMDESPSKVDSDQLKDLGLKLEDN

SEQ ID NO: 185792 - protein, 298 aa, Unknown
  Bacterial polypetide isolated from the Sargasso Sea
TEDVFSEIEPVLAGVFEEFSTWSVPQPFPRIPFSEALLKYGTDKPDLRIPIEICDVSDLFADSEFAIFAKTVADGGVVRALPGPKCGSRAICDRMNSWAQSEGAPGMGYIILADGEGRGPIASRISKDALDQLKGRTGMGDGDAIFFSAGKEADAAKLAGNARLKLGDDQDLIERDIYKFCWVVDFPMFENNEITGEIEFSHNPFSMPQGGLEALENKDPLDILAYQYDIVCNGIELSSGAIRNHLPDVMIKAFSIAGYSKDEVEDRFSGMLSAFRYGAPPHGGFAPGIDRIVMLIAN

SEQ ID NO: 185793 - protein, 161 aa, Unknown
  Bacterial polypetide isolated from the Sargasso Sea
CWIVDYPMFEKDVSTNKIKFSHNPFSMPQGDLSEKNFENPLDILAYQYDIVCNGIELSSGAIRNHKPELMYKLFSIAGYDKNQVDEKFSGMINALSYGAPPHGGIAPGIDRIVMLLANEKNIREVTMFPMNQNAQDLMMNAPSEINPDQLKELNLAFKTKK

SEQ ID NO: 185794 - protein, 54 aa, Unknown
  Bacterial polypetide isolated from the Sargasso Sea
GLDRLVMLMAGAESIRDVIAFPKTQTASDLLTGAPSAASTAQIKELGIRVRSPS

SEQ ID NO: 185795 - protein, 231 aa, Unknown
  Bacterial polypetide isolated from the Sargasso Sea
NEKISGKGPVGKFFSEESLKEIMKISNAEVGDSIFLACGKITEVEKILSISRNKIAKDLNLIDEAQFAFCWIVDYPMYELDEQTKQVKFSHNPFSMPQGEIDKLDFKNPLKIKAFQYDIVCNGVELSSGAIRNHIPELMYKLFSIAGYDKKKVEEKFSGMLNALSYGAPPHGGIAPGIDRIVMLLANEKNIREVTLFPMNQNAQDLMMQAPSEVEPKQLKELGIKIDIKKN

SEQ ID NO: 185796 - protein, 79 aa, Unknown
  Bacterial polypetide isolated from the Sargasso Sea
PAGRAEYGTPPHAGLAFGLDRLTMLLTGTDNIRDVIAFPKTTAAACLMTEAPSFANPTSLGELGIQVVAKETKESPENK

SEQ ID NO: 185797 - protein, 295 aa, Unknown
  Bacterial polypetide isolated from the Sargasso Sea
HEFELLGSCKELPLPVFSDQEYSEEIRLKYRFLDLRRKKIHENIILRSKVISFIRNEMHKLGFLEFQTPILTSSSPEGARDFLVPSRLNPGKFYALPQAPQQFKQLIMVSGFDRYFQIAPCFRDEDARADRSPGEFYQLDLEMSFVEQEDVFKVVENLMVNTFKEFSKKKLLYTKFPKISFNDAMLKYGTDKPDLRNPLIIYEITEIFSRADVSFEIFKKLVKSGSIVRCIVAKNTKDKPRSFFDNIDKWSKEQGASGLAYFTLDKEDKISAKGPVGKFFSKEALEQIMLKTESQ

SEQ ID NO: 185798 - protein, 232 aa, Unknown
  Bacterial polypetide isolated from the Sargasso Sea
SGLAYFTFEKDNKISAKGPVGKFFSEEALLEIMKITKSEVGDSIFLACGKQNELEKITALARDKIAKDLDLIDDDTFAFCWIVDYPMFEKDAITNKIKFSHNPFSMPQGELKDKDFENPLDILAYQYDIVCNGIELSSGAIRNHKPNLMYKLFSIAGYNKAEVDEKFSGMISALSYGAPPHGGIAPGIDRIVMLLANEKNIREVTMFPMNQNAQDLMMNAPSEINKDQLKEL

SEQ ID NO: 185799 - protein, 281 aa, Unknown
  Bacterial polypetide isolated from the Sargasso Sea
NKNLDTGYIEIIIDDFNLLSNSSTLPLPVNSDIEYGEDVRLKHRYLDLRRNKLHKNILLRNKIISSIREKMNKKNFVEFQTPILTSTSPEGARDYLVPSRIHQGKFYALPQAPQQFKQLLMIAGFDKYFQIAPCFRDEDSRADRSPGEFYQLDFEMSFVTQEDVFDAIEPVLYEIFEENKTYSKDKECIVTKYPFPKIPYKEALEKYGSDKPDLRNPLIIRDFTNIFIKSNFKIFANKIDDGFIVKGIVVNDSEEKPRSFFDKLNSWAQNEGAPGLGYINF

SEQ ID NO: 185800 - protein, 170 aa, Unknown
  Bacterial polypetide isolated from the Sargasso Sea
QPGDLVLIVADSFEVSCKALHTLRKWLGDTLELYSSGDMHFSWVVDFPMFAHDTETGQWAAMHHPFTAPREADLDQLENNPAGCRAIAYDLIINGSEAGGGTIRIHDSATQEKVLKLLGISPEIAQDRFGFLLDALKSGAPPHGGIALGIDRWVMLFGGLDNIRDVISVS

SEQ ID NO: 185801 - protein, 282 aa, Unknown
  Bacterial polypetide isolated from the Sargasso Sea
MRVFVHKLIDKDWPILRFEDAVKWYGTDKPDLRNPLKMETVSEHFESSGFTIFENILKDSDSEIRAIPAPNGGSRKFCDRMNSFAQKEGLPGMGYIFWRDGDSGIEGAGPIAKNIGSEKSEAIRHQLDLNVGDAAFFLGGKPADFESFASKARMEIGSELNLINRDRFAFAWIVDFPMFERNPETGAIDFSHNPFSMPQGGSKALDGDPLSVLGFQYDLTCNGYELLSGAIRNHDLDLMFKAFRIAGYQEDEVNDKFGGMVNAFKYGTPPHGGCAAGIDRIV

SEQ ID NO: 185802 - protein, 276 aa, Unknown
  Bacterial polypetide isolated from the Sargasso Sea
AKDQNSRVVAMRVPNGNSLSRGQIDDYTKFVSKLGAKGLAYIKINDVKDLENGIQSPILKFLKSETISNIVDVLKVKTDDLIFFGAGPQPVVNLSMSSLIKKLGEDLNLYSSKWAPCWIVNFPMFEKNAEGDLTPLHHPFTLPQCSKKELLEDPKKSIAHAYDVVLNGYEIGGGSLRIFDKDMQQSIFSILNISKEEADKKFGFLLKALSSGCPPHGGIAFGLDRIVMLVTNTTNIRDVIAFPKTQSAACLLTDAPSKVEKEQLEELKIISTHKEE

SEQ ID NO: 185803 - protein, 219 aa, Unknown
  Bacterial polypetide isolated from the Sargasso Sea
GISKFFNEDLQNDLIKKTGIKSGDIIFMIAGNSKTTLKALGNLRIEIAKQENLIDNNLFKPVWVTDFPMFDYDDEQNRYIAKHHPFTAPKIEHVDSFDKKPLEALSRGYDLTMNGYEIAGGSIRIHSSHVQEKVFSLLGLSHEEAVEKFGFLVEALNYGAPPHGGIAFGFDRLVMLLAHTENIRDVIAFPKTTSATSIMDQSPSEVSNSQLIDLGIKIK

SEQ ID NO: 185804 - protein, 288 aa, Unknown
  Bacterial polypetide isolated from the Sargasso Sea
ILLRSKIISYIRKEMTTLGFSEFQTPILTSSSPEGARDFLVPSRLNPGKFYALPQAPQQFKQLIMVSGFDKYFQIAPCFRDEDARADRSPGEFYQLDIEMSFVEQEDIFEVVEKLMLNLFKKFSNKKILFEKFPKISFHDAMLKYGTDKPDLRNPLLISDLTYIFEREDVKFDIFKKLVKSGSIVRAIITKNTKDKPRSFFDGIDKWAKEQGASGLAYFTFEEDKNISAKGPVGKFFSEESLKEIMKITGAKLGDSIFFACNKENEVLKLISLARDKIANDLNIIDQN

SEQ ID NO: 185805 - protein, 310 aa, Unknown
  Bacterial polypetide isolated from the Sargasso Sea
TQCIIDKDNKYFSDLEKMQLETVIKVEGKVVNRSKETINSEIDTGEIEVVIEKHEILGTCKELPMPVFSDQEYAEEIRLKYRFLDLRRKKIHQNIILRSKVISYIRNEMTKLGFLEFQTPILTSSSPEGARDFLVPSRLNPGKFYALPQAPQQFKQLIMVSGFDRYFQIAPCFRDEDARADRSPGEFYQLDLEMSFVEQEDVFNVVEKLMVNTFKNFSTKKLMFDKFPKISYKESMLKYGTDKPDLRNPLIVNDITEIFTREDVSFEIFKKLVKSGSKVRCIITKNTKDKPRSFFDNIDKWAKEEGASRF

SEQ ID NO: 185806 - protein, 201 aa, Unknown
  Bacterial polypetide isolated from the Sargasso Sea
FGDTIFLSCGKKDDVEKILNLARNKIAEDLDLIDNETFSFCWIVDYPMYEIDETTKKIKFSHNPFSMPQGEINKLDLSNPLNIKAYQYDIVCNGIELSSGAIRNHVPELMYKLFEIAGYSKNDVNSKFSGMINALNYGAPPHGGIAPGIDRIVMLLANEKNIREVTMFPMNQNAQDLMMNAPSEISDYQLKELNLDIKKKK

SEQ ID NO: 185807 - protein, 231 aa, Unknown
  Bacterial polypetide isolated from the Sargasso Sea
NEKGKVVGKGPIAKFFTEKATSELLKKCKITEKDSVFFVCNTYSEANKFAGIARRKIAEDLKIIDNSKFNFCWIIDYPMYHYDEKEKKIDFSHNPFSMPQIDIKNFDKTDPLKILAYQYDLVCNGYELSSGAIRNHVSEYLFKVFSKVGYSKELVIKNFSGMIKALSFGAPPHGGMAPGIDRIVMLLAGEQNIREITLFPMNQNAQDLLMDAPSEVSEKQLKELNIKITKK

SEQ ID NO: 185808 - protein, 110 aa, Unknown
  Bacterial polypetide isolated from the Sargasso Sea
EVGGGSLRIYRRDVQEKVFDAIGLGKEEAEEKFGYLMEAFQFGAPPHGGMAFGLDRLVMMLAGAKSIRDVIAFPKTATAQCLLTAAPGDVSDSQMAELHIAKAKRESEQQ

SEQ ID NO: 185809 - protein, 117 aa, Unknown
  Bacterial polypetide isolated from the Sargasso Sea
YQYDIVCNGVELSSGAIRNHIPDLMYKLFSIAGYDKKQVEKKFSGMINALSFGAPPHGGIAPGVDRIVMLLADKKNIREITLFPMNQNAQDLMMNAPSEVEDIQLKELGIKKDIKKS

SEQ ID NO: 185810 - protein, 262 aa, Unknown
  Bacterial polypetide isolated from the Sargasso Sea
MNKYRSHNCSEISEKDVGKEVRISGWVHRKRDHGNLLFLDLRDHFGITQCVIENKDKNFKVLEKLKPESVILINGTVVKRSSETQNKDLKTGLIEVKIIEIEILSEAKELPMPVFGEQEYPEDIRLKYRFIDLRRDEMHNNIKLRSDVISFIRSKMIKNNFMEFQTPILTASSPEGARDFLVPSRLHPEKFYALPQAPQQFKQMIMIAGFDKYFQIAPCFRDEDGRADRSPGEHYQLDLEMSFVEQIDIFNAIEPLFYDLFS

SEQ ID NO: 185811 - protein, 187 aa, Unknown
  Bacterial polypetide isolated from the Sargasso Sea
IRKITALARDKIAKELDLIDENVFAFCWIVDYPMFEKDETTNKIEFSHNPFSMPQGDLSEKDFENPLDILAYQYDIVCNGIELSSGAIRNHKPELMYKLFSIAGYDKNKVNEKFSGMINALSYGAPPHGGIAPGIDRIVMLLANEKNIREVTMFPMNQNAQDLMMNAPSEVNPDQLKELNLALKTKK

SEQ ID NO: 185812 - protein, 110 aa, Unknown
  Bacterial polypetide isolated from the Sargasso Sea
SSFHLGAIRNHVPEIMYKAFEIAGHKSEVVDNKFPAMINAFKFGAPPHGGIAPGIDRIVMLLADEPNIREVILFPMTGKAEDLMMNAPNEINDLQLKELGIKLDKKTKIN

SEQ ID NO: 185813 - protein, 281 aa, Unknown
  Bacterial polypetide isolated from the Sargasso Sea
YGTDKPDLRNPLILRDITKVLDREDVKFDIFKKLIKSGSIVKAIVTKNTIKRPRSFFENIDKWAKDQGASGLAYFSFEKNENFSGKGPIGKFFSEKSIQELMKICNAQIGDSIFMACGKHEEVNKLLSIAREKIAKDLNLIDEKTFAFCWIIDYPMFELDENTKKIIFSHNPFSMPQGYKKGKPITNPLKLKAFQYDIVCNGVELSSGAIRNHIPELMYELFAIAGYDKQQVDDKFSGMINALSYGAPPHGGIAPGIDRIVMLLAEKKNIREITMFPMNQN

SEQ ID NO: 185814 - protein, 263 aa, Unknown
  Bacterial polypetide isolated from the Sargasso Sea
NTKPRSFFDSIDKWAKEQGWSGLAYFTFEKDDGGKVTGKGPIGKFFAEEALKEIMKITSSEIGDSIFMSCSNKNEINEIMSKSRNKIGDDLGVIDKDLFAFCWITDFPIFELDKETSKINFSHNPFSMPQGDPNNLDLSEPLNLKAYQYDIVCNGVELSSGAIRNHIPELMYKLFSIAGYDKKAVDEKFSGMINALSYGAPPHGGIAPGIDRIVMLLADEKNIREVTMFPMNQNAQDLMMNAPSDINEKQLKELNLKLLGNNK

SEQ ID NO: 185815 - protein, 285 aa, Unknown
  Bacterial polypetide isolated from the Sargasso Sea
MVGINKKRDHGNLLFLDLRDNYGITQCVIENSHKSFKEIEKLSLETVVKITGKVLKRSKETVNTELETGEVEVSIISFEILGNTKELPMPIFSDQEYSEEIRLKYRFLDLRRKKIHQNIILRSKVISFIREEMKRFGFLEFQTPILTSSSPEGARDFLVPSRLNPGKFYALPQAPQQFKQLIMVSGFDKYFQIAPCFRDEDARADRSPGEFYQLDLEMSFVDQEDVFEVVEKLMINVFKNFSNKKMINKKFPKITFSDSMLKYGTDKPDLRNPLIISDLTEIFIR

SEQ ID NO: 185816 - protein, 278 aa, Unknown
  Bacterial polypetide isolated from the Sargasso Sea
MTSSSPEGARDFLVPSRLNPGKFYALPQAPQQFKQLIMVAGFDKYFQIAPCFRDEDARADRSPGEFYQLDIEMSFVEQEDVFEVVEKLMVNLFKKFSDKKINSEKFKRISYEESMTKYGTDKPDLRNPLLIYDLTNIFNRDDIKFEIFKKLVKSGSKVKAIVTKDTKDKPRSFFDTIDNWAKEEGASGLAYFTFEKDKQISAKGPIGKFFSEESLKEIMKITSAQVGDSIFLSCGKDGDLEKITSQARDKIASQLNLIDENEFAFCWIVDYPMFEKDP

SEQ ID NO: 185817 - protein, 230 aa, Unknown
  Bacterial polypetide isolated from the Sargasso Sea
KNKEIQGKGPIGKFFNAESIKRIMEITSAEIGDTIFLSCGKVREVEKILSLARDKIANDLNLIQKDKFAFCWIVDYPMFEKDEITDNIKFSHNPFSMPQGDLDKINLSKPLDIKAYQYDIVCNGIELSSGAIRNHIPELMYKLFKIAGYDKKNVDEKFSGMINALSYGAPPHGGIAPGIDRIVMLLAGEKNIREVTMFPMNQNAQDLLMNAPSEVDPQQLKELNLLIKKK

SEQ ID NO: 185818 - protein, 208 aa, Unknown
  Bacterial polypetide isolated from the Sargasso Sea
MTSSSPEGARDFLVPSRLNPGKFYALPQAPQQFKQLIMVSGFDKYFQIAPCFRDEDARADRSPGEFYQLDIEMSFVEQEDVFQVIETLMVSLFKKFSKKVIKDIKFPRIPYQDAMLKYGTDKPDLRNPLIIKDITNIFLRDDVKFDIFKKLVKKGSYVRCIVTKNTKDKPRSFFDNIDKWAKQQGASGLAYFTIEKKDKLYGKGPVGK

SEQ ID NO: 185819 - protein, 304 aa, Unknown
  Bacterial polypetide isolated from the Sargasso Sea
QVVFDPDRAETFAKADRVRSEYVVKITGKVRLRPAGAVNPNMASGAIEVLGYELEVLNEAETPPFPLNEYTDVGEETRLRYRFIDLRRPEMAEKLKLRSRITSSIRRYLDDNGFLDVETPILTRATPEGARDYLVPSRTHAGSFFALPQSPQLFKQLLMVAGFDRYYQIAKCFRDEDLRADRQPEFTQIDIETSFLDEKDIMDITETMVRNLFKEVLDVEFGDLPHMTLAEAMRRFGSDKPDLRIPLELVDVEDQLKDVEFKVFAGPANDPKCRVTALRVPGGASMPRKQIDDYTKFVGIYGAK

SEQ ID NO: 185820 - protein, 270 aa, Unknown
  Bacterial polypetide isolated from the Sargasso Sea
IVRGIVVKNTKDKPRSFFDNIDKWAKNQGASGLAYFTIEKDSEFKGKGPVGKFFKPDSIKEIMKISNAKEGDSIFFACGKTAEVEKLLSDARDKIADELKLINNDIFAFCWIIDYPMFEKDEKTNKIIFSHNPFSMPQGDINNLDLSEPLNIKAYQYDIVCNGIELSSGAIRNHIPELMYKLFSVAGYDKKTVNEKFSGMINALSYGAPPHGGIAPGIDRIVMLLAGEKNIREVTMFPMNQNAQDLMMNAPSEVNPEQLKELNLSIKKSK

SEQ ID NO: 185821 - protein, 299 aa, Unknown
  Bacterial polypetide isolated from the Sargasso Sea
MSRCFRDEDLRADRQPEFTQIDIEASFVTTDSIKALATKLMKKLFSMPDDFSLKSMTYKEALDKFGSDKPDNRFDLFHYNVTSFFKESSFATFQKVSNEDGLIKAMFLGSDLGSLSRKDLDGFVEIVKPHGGKGVAFFKVQDGKRSGGISKFIDDETMSKLESFHGGDGVWMFFADVSEMVVHNSADAVRRFLGKKFDLIKPGYSFLWIHDFPLLEWNPKAKRYTSMHHPFTMPKKEHLKWLKSGKVDDEKSPLKDILAEAYDVVCNGYELGGGSIRIHDQSVQSDMFKAPGFSEEEAL

SEQ ID NO: 185822 - protein, 135 aa, Unknown
  Bacterial polypetide isolated from the Sargasso Sea
FDSQPGEALAWAYDLVCNGNEIGGGSIRIHNADVQRRVFDVLGLGDEEAREKFGFLLDAFAYGPPPHGGIAFGWDRICMLLADADSLRDVIAFPKTGGGHDPLTGAPTPITAEQRSEAGIDVDPELAEASPAGDA

SEQ ID NO: 185823 - protein, 309 aa, Unknown
  Bacterial polypetide isolated from the Sargasso Sea
MLDVDLGKLPQMTYFEAMRLYGSDKPDLRNPMQFVDVADLLKDVDFKVFSGPANDPKGRVVALKVPGAAEKVSRKDIDTYTAFVGIYGAKGLAWLKVNDLTQGLEGIQSPVAKFLTADIVTEILTRTGAQNGDLIFFGADRAKVVCEAMGALRLKLGEDLAITQPGWKPLWVVDFPMFEENDDGSYSAVHHPFTSPLDTAAFLSTDTDKLELGTLLSNAYDMVLNGTELGGGSVRIHTPEVQAKVFQLLGISDEEAAEKFGFLLEALRYGAPPHAGLAFGLDRLVMLMTGATSIRDVMAFQKQPLPLVR

SEQ ID NO: 185824 - protein, 291 aa, Unknown
  Bacterial polypetide isolated from the Sargasso Sea
FRDEDARADRSPGEFYQLDLEMSFVEQDDVFDVVEKLLVKTFKKFSTKKLIFEKFPKISYRDALLKYGTDKPDLRNPLIISDITKVFFRTDVSFEIFKKLVNSGSKVRCIVTKNTKDKPRSFFDNIDKWAKDQGASGLAYFTFEKEKDISAKGPIGKFFSKEAIEEIMKITKAEVGDSIFLACNNQNELEKITSLARDKIANDLELIDENTFAFCWIVDYPMFELNEQTKKIEFSHNPFSMPQGDLDKINFKNPLEILAYQYDIVCNGIELSSGAIRNHIQELMYKLFLIA

SEQ ID NO: 185825 - protein, 72 aa, Unknown
  Bacterial polypetide isolated from the Sargasso Sea
PEGARDFLVPSRLNPGKFYALPQAPQQFKQLIMVSGFDRYFQIAPCFRDEDARADRSPGEFYQLDLEMSFVE

SEQ ID NO: 185826 - protein, 283 aa, Unknown
  Bacterial polypetide isolated from the Sargasso Sea
SFEIFKKLVKSGSKVRCIVTKNTKNKPRSFFDNIDKWAKGEGASGLAYFTLEKDKEVSAKGPIGKFFAQDALLEIMKITNCEIGDSIFMACGKQHDLEKITALARDKIAKDLDIIDENIFAFCWIVDYPMFERDELTNKIKFSHNPFSMPQGDLSQKDFENPLDILAYQYDIVCNGIELSSGAIRNHKPELMYKLFSIAGYDKKKVNEKFSGMINALSYGAPPHGGIAPGIDRIVMLLANEKNIREVTMFPMNQNAQDLMMNAPSEVNLDQLKELNLALKTKK

SEQ ID NO: 185827 - protein, 223 aa, Unknown
  Bacterial polypetide isolated from the Sargasso Sea
MRTDYCGNIDSSYIGQEVTLCGWVNKRRDLGGVIFIDLRDREGIVQVVFDPDLPDVLSVANTLRSEFCVKLTGKVRARPEGQVNKDMRTGEIEILGTGLEVINKSDVLPLDWNQENSEEQRLRYRYLDLRRPVMSQRLQFRAKVTGAVRRFLEEEGFLDIETPILTKATPEGARDYLVPSRTHKGEFFALPQSPQLFKQLLMMSGMDRYYQIVKCFRDEDLRA

SEQ ID NO: 185828 - protein, 289 aa, Unknown
  Bacterial polypetide isolated from the Sargasso Sea
SKEKLINKLPFPSFTYKDSIKNFGCDKPDLRNPLRLTNVTRYFEGSGLQIFENLIKKGAIVNCIQAVNSEGKPRSFYDNLNKWSQEQGKKGLGYINFENLLPKGPLAKNFNQEILNQMIKDNNFNQSDGLLFVCDLPEESYDFSSKVIAKVGEDLNLIDKNKYEFCWIVDYPMYEKDVLTGKIDFSHNPFSMPQGGMDKLIKEDPLNVLAYQYDIVCNGIELSSGAIRNHRPDIMKKAFEIAGYGESEIKTKFSALFEAFHYGVPPHGGCAPGLDRIIMLLSDNENIRE

SEQ ID NO: 185829 - protein, 301 aa, Unknown
  Bacterial polypetide isolated from the Sargasso Sea
VEEPTRLRGWIDSVRDHGGVIFIDLRDETGITQVVVEPENKEFFYMAERCRSEFVLSVDGKIRRRPDGTINKQIPTGEVELLVSSFEILSESYPLPFQLDDYSSAGEEVRLKYRFLDLRRSEMQNNIRARSKVSSSIREFMDKEGFLDIETPMMTKATPEGARDFLVPSRISRGSFYALPQSPQLFKQLLMASGFEKYYQIVRCFRDEDTRADRQPEFTQLDIEKAFTDEDEIINLSEKLIKFVFKKLLEIKLPKFPKMTYSEAIERFGSDKPDLRINLELKEVKEIFLNSDFKVFSGPAN

SEQ ID NO: 185830 - protein, 229 aa, Unknown
  Bacterial polypetide isolated from the Sargasso Sea
MRSHYCGDINSSDIGSNIEISGWVHKRRDHGGVIFLDVRDLHGIVQVVFNPDIKEIFDTADSCRSEYVVNIKGLVRKRIKGAVNPKMATGEIEIEANGIKIFSSAVTPQFPLDDYQDVNEDVRLKHRFLDLRRPDVNQRLVKRSQITSKIRSILENNNFHEVETPILTKATPEGARDYLVPSRVHPGEFFALPQSPQLFKQLLMIGGLDKYYQIAKCFRDEDLRADRQP

SEQ ID NO: 185831 - protein, 268 aa, Unknown
  Bacterial polypetide isolated from the Sargasso Sea
RSIRESMNELGFLELDTPTLTKSTPEGAKDFLVPSRKQNGAFYALPQSPQMYKQLFMVSGFDKYYQIAKCYRDEDSRKDRQPEFTQLDLEISNGSPEIVREIAESVVKNLLTDVFELEVEIPFIEMTYDEAINTYGTDKPDLRIKSTIKDFTNIFKKTEIKFIKSAIENNGFVKGFVTEDILSRSQIDELDEIVKDSGSNGLGWFKIENNEVSGPLSKIISDDEKNNILKLGEGMLIFQSGTKEIYPILDILRRSIFKPDDTLNFLWI

SEQ ID NO: 185832 - protein, 267 aa, Unknown
  Bacterial polypetide isolated from the Sargasso Sea
IVTKQTKDKPRSFFDNIDKWAKEQGSGGLAYFTFENNNNKISAKGPIGKFFSEESLKEIMRITSSEIGDSIFMSCDIQNNVETLLSQTRNKLGNELDLINEKTFSFCWIVDYPMFEKDEVTKKIKFSHNPFSMPQGDIDNIDLTKPLELKAYQYDIVCNGIELSSGAIRNHIPDIMYKLFEIAGYDKKHVDEKFSGMINALSYGAPPHGGIAPGIDRIVMLLAEEKNIREVTMFPLNQNAQDLMMSAPSEVSLEQLKELSLTLKSKK

SEQ ID NO: 185833 - protein, 124 aa, Unknown
  Bacterial polypetide isolated from the Sargasso Sea
RNLWIFLAFQYDIVCNGIELSSGAIRNHIPELMYKLFSIAGYDKKQVDEKFSGMINALSYGAPPHGGIAPGIDRIVMLLANEKNIREVTMFPMNQNAQDLMMNAPSDVNENQLKELNLSIKSKK

SEQ ID NO: 185834 - protein, 307 aa, Unknown
  Bacterial polypetide isolated from the Sargasso Sea
TYAESMLLYGTDKPDLRNPIKIVDVTDIFDGSGFSLFANLISSKNAVVRAVPGPKCGSRSVADRMNSWAQGEGAPGMGYIIFGDGEAKGPVAGALGKEKCDEIKNRLGLQDGDAAFFSCSNEKDAADLAGKARVKIGLDQGISETDGYKFCWIIDFPMYELDEKGKIEFSHNPFSMPQGGLEALNNQNPLDIKAWQYDLVCNGVELSSGAIRNHLPKVMYKAFEIAGYSKETVNANFSGMISAFKFGAPPHGGFAPGIDRIVMLIANEPNIREVILFPMNGKAEDLMMGAPSEVSDDQLKELNIKKN

SEQ ID NO: 185835 - protein, 139 aa, Unknown
  Bacterial polypetide isolated from the Sargasso Sea
PFTAPIAGAKAIEIDPGNAVSRAYDVVINGREIGGGSIRIHEPELQSAVFRILGLPEEEIKLKFGFLLDALKSGAPPHGGIAFGLDRLIMIMTGADSLRDVIAFPKTQTATCLLTEAPGMADSEQLSELNISVRTLDLD

SEQ ID NO: 185836 - protein, 286 aa, Unknown
  Bacterial polypetide isolated from the Sargasso Sea
YLRIQDLKFFSESIKKDDNIKVWGIPAKGGGSRAFCDKMNSWAIKEGQPGLGYIFFKKGSGSGPISKNIGEEKTTSIRNKFNLNDNDAVFFICGIPKTFLTFASSARDKIANDLGLIDSNTFEFCWIVDFPMYEFDEINKKIDFSHNPFSMPQGGIDALENEDPLEIKAFQYDIVCNGVELSSGAIRNHKPEILLKAFEVAGYDEVEVEKRFGAMSDAFKYGTPPHGGIAPGIDRIVMLLSGSDNIREVIAFPMNQQAQDILMGAPSKVSKEQLDELGINIIEEDN

SEQ ID NO: 185837 - protein, 199 aa, Unknown
  Bacterial polypetide isolated from the Sargasso Sea
SIFFACAKGKEVYDIAAAARDKIAIDLDLVEKGVFKFCWIVDFPMYEKDKETGKIDFSHNPFSMPQGGLEALNNNDPLNVLGYQYDIVCNGVELSSGAIRNHVPEIMYKAFEIAGYNKDQVHEKFGGMINAFTYGVPPHGGIAPGIDRIVMLLAQEKNIREVILFPMNQQAQDLMMLAPAEVDRTTLDELNVEVKPTDE

SEQ ID NO: 185838 - protein, 304 aa, Unknown
  Bacterial polypetide isolated from the Sargasso Sea
NVHTLGGELGKSNVGEEIQLNGWINTVRLHGKIVFVDLRDRYGKTQLIFDEKNFPKEFEKIKKFSVEDVISIKGIVEHRSGSSINPSMKTGEIEVSTTNYTILNKSEPLPFVLSDRNSAEEHFRLKYRYLELRIDELQNNMIIRHNTYQATRKFLSNNNFLEVETPVLMKSTPEGARDYLVPSRLHNGKFYALPQSPQIYKQILMISGYDRYFQIVKCFRDEDLRADRQPEFTQIDIEMSFVDEEDVFLNMENLTRDIFSSVRGIKLPSTFPRITYKEAMETYGSDKPDTRYEMKLVDLKSYTD

SEQ ID NO: 185839 - protein, 58 aa, Unknown
  Bacterial polypetide isolated from the Sargasso Sea
MRSIYCGDVGAKEEGQEVTVAGWVHRRRDHGGVIFIDLRDREGLVQVVFNPERKRNFH

SEQ ID NO: 185840 - protein, 239 aa, Unknown
  Bacterial polypetide isolated from the Sargasso Sea
SPEGARDYLVPSRIHHGQFYALPQAPQQFKQLLMMAGFDKYFQIAPCFRDEDSRADRSPGEFYQLDFEMSFVTQEDIFNEIEPVLYEIFEENKNYHTNENVTVSSYPFKKIPFEESLELYGTDKPDLRNPLLIKDCTDIFKGSEFKIFASLIEKNYKVKGIVVSNTADKPRSFFDKLNNWARDEGAAGLGYISYAENSHKGPIAKNLDSARLNQFKLKDNESIFFVCDNQKEAQLFAGK

SEQ ID NO: 185841 - protein, 258 aa, Unknown
  Bacterial polypetide isolated from the Sargasso Sea
GGSRKFCDRMNAFAQKEGLPGMGYIFWRDNGDGMEAAGPLAKNIGSERTEALRAQLGLGIGDAAFFLGGKPKNFEKVAGKARDVIGDELNLTDHDRFAFAWIVDFPIYEKDEETGRIDFEHNPFSMPQGGMEALESDPLQVRGFQYDLACNGYELVSGAIRNHRPEIMFKAFEIAGYDENEVKNRFGGMVNAFQYGAPPHGGCAAGIDRIVMLLADQQNIREVIMFPMNQRAEDLMMEAPSEPLPDQLMELNLRVFRK

SEQ ID NO: 185842 - protein, 280 aa, Unknown
  Bacterial polypetide isolated from the Sargasso Sea
LFIDLRDHYGITQCVIDKENKFFKKLEKLQLETVIKINGKVIERTKETINKDLLTGEIEVAIEKFEIVGKTKELPLPVFSDQEYSEEIRLKYRFLDLRRKQIHNNIILRSKVISFIRKEMEKMDFLEFQTPILTSSSPEGARDFLVPSRLNPGKFYALPQAPQQFKQLIMISGFDKYFQIAPCFRDEDARADRSPGEFYQLDMEMSFVEQEDVFSVIENLFLKLFKEFSNKKLASEKFPRIKYSEAIEKYGTDKPDLRNPLVISNISEIFSREDVKFDLF

SEQ ID NO: 185843 - protein, 287 aa, Unknown
  Bacterial polypetide isolated from the Sargasso Sea
LLFIDLRDNYGLTQCVIDKSNKYFKDLEKIQLESVVKISGTVIERSKETINSELKTGEVEVNIVSFEILGICKELPMPIFSDQDYAEEIRLKYRFLDLRRKKIHENIILRSKVISFIRNKMQELDFLEFQTPILTSSSPEGARDFLVPSRLNPGKFYALPQAPQQFKQLVMVSGFDKYFQIAPCFRDEDARADRSPGEFYQLDLEMSFVEQEDIFNVVEKLMVSLFKKFSSKNIINEKFPRISYEDSMLKYGTDKPDLRNPLLISDLTNIFTRDDVEFDIFKKLVSK

SEQ ID NO: 185844 - protein, 259 aa, Unknown
  Bacterial polypetide isolated from the Sargasso Sea
PRSFFDNLNNWAIAEGASGLAYITFEKNKDKISGKGPISKFFSEKAISELMNSCKITEKDSVFFVCNQELEANKFAGIARQKIAEELKMIDKNSFSFCWIVDFPMYQYDDKEKKIDFSHNPFSMPQVDIKNFDKLDPLEILAYQYDLVCNGYELSSGAIRNHIPEYLFKVFSKVGYSKLMVEKNFSGMLKALSYGAPPHGGMAPGIDRIVMLLANQKNIREVTLFPLNQNAQDLLMEAPAEVSEKQLKELNIKTVKNKT

SEQ ID NO: 185845 - protein, 280 aa, Unknown
  Bacterial polypetide isolated from the Sargasso Sea
MREDTRLKFRFLDLRRAKMQKNILLRNKVISLIRDGMIKQSFTEIQTPILTASSPEGARDYLVPSRVHPGKFYALPQAPQQFKQLLMIAGFDKYFQIAPCFRDEDSRADRSPGEFYQLDYEMSFVTQEDVFSALEPVLFDIFTKLTKNFSISKPPFKKIPFDECVKKYGNDKPDLRNPLILSDVTDIFKGSTFKLFAENINKGSIVIAIPAPNSKDQPRTFFDKLNNWAKDEGQGGMGYIQFIKNEGKGPIANNLDKERINKFLKIEGVDGNSSIFFLCG

SEQ ID NO: 185846 - protein, 106 aa, Unknown
  Bacterial polypetide isolated from the Sargasso Sea
GSIRIHRRDIQQKIFSLLNLSNQEIENKFGFLMEALTYGAPPHGGIALGFDRIMMFLLKTESIRDVIAFPKTQKAGCLMTDAPSVVDSEQLDDLHIRVKASAQQAE

SEQ ID NO: 185847 - protein, 225 aa, Unknown
  Bacterial polypetide isolated from the Sargasso Sea
KGPIAKFIPSEIQEMILNKAGLKAGDSIFFACAKGKEVYDIAAAARDKIAIDLDLVEKGVFKFCWIVDFPMYEKDKETGKIDFSHNPFSMPQGGLDALNNSDPLNVLGYQYDIVCNGVELSSGAIRNHIPEIMYKAFEIAGYNKGQVHEKFGGMINAFTYGVPPHGGIAPGIDRIVMLLAQEKNIREVILFPMNQQAQDLMMLAPAEVNKTTLDELNLEVKPTDE

SEQ ID NO: 185848 - protein, 146 aa, Unknown
  Bacterial polypetide isolated from the Sargasso Sea
KIIFSHNPFSMPQGSIEKLNFEKPLEMKAYQYDIVCNGVELSSGAIRNHIPELMYKLFSIAGYDKNEVNKNFGGMINALSYGAPPHGGIAPGIDRIVMLLANKENIREVTLFPMNQNAQDLMMQAPSEVDNKLLKELGIKLDTKKN

SEQ ID NO: 185849 - protein, 266 aa, Unknown
  Bacterial polypetide isolated from the Sargasso Sea
VKNISNKPRSFFDNLNKWAIDSGAKGLAYIAFEKNETKIISKGPIAKFFSQNALDSLVKDANVSPNDCIFFISDKYSEAIKFAGLVRTKIGTDLKLIDEDQFNFCWIVDFPMYQYDEVEKKLEFSHNPFSMPQANIDEFDKMDPLKVLAYQYDLVCNGYEISSGAIRNHLPDYMYKVFKKVGYEKKDIDKKFSGMIKALSYGAPPHGGMAPGIDRIVMLLAGQKNIREVTLFPMTQNGQDLLMGAPAEVNEKQLKELGLKINIKKD

SEQ ID NO: 185850 - protein, 255 aa, Unknown
  Bacterial polypetide isolated from the Sargasso Sea
IKYGFLEFQTPILTSSSPEGARDFLVPSRLNPGKFYALPQAPQQFKQLVMVSGFDKYFQIAPCFRDEDARADRSPGEFYQLDLEMSFVEQEDVFEVVEKLFENIFQKFSKKKLLFSKFPKISYKDSMLKYGNDKPDLRNPLIISDITEIFFRDDVSFEIFKKLVKTGSIVRCIVTKDTKDKPRSFFDNIDRWAKEQGASGLAYFTFEKDNELYAKGPVGKFFTKEALELLMLKTGAKIKDSIFLACGKKNDLEKI

SEQ ID NO: 185851 - protein, 187 aa, Unknown
  Bacterial polypetide isolated from the Sargasso Sea
IVSDSMGALRNKIAEDFDLIEGSWKPVWITNWPLFEESIGGDLSPAHHPFTSFKGSIEHLEADPGAVVANAYDLVINGTEVGGGSIRIHKSSEQVKVLEVLGISENEAQNKFGFFLDALNYGFPPHGGIAFGLDRLVMLMMGADSIRSVIPFPKTQSALCLLTDAPTRVDSEQLEELGISLTDPDGD

SEQ ID NO: 185852 - protein, 280 aa, Unknown
  Bacterial polypetide isolated from the Sargasso Sea
MTSSSPEGARDFLVPSRLNPGKFYALPQAPQQFKQLIMVSGFDKYFQIAPCFRDEDARADRSPGEFYQLDLEMSFVEQEDVFSVVEKLLVNTFKKFSNKKLMYSKFPKISYSDAMLMYGTDKPDLRNPLIINDITEIFTRDDVSFEIFKKLVKSGAKVRCISTKNTKDKPRSFFDGIDKWAKDEGYSGLAYFTIEKEGNLSAKGPIGKFFSKEAIIEIMKKTKAEVGDSIFLACGKQNELEKITSQARDKIAKDLELIDDNIFAFSWIVDYPMFERDEIT

SEQ ID NO: 185853 - protein, 253 aa, Unknown
  Bacterial polypetide isolated from the Sargasso Sea
DSRIAALSVPKGETLTRKQIDDYTEFVGNYGAKGLAYIRVEDPSKGKEGLQSPIIKFIDDEIINKLLTVLDAKKGDIIFFGAGKRNIVNDSLAALRNLLGKDLDLLESDWAPCWVVDFPMFEKNNKGELTPLHHPFTAPRGSIDELKAEPLNALTDAYDVVLNGTELGGGSVRIHDHKMQKAVLSLLDINEEQAEEKFGFLTAALQHGCPPHAGLAIGFDRMIMLMTNSESIRDVIAFPKTQTASCLLTDAPG

SEQ ID NO: 185854 - protein, 220 aa, Unknown
  Bacterial polypetide isolated from the Sargasso Sea
FDSNLTKEIIDSLKLEDNSICFMIGDKLNTSLQVLGKIRSKVGDLIELKDNSIFSPVWIVDFPLFMWNEETKRYDSVNHPFTAPKDSDLGDVTSNPSEVISKGYDIVINGYEVAGGSIRIHDHSLQKDIFKIMDLSDKEISEKFGFFIDALKYGTPPHGGIAFGLDRLVMLLAGVSNIRDVIAFPKTTSASALMEEAPNLVSEEQLDELGIKILDDEKNV

SEQ ID NO: 185855 - protein, 303 aa, Unknown
  Bacterial polypetide isolated from the Sargasso Sea
EIETPMLTKSTPEGARDYLVPSRLNPQKFYALPQSPQLFKQILMVSGMDKYFQIVKCFRDEDLRQDRQPEFTQIDIEMSFGNEKILFQMIEEMMATIFKEVLNEKISTPFPILKYQEAIDRFGTDKPDMRIDMEIVDLAKIVQGTKFKVFAQVLESGGQIRALNIKNSADALSRKALDDLTEIAKTYGAKGMAWIKVQKNELQSPIIKFFDQEMLDRMLEKLESKPGDTVVFIADTPKIVADALAHLRLAIAKLLNLVDESKNAFIWITEFPLVEYDEIEKRHNAMHHPFTAPREEDLGKLNR

SEQ ID NO: 185856 - protein, 229 aa, Unknown
  Bacterial polypetide isolated from the Sargasso Sea
MEKGQDQLQKIFGDEKTELIKNKFSLDDGDSIFFVCGIPNNFLDFISRARVKIGNELELVKKDSFEFCWIVDFPMFEYNEELKKIDFSHNPFSMPQGGLESLKNMDPLEIKAFQYDIVCNGVELSSGAIRNHRQDILLKAFEIAGYNIDEIKKRFGAMYDAFGYGAPPHGGIAPGIDRIVMLIAGVENIREVIAFPMNQQAQDLMMNAPSEVSSDQLKEIGIKIIEKKE

SEQ ID NO: 185857 - protein, 302 aa, Unknown
  Bacterial polypetide isolated from the Sargasso Sea
QFKQLIMVSGFDKYFQIAPCFRDEDARADRSPGEFYQLDLEMSFVNQEDIFDVVEKLLVKTFKEFSNKKLLFNKFPKITYREAMLKYGTDKPDLRNPLIIDDVTDIFLREDVSFEIFKKLVKTGSKVRCIVTKKTKDRPRSFFDNIDKWAKEQGASGLAYFTLEKEKEISAKGPIGKFFSKESLKELMKLTGAEIGDSIFMACAKQKELEKITSLARAKIAKDLDLIDNNVFAFCWVVDYPMYEINELTKKIEFSHNPFSMPQGEIDKIKFDKPLDILAYQYDIVCNGIELSSGAIRNHIPS

SEQ ID NO: 185858 - protein, 264 aa, Unknown
  Bacterial polypetide isolated from the Sargasso Sea
EFGGGKKISKPPFKRIPFSEAMLQFGTDKPDLRNPIRIIDVTNCYRKSGFGLFSKLIEKGAVVRAIPAKGAASKPRSYFDKLNDWAKAEGSGGLGYIIFDSDQSAKGPIAKNLEPDRINDLRTICNVDTGDALFFVCDDEGKASNFSGRVREMVCDDLNARAQNCFEFCWIVDYPMYERDEVTGGIKFSHNPFSMPQGGLETLENKPPLDILAYQYDIVCNGIELSSGAIRNHRPEIMIKAFEIAGYPAHEVEEKFAGMLKAFR

SEQ ID NO: 185859 - protein, 209 aa, Unknown
  Bacterial polypetide isolated from the Sargasso Sea
NYEKTKCKCRDTVFLSCGKKIEVEKILSAARNKIAEDLNLIDDATFSFCWIIDYPMYETDEITNKIKFSHNPFSMPQGDLKDLDLTDPLKLKAYQYDIVCNGIELSSGAIRNHIPELMYKLFKIAGYSKDDVNNNFSGMINALSYGAPPHGGIAPGIDRIVMLLANEKNIREVTMFPMNQNAQDLMMNAPSEISDDLLKELNLNIKKKS

SEQ ID NO: 185860 - protein, 261 aa, Unknown
  Bacterial polypetide isolated from the Sargasso Sea
MNKYRTHNCSELTERENNKIVTLSGWIHRKRDHGNLLFIDLRDHFGLTQCVIENKNKFFKILEKIRPESVISITGKVLKREKGTENLEISTGKIEVSIQNIKILAEAKDLPMPVFGEQDYPEDIRLKYRFLDLRRESMHKNIILRSNVISFIRSEMLRLGFLEFQTPILTSSSPEGARDFLVPSRLNPGKFYALPQAPQQFKQLIMVSGFDKYFQIAPCFRDEDARADRSPGEFYQLDIEMSFVEQEDVFKVVETLMINLL

SEQ ID NO: 185861 - protein, 118 aa, Unknown
  Bacterial polypetide isolated from the Sargasso Sea
LAYQYDIVCNGIELSSGAIRNHVPELMYKLFSIAGYDKNQVDEKFSGMINALNYGAPPHGGIAPGIDRIVMLLANEKNIREVTMFPMNQNAQDLMMNAPSNVSENQLKELNISLKLKK

SEQ ID NO: 185862 - protein, 246 aa, Unknown
  Bacterial polypetide isolated from the Sargasso Sea
MAKEQGSSGLAYFTLEKDDKINAKGPIGKFFSENALLEIMKLTNANIGDTVFLSCGKKNDVEKILSVARNKIAEDLNLIDNEIFSFCWIVDYPMYEIDETTKKIKFSHNPFSMPQGEINKLDLSNPLNIKAYQYDIVCNGIELSSGAIRNHIPELMYKLFEIAGYSKNDVDSKFSGMINALSYGAPPHGGIAPGIDRIIMLLANEKNIREVTMFPMNQNAQDLMMNAPSEILDDQLKELNLYIKKK

SEQ ID NO: 185863 - protein, 315 aa, Unknown
  Bacterial polypetide isolated from the Sargasso Sea
SCSSRLHPGKFYALPQAPQQFKQLIMCSGFDRYFQIAPCFRDEDARADRSPGEFYQLDLEMAFAEQEDVFNVVEPVMRGVFEEFSGQSISGPFPRITYADAMLRYGTDKPDLRNPIEITDLTDLFIDESVNFKAFKNIINKGGVVRAIPAKDVSGRPRSFYDKLIGFAQDLGAPGLGYIIFEDGQAKGPIAKFIPESILHSICNKADVGNGDAIFLSCDSEEKAAYYSGHIRSELGHLLGLIEKNTYRFCWIIDFPMFEADPESGDIEFSHNPFSMPQGGLEALTNQDPVDILAWQYDIVCNGVELSSGAIRNHR

SEQ ID NO: 185864 - protein, 230 aa, Unknown
  Bacterial polypetide isolated from the Sargasso Sea
EEGISAKGPIGKFFSKEALEEIMKKTKAKIGDSIFLACEKKTEVEKITSLARDKLAENLELIDENTFAFCWIVDYPMYEKDEVSNKIKFSHNPFSMPQGDLNQINFEKPLDILAYQYDIVCNGIELSSGAIRNHIPELMYKLFSIAGYNKKEVNEKFSGMINALSYGAPPHGGIAPGIDRIVMLLANEKNIREVTMFPMNQNAQDLMMNAPSDISDNQLKDLNLSLKLKK

SEQ ID NO: 185865 - protein, 232 aa, Unknown
  Bacterial polypetide isolated from the Sargasso Sea
SEDIVLSGWINKKRDHGNLLFVDLRDNYGVTQCVIDKSNQYFSKLEKIQLESVIKLSGKVVERSKDTINPELQTGEIEIVINSFEILGQCKELPMPVFTDQEYSEEIRLKYRFLDLRRKKIHENIILRSNVISFIRKQMNELGFLEFQTPILTSSSPEGARDFLVPSRLNPGKFYALPQAPQQFKQLIMVSGFDKYFQIAPCFRDEDARADRSPGEFYQLDLEMSFVEQEDV

SEQ ID NO: 185866 - protein, 284 aa, Unknown
  Bacterial polypetide isolated from the Sargasso Sea
KVEVVVSDYFMLNEAAPLPFVINDRDSAEENLRLKYRYLELRMDALQHNIITRHKTYQATRSFLSDNNFIEVETPVLMKSTPEGARDYLVPSRIHQGQFYALPQSPQIYKQILMISGYDRYFQIVKCFRDEDLRADRQPEFTQIDIEMSFVDEEDIFSNMENLTRHIFKKVKDIELPDPFPRLTYQKAMELYGSDKPDLRYQMELIDLKDFTDTSDFNAFRSVQRVKGIVCKGGAHYSRKIIDELTEFVKKYKAKGLAWMKFQNNNFEGGISKLFSEELQGSIQ

SEQ ID NO: 185867 - protein, 319 aa, Unknown
  Bacterial polypetide isolated from the Sargasso Sea
INPDMSTGEIEVLGKELEILNSSKTPPFQMDEFTSVGEEVRLKYRYMDLRRREMQNRLRLRSKITSIVRTFLEGEEFLDIETPLLTRATPEGARDYLVPSRTYPGSFFALPQSPQLFKQLLMISGFDKYYQIAKCFRDEDLRADRQPEFTQIDIETAFLDQLAIMDIAEKLVKNLFKELLNIDLIDFPKITWHEALDKYGSDKPDLRIPLKLTSLDDLMKSVEFKVFREPADDPDSRVAGLRVPGGAKFSRKEIDEFTDYVGSYGAKGLAWIKVNDLSEGIQGLQSPIVKFIPDGVLSEMLKRLGAENGDIIFFGAGIS

SEQ ID NO: 185868 - protein, 196 aa, Unknown
  Bacterial polypetide isolated from the Sargasso Sea
FLSCGKKDDVEKILSFARNKIAEDLDLIDNETFSFCWIVDYPMYEIDEITKKIKFSHNPFSMPQGEVNKLDLSNPLNIKAYQYDIVCNGIELSSGAIRNHVPELMYKLFEIAGYSKNDVNSKFSGMINALSYGAPPHGGIAPGIDRIVMLLANEKNIREVTMFPMNQNAQDLMMNAPSEISKDQLKELNLTIKNKK

SEQ ID NO: 185869 - protein, 327 aa, Unknown
  Bacterial polypetide isolated from the Sargasso Sea
CFRDEDARADRAPEKFYQLDLEMSFVDKEDVFNVVEKLLVNTFKKFSNKKLMYSKFPKISYLDAMLMYGTDKPDLRNPLIINDITEIFTRDDVSFEIFKKLVKSGSKVRCISTKNTKDKPRSFFDGIDKWAKDEGYSGLAYFTIEKDGDLSAKGPIGKFFSKEAIMEIMKKINAEVGDSIFLACGKQNELEKITSQARDKIANDLELIDDNIFAFCWIVDYPMFERDEITNNIKFSHNPFSMPQGDLSNKDLENPLDILAYQYDIVCNGIELSSGAIRNHKPELMYKLFSIAGYNKSQVDEKFSGMINALSYGAPPHGGIAPGIDRI

SEQ ID NO: 185870 - protein, 292 aa, Unknown
  Bacterial polypetide isolated from the Sargasso Sea
ETINNEIPTGEIEIKINSFKILGKTKELPLPVFSDQEYAEEIRLKYRFLDLRRKKIHNNIILRSKVISFIRKEMEKLGFNEFQTPILTSSSPEGARDFLVPSRLNPGKFYALPQAPQQFKQLIMVSGFDRYFQIAPCFRDEDARADRSPGEFYQLDIEMSFVEQEDVFEVVEKLMVSLFNNFSKKKMLYKKFPRIPFKDAMDRYGTDKPDLRNPLLIQDISEIFKRDDVKFEIFKKLFKSGSLIKSIVTKKTNTKPRSFFDNIDKWAKEQGWGGLAYFSIEKDKSGKIIEKD

SEQ ID NO: 185871 - protein, 199 aa, Unknown
  Bacterial polypetide isolated from the Sargasso Sea
MKQTNANTGDTVFLSCGKKHDVEKILSIARNKIAEDLNLVDNNCFSFCWVVDYPMYEVDEITKKIKFSHNPFSMPQGDLKKLDLSSPLKLKAYQYDIVCNGIELSSGAIRNHIPDLMYKLFEVAGYSKNDVNSKFSGMINALSYGAPPHGGIAPGIDRIVMLLANEKNIREITMFPMNQNAQDLMMNAPSEVNDDQLKE

SEQ ID NO: 185872 - protein, 286 aa, Unknown
  Bacterial polypetide isolated from the Sargasso Sea
LSLRTAIASTVQTAFDDAGFDRYVQVAKCFRDEDLRADRQPEFTQLDVEMSFVDAHDVTSVIESLVAKTAKDILDLDIALPLPQLTWSECMERYGHDAPDMRFGLEIVDLTEVAKDSDFRVFKGAVESGGRVRGILVSGAAEKFSRKDLDGLTAMAVEAGAKGLVWLKLDSSESWTGPVAKNLGSDVAENIRKSLSAKPGDLALISADSFETTCKTLHALRKHLGKELELYDENTMHVSWVIDFPMFARDEETGNWAAMHHPFTAPHPEDLEKLTSNPSECRAIAY

SEQ ID NO: 185873 - protein, 300 aa, Unknown
  Bacterial polypetide isolated from the Sargasso Sea
IEVVIEKHEVLGTCKELPMPIFSDQEYAEEIRLKYRFLDLRRKKIHENIILRSKVISYIRNEMTKLGFLEFQTPILTSSSPEGARDFLVPSRLNPGKFYALPQAPQQFKQLIMVSGFDRYFQIAPCFRDEDARADRSPGEFYQLDLEMSFVEQEDVFNVVEKLMVNTFKNFSSKKLMFDNFPKISYKEAMLKYGTDKPDLRNPLIVNDITEIFTREDVSFEIFKKLVKSGSKVRCIITKNTKDKPRSFFDNIDKWAKEEGASGLAYFTFEKDTDISAKGPIGKFFSQDALVEIMKKQTVK

SEQ ID NO: 185874 - protein, 223 aa, Unknown
  Bacterial polypetide isolated from the Sargasso Sea
KNNLSEEHIADILKITEAKDGDLILLGAGDKQIVNQSLDRVRQYIAKDLNLIDKSKWNFLWVTDFPMFERNEEENRYEALHHPFCSPKNIKSKDSENLKKEIESSTANAYDLVLNGLELGGGSLRIHEGNLQREVLKTVGLTDKEIDEKFGFLIEALEMGAPPHGGIAFGLDRITMLIIGADSIRETIAFPKNQQAKCLLTNAPSNVSKSQLKELDIEITIDE

SEQ ID NO: 185875 - protein, 225 aa, Unknown
  Bacterial polypetide isolated from the Sargasso Sea
MRTNFCGELNKKFIGKEVTICGWIHRRRDHGGVIFLDIRDTTGIVQIVIRPETKETFKIAEQVRSEFVLKATGNVEERPEESENTTLTTGEIEIDCSSIEVLNTAETPAFPLDQSSEVGEDVRLKHRTLDLRRPVMQENLRIKSKLTKSIRDYLEKHSFVDIETPILTKATPEGARDYLVPSRTNPGNFFALPQSPQLFKQMLMISGFDRYYQIARCFRDEDLRA

SEQ ID NO: 185876 - protein, 254 aa, Unknown
  Bacterial polypetide isolated from the Sargasso Sea
MDIRTHTCGELRLSNSGESVVLNGWVNSVRLHGQVVFVDLRDRYGKTQVVFNADDLRSDFDQIKKLSMEDVLSVSGKVQDREKSLVNSEIATGEIEVYATSVDVLNFAEPLPFTISDRDSAEEDLRLKYRYLELRTDELQNNLHIRHLAYQSVRNYLSENNFLEIETPVLMKSTPEGARDYLVPSRIHEGKFYALPQSPQVYKQILMIAGYDKYFQIVKCFRDEDLRADRQPEFTQIDIEMSFVNEEVIFDSME

SEQ ID NO: 185877 - protein, 184 aa, Unknown
  Bacterial polypetide isolated from the Sargasso Sea
KILNLARTKIAEELKLIDEDCFSFCWIVDYPIFERDEITKKIKFSHNPFSMPQGDIKNLDFSDPLSMKAYQYDIVCNGVELSSGAIRNHIPDLMYKLFEIAGYSKSSVDEKFSGMINALSYGAPPHGGLAPGIDRIVMLLANEKNIREVTMFPMNQNAQDLMMNAPSEINEEQLKELNLSVKKK

SEQ ID NO: 185878 - protein, 243 aa, Unknown
  Bacterial polypetide isolated from the Sargasso Sea
AKNEGSSGLAYFSIFKDEKISAKGPVGKFFTEEALKEIMQITDAEVGDSIFFSCSNKKDVEKLLSIARDKIAKDLNIINQDNFAFCWIVDYPMFELDEKTKQIKFSHNPFSMPQGNIEELDFKDPLNIKAFQYDIVCNGIELSSGAIRNHVPSLMYKLFSIAGYNKSDVDEKFSGMINALSFGAPPHGGIAPGIDRIIMLLANEKNIREVTMFPMNQNAQDLMMNAPSDISESQLDELRLKIL

SEQ ID NO: 185879 - protein, 189 aa, Unknown
  Bacterial polypetide isolated from the Sargasso Sea
KMKVVNDYMSRLISRIGNDLGLVKEGFKSCWVTDFAMFEENSEGGLTALHHPFTSPKEQDPSKLKDSDSLEINSKAYDMVLNGVEIGGGSIRIHDSELQQEIFNILGLSKEEQNEKFGFFLRTLQSGCPPHGGIAFGLDRLAMLMVGAESIRDVIAFPKTQSALCLLSEAPGSVPDDSLEELHIKKIEE

SEQ ID NO: 185880 - protein, 242 aa, Unknown
  Bacterial polypetide isolated from the Sargasso Sea
AGLGYIVFDKSSSGVEGKGPIAKFIPSEIQEMILNKAGLKAGDSIFFACAKGKEVYDIAAAARDKIAIDLDLIEKGVFKFCWIVDFPMYEKDKETGKIDFSHNPFSMPQGGLEALNNTDPINVLGYQYDIVCNGVELSSGAIRNHVPEIMYKAFEIAGYNKDQVHEKFGGMINAFTYGVPPHGGIAPGIDRIVMLLAQEKNIREVILFPMNQQAQDLMMLAPAEVDKTTLDELNLEVKPTEE

SEQ ID NO: 185881 - protein, 238 aa, Unknown
  Bacterial polypetide isolated from the Sargasso Sea
VIKIEGEVIERTKETINQNIPTGEIEVSIKTFEILGSTKELPMPIFSDQEYSEEIRLKYRFLDLRRKKIHQNIILRSNIISFIRSEMQKLGFLEFQTPILTSSSPEGARDFLVPSRLNPGKFYALPQAPQQFKQLIMVSGFDKYFQIAPCFRDEDARADRSPGEFYQLDVEMSFVDQEDVFEVFEKLFLKVFTKFSNKKILNDKFPKITYSDAMLKYGTDKPDLRNPITIFDITNVFQ

SEQ ID NO: 185882 - protein, 176 aa, Unknown
  Bacterial polypetide isolated from the Sargasso Sea
AKELNLIDENQYAFCWIVDYPMFEIDEQTKKVKFSHNPFSMPQGDIEKLNFNEPLKIKAYQYDIVCNGVELSSGAIRNHIPELMYKIFSIAGYEKKEVNEKFSGMINALSYGAPPHGGIAPGVDRIVMLLAEEKNIREVTLFPMNQNAQDLMMKAPSDVDDKQLKELSIKKDIKKS

SEQ ID NO: 185883 - protein, 323 aa, Unknown
  Bacterial polypetide isolated from the Sargasso Sea
SMFKWWVNAVRFHVKIVLWDLRDRYGKTQIVYNQDDFNGDFELVKKISMEDVLSVKGIVQERDQNSQNSNISTGEIEVIISEHEILNEAHPLPFIITDRNSAEENLRLKFRFLELRTNELQENIKVRHNTYQAVRTFLSDNNFFEVETPVLMKSTPEGARDYLVPSRIHNGKFYALPQSPQMYKQLLMISGFDRYFQIVKCFRDEDLRADRQPEFTQIDIEMSFVDENDIMKKCEELTRYIFNKVQNIDLIKPFPKMTYNDAMSKYGTDCPDLRYDLLLNDFKPFSEKSEFKAFHSVESVMCIVVPGGAKYSRKDIDHYTEHV

SEQ ID NO: 185884 - protein, 215 aa, Unknown
  Bacterial polypetide isolated from the Sargasso Sea
MNKYRTHNCSELSEKEINKIVHLSGWLHRKRDHGNLLFIDLRDHYGITQCVIENNNKFFPLIEKSKPESVLKIIGKVVKRAIGTENLDLKTGKIEIQIQSMEVLSDAKELPMPVFGEQDYPEDIRLKYRFLDLRREEMHKNIILRSKVISFIRAEMLKLGFLEYQTPILTSSSPEGARDFLVPSRLNPGKFYALPQAPQQFKQLIMVSGFDKYFQ

SEQ ID NO: 185885 - protein, 292 aa, Unknown
  Bacterial polypetide isolated from the Sargasso Sea
RSHLCSELSINNLGNKVTLSGWADTIRDHGNLLFIDLRDNYGITQCVIDGTHSLFEEISKLSNESVLTITGEVVKRSDDTINNNLQTGEIEIKIQDYKILSKSEILPLPVNSDIEYGEEIRLKYRFLDLRRNKLHKNIILRSKIISDIRKKMIDRNFVEFQTPILTSSSPEGARDYLVPSRIHQGKFYALPQAPQQFKQLLMIAGFDKYFQIAPCFRDEDSRADRSPGEFYQLDFEMSFVTQEDVFEAIEPVLFEIFDENKTNNEIKVSPYPFRRIPYKDSMEVYGSDKPDL

SEQ ID NO: 185886 - protein, 308 aa, Unknown
  Bacterial polypetide isolated from the Sargasso Sea
KYRYLDLRRGKLLENLKTRHKIIKVAREYLDNFGFTEVETPLLTKSTPEGARDFLVPARLSDGEFFALPQSPQLFKQLLMVGGLHKYYQIAKCFRDEDLRADRQPEFTQLDIEMSFISEEEIISFNENLIKKIWKEVLNINFDNAFPRMSWQAAMDNYGTDRPDTRYQMLLKDLGEVLGDIGFNIFTKAIQSGGYIKSITVKGGNSSISNVRIKPGGDIFQVAQDAGAGGLAFIRVKGDELETIGAIKNNLSEEHIADILRITEAQDGDLILLGAGDKQIVNQSLDRVRQYIAKDLNLIDKNKWNFLW

SEQ ID NO: 185887 - protein, 252 aa, Unknown
  Bacterial polypetide isolated from the Sargasso Sea
DGIDKWAKEQGSSGLAYFTLEKAYKINAKGPIGKFFSENALLEIMKLTNANIGDTVFLSCGKKNDVEKLLSVARNKIAEDLNLIDNETFSFCWIIDYPMYEIDETTKKIKFSHNPFSMPQGDTNKLDLSNPLNIKAFQYDIVCNGIELSSGAIRNHVPELMYKLFEIAGYSKNDVNSKFTGMINALSYGAPPHGGIAPGIDRIVMLLANEKNIREITMFPMNQNAQDLMMNAPSEISENQLKELNLSLKKKS

SEQ ID NO: 185888 - protein, 121 aa, Unknown
  Bacterial polypetide isolated from the Sargasso Sea
LELKAYQYDIVCNGVELSSGAIRNHIPELMYKLFSIAGYDKNSVDKKFSGMINALSYGAPPHGGIAPGIDRIVMLLANEKNIREVTMFPMNQNAQDLMMDAPSDANEKQLKELNLKILEKK

SEQ ID NO: 185889 - protein, 275 aa, Unknown
  Bacterial polypetide isolated from the Sargasso Sea
FSDLEKMQLETVIKVEGKVVNRSKETINSEIDTGEIEIVIEKHEVLGTCKELPMPIFSDQEYAEEIRLKYRFLDLRRKKIHENIILRSKVISYIRNEMNKLGFLEFQTPILTSSSPEGARDFLVPSRLNPGKFYALPQAPQQFKQLIMVSGFDRYFQIAPCFRDEDARADRSPGEFYQLDLEMSFVEQEDVFNVVEKLMVNTFKYFSKKKLMFDKFPKISYKEAMLKYGTDKPDLRNPLIVNDITEIFIREDVSFEIFKKLVKSGSKVRCIITKN

SEQ ID NO: 185890 - protein, 327 aa, Unknown
  Bacterial polypetide isolated from the Sargasso Sea
EIKINSYEILGTCKELPLPVFTDQEYAEEIRLKYRFLDLRRKKIHSNILLRSKVISFIREEMNKFGFIEFQTPILTSSSPEGARDFIVPSRLNPGKFYALPQAPQQFKQLIMVSGFDKYFQIAPCFRDEDARADRSPGEFYQLDLEMSFVEQEDVFKVVENLLNKVFKKFSNKKFLHEKFPRIPYEDAMLKYATDKPDLRNPLEIYDLTKIFQREDVKFEIFKKLVKSGSIVRSIITKNTKDKPRSFFDNLDKWAKSQGASGLAYFTLEKEKNITAKGPVGKFFSSEALIEIMKITGAKVGDSIFFSCDKEHNVLQLMSPTRDKIAN

SEQ ID NO: 185891 - protein, 335 aa, Unknown
  Bacterial polypetide isolated from the Sargasso Sea
TQCVIDKSNEIFKKIEKLSLETVVKITGIVMERSDETINKNISTGEIEIKIKSIDVLGETKDLPMPVFSDQEYAEEIRLKYRFLDLRRKKLHQNIVLRSKVISFIRNEMQNLGFLEFQTPILTSSSPEGARDFLVPSRLNAGKFYALPQAPQQFKQLIMVSGFDKYFQIAPCFRDEDARADRSPGEFYQLDVEMSFVEQEDVFEVIETLFLKLFKKFSEKKILHEKFPRISYEDAMLKYGSDKPDLRNPLEITDLTNIFERDDVKFDIFNKLVKKGSVVRCLVAYNTKDKPRSFFDGIDKWAKDQGSSGLAYFTLEKGDKLRAKGPIGKFFSENS

SEQ ID NO: 185892 - protein, 305 aa, Unknown
  Bacterial polypetide isolated from the Sargasso Sea
LRSKVISFIREKMISNGFFEFQTPILTASSPEGARDFLVPSRMHPGKFYALPQAPQQFKQMVMISGFDKYFQIAPCFRDEDGRADRSPGEHYQFDIEMSFVEQEDIFKVLEPLFFEVFNKFSKGKKISNIPFKKIKYKESMLKYGTDKPDLRNPIEIADVTKIISRKDVKLDIFKKLIDKGAVVRAIPAPNTSSKPRSFFDEYNNWSKDEGGKGLGYIILEKKGKKIFGKGPIAKFFSEEAMDELIKTSKLKENDSVFFSCDKEKNAEKISGMARQKLGKDLNLIDNKTFHFCWIVDFPMYKYDE

SEQ ID NO: 185893 - protein, 248 aa, Unknown
  Bacterial polypetide isolated from the Sargasso Sea
VKFEIFKKLFKSGSLIKSIVTKKTNTKPRSFFDNIDKWAKEQGWNGLAYFSIEKDQSGKIIGKGPVGKFFSEDSLKEIMKITTAEEGDSIFMSCSKENEIHEIMSKSRNKIGEDLGIVDQNSFAFCWITDFPIFELDKETSKINFSHNPFSMPQGDPNNLDLSKPLDLKAYQYDIVCNGVELSSGAIRNHIPELMYKLFSIAGYEKNIVDKKFSGMINALSYGAPPHGGIAPGIDRIVMLLANEKNIR

SEQ ID NO: 185894 - protein, 236 aa, Unknown
  Bacterial polypetide isolated from the Sargasso Sea
ITFEKTNNKITGKGPIAKFFSERAVLELLKDCKITEKDSVFFVCNKEKEATKFSGIARQKIAEELKLINEKSFHFCWVTDYPMYEYDEKEKKIDFSHNPFSMPQVEMKEFDKTDPLKILAYQYDLVCNGYELSSGAIRNHIPEYLFKVFDKVGYSKSMVEKNFSGMIKALSYGAPPHGGMAPGIDRIVMLLADQKNIREVTLFPLNQNAEDLLMEAPSEATEKQLKELSIKTVKKN

SEQ ID NO: 185895 - protein, 293 aa, Unknown
  Bacterial polypetide isolated from the Sargasso Sea
KFLKEVKKTKILELKTGRIEVKINSIEVLSSAKDLPIPVFGEQDYPEDIRLKYRFLDLRREEMHNNMILRSEVISFIRTEMVKLGFLEYQTPILTSSSPEGARDFLVPSRLNQGKFYALPQAPQQFKQLIMVSGFDKYFQIAPCFRDEDARADRSPGEFYQLDLEMSFVEQEDVFNVVEKLMFNLFKKFSTRKILNEVFPRITYKDSMDKYGTDKPDLRNPLIINDLTRVFTREDVKFDIFKKLVKSGSIVKGIVTKNTKDKPRSFFDNIDKWAKDQGASGLAYFTFEQDKSI

SEQ ID NO: 185896 - protein, 296 aa, Unknown
  Bacterial polypetide isolated from the Sargasso Sea
EKSSKKVIESVKDIGREFVIQVEGEVIKREAINKNISTGEIEILVSEISVLNSSKLPPFTIENDTDGGEELRMKYRYLDLRRSILKDNIIFRNELTFQVRKYLKEQGFIDIETPYLIKSTPEGARDFVVPSRINAGEFYALPQSPQTFKQLLMVSGFDKYVQIVKCFRDEDLRADRQPEFTQIDCEMSFVNQEDVLNTFEGLVQNLFKVCIGASLEKFDRISYSDAMELYGSDKPDTRFGMQFVTLSEKAKGSGFKIFDSSESIYGFNIENGESFSRKEIDYYTDWVKRPQIGALG

SEQ ID NO: 185897 - protein, 173 aa, Unknown
  Bacterial polypetide isolated from the Sargasso Sea
NLINKNQFAFCWVVDYPMFELDEKSKKIVFSHNPFSMPQGDIKKLDLKNPLKLKAYQYDIVCNGVELSSGAIRNHIPELMYKLFAVAGYNKKDVDEKFSGMINALSYGAPPHGGIAPGIDRIVMLLANTNNIREVTLFPMNQNAQDLMMQAPSEVESKQLKELGIKLDLKNKN

SEQ ID NO: 185898 - protein, 265 aa, Unknown
  Bacterial polypetide isolated from the Sargasso Sea
MNKFRTHKCNELRRENVGEEITLSGWINKKRDHGNLLFIDLRDNYGITQCTIDKENSDFKKLEKIQLETVIKIYGKVVERSQEAINKDIETGKIEVVIKNFQILGECKELPLPVFSDREYSEEIRLKYRFLDLRRKKIHENIILRSKVISFIRNEMNKLGFLEFQTPILTSSSPEGARDFLVPSRLNPGKFYALPQAPQQFKQLVMVSGFDKYFQIAPCFRDEDARADRSPGEFYQLDLEMSFVEQEDVFNVVEKLFVNTFKKFS

SEQ ID NO: 185899 - protein, 298 aa, Unknown
  Bacterial polypetide isolated from the Sargasso Sea
DITKCFITSEFQVFQKVIEDGGVVQGIVVPGQGNMSRKKLDKLVEKARQLGAQGLVWIGLPEELASEDYDLENIRSSISKYITQEELKKVVLATKSSANDLLLIVSGEKKLTQTVLGQLRNSLALSLELVDQNQLEFAFIIDFPLFEPGDNEGQWTAAHHAFTMPKEGQAAKLETDPGSVIADSYDLVCNGLEIASGSIRVHDRELQERILKVLGYNLEQINERFGQLLESFDYGAPPHGGIAPGIDRLVMVLAGLDSIRDTIAFPKTQSAVDPLFGSPGPVEDIHLDELKIRVLDSE

SEQ ID NO: 185900 - protein, 232 aa, Unknown
  Bacterial polypetide isolated from the Sargasso Sea
KSGNKIVAKGPIAKFFSESAVSELIKICKITVKDSVFFVCNSQKEATKFSGIARQKIANEMKIIDEKQFHFCWITDYPMYEYDEEEKKIDFSHNPFSMPQVKMKDFDKMDPLKILAYQYDLVCNGYELSSGAIRNHLPDYLIKVFEKVGYSKNLVKKNFSGMIKALSYGAPPHGGMAPGIDRIVMLLANQKNIREVTLFPLNQNAEDLLMEAPSEATEKQLKELGIKTVKKN

SEQ ID NO: 185901 - protein, 297 aa, Unknown
  Bacterial polypetide isolated from the Sargasso Sea
TCISDQEYAEEIRLKYRFLDLRRKKIHNNIILRSKVISFIRKEMERLGFNEFQTPILTSSSPEGARDFLVPSRLNPGMFYALPQAPQQFKQLIMVSGFDRYFQIAPCFRDEDARADRSPGEFYQLDIEMSFVEQEDVFKVVEKLMVSLFTSFSKKNIVFEKFPRIPYNESMNKYGTDKPDLRNPLIINDISEIFKRDDVTFEIFKKLYKSGASIKCIVTRQTNKKPRSFFDNIDKWAKQQGWSGLAYFSIEKDESDKLIGKGPVGKFFSNEALSELIKITNAQVGDSIFMSCSDEDQ

SEQ ID NO: 185902 - protein, 157 aa, Unknown
  Bacterial polypetide isolated from the Sargasso Sea
DYPMYEIDEKTNKIQFSHNPFSMPQGEMESLINKDPLDIKAYQYDIVCNGVELSSGAIRNHKPEIMYKAFEIAGYKKHEVETKFTGMLNALKYGAPPHGGSAPGIDRIIMLLADEPNIREVIAFPMNQQAVDLMMDAPSEVDQERLEEFGLKLVDKD

SEQ ID NO: 185903 - protein, 264 aa, Unknown
  Bacterial polypetide isolated from the Sargasso Sea
FPRISYSDAMLKYGSDKPDLRNPIIISDLTEIFKRDDIKFEIFKKLVKSGSIVRGLVAKDTKDKTRSFFDGIDKWAKDQGSSGLAYFTLEKNQKISGKGPVGKFFSEDALKEIMKKMDAKIGDTVFLSCGKKENVENILGLAREKIGNELKVIDKNIFSFCWVVDYPMFELDANSKKIKFSHNPFSMPQGNVNNLDLSNPLNLKAYQYDIVCNGVELSSGAIRNHIPELMYKLFDIAGYSKKDVDEKFSGMINALSYGAPPHGG

SEQ ID NO: 185904 - protein, 294 aa, Unknown
  Bacterial polypetide isolated from the Sargasso Sea
TDITEIFKRDDVNFEIFKKLVSKGSIVRGIVTKNTSEKPRSFFDGIDKWAKEEGSSGLAYFSIENSEKLIAKGPVGKFFSEECLKEIMKLMNAEVGDTIFMSCGKKPEVESLLSNARAKIANELNLIDESIFSFCWVVDYPMFEIDESTKKIEFSHNPFSMPQGDIDNLNLSDPLKLKAYQYDIVCNGIELSSGAIRNHKPDLMYKLFEIAGYSKEKVNEKFSGMINALSYGAPPHGGIAPGIDRIVMLLADEKNIREVTMFPMNQNAQDLMMNAPSEVDENQLKELNISKRKK

SEQ ID NO: 185905 - protein, 294 aa, Unknown
  Bacterial polypetide isolated from the Sargasso Sea
FYALPQSPQLFKQMLMMGGMDRYYQVARCFRDEDLRADRQPEFTQIDIEASFVEEKDIIELGSSLLKVLLKDFANHNLDHIDEIDYAHAINKYGSDKPDLRIPLELLEISDEAKKEEFKVFSDPAKNDGSRVVALKVDGGNKLTRSQIDEYTNFVGKLGAKGLAYIKINDVSDIENGLQSPILKFLSKKFITALFSKLNPANDDLIFFGAGSSEIVNLSMSSLIKRLGKDLDLYQKDWAPCWITNFPMFESDADNLKALHHPFTRPKEDLENFRKDPSEAQAYAYDLVLNGYEI

SEQ ID NO: 185906 - protein, 320 aa, Unknown
  Bacterial polypetide isolated from the Sargasso Sea
QVSLCGWVNRRRDLGGLIFIDLRDREGLVQVFFDPDLTDLFTQAADLRNEYCVQLTGTVRARPDSQVNSEMATGEVEVYASSLTILNKSAPIPLDPNQNNSEEQRLKYRYIDLRRPLMSDRLKFRAKVTSFVRNFMDSQGFLDVETPILTKATPEGARDYLVPSRTHKGQFFALPQSPQLFKQLLMMAGLDRYYQIVKCFRDEDLRADRQPEFTQIDIETSFMTSEQVMEVTEQMVHQMFLELLNVDLGKMPRMTYNEAMRLYGSDKPDLRNPMQFVDVADLLKDVEFKVFSGPANDKKGRVVALKVPGAAEKVSRKDID

SEQ ID NO: 185907 - protein, 252 aa, Unknown
  Bacterial polypetide isolated from the Sargasso Sea
LRREEMHKNIVLRSQVISFIRSEMLKLGFLEYQTPILTSSSPEGARDFLVPSRLNPGKFYALPQAPQQFKQLIMVSGFDKYFQIAPCFRDEDARADRSPGEFYQLDLEMSFVEQEDVFNVVEKLMVNLFKHFSKKKLLNDKFPRITYQEAMKKYGTDKPDLRNPLIIQDITKIFTRDDVKFDIFKKLVKSGSIVRAILVKDTKDKPRSFFDNIDKWAKEQGASGLAYFTFEKDKQLKGKGPIGKFFSHDSLK

SEQ ID NO: 185908 - protein, 297 aa, Unknown
  Bacterial polypetide isolated from the Sargasso Sea
MQKNLKLRHELILEICNYLNNKDFVHIETPILIKSTPEGARDYIVPSRVHPGEYYALPQSPQQMKQMLMVSGFEKYFQIAKCFRDEDLRADRQPEHTQLDFEMSFVHQEDVLNNCEKLYSHLSKKFLGKEISTPLPRLKYEESIEIYGTDKPDTRFDLKIHNLESNLSGTEFNVFNNALKNNGTIRGFSIPKNEKMTRKFYDSLNEFVRDNGGAGIIPISIEKDINEIKLEDIKSPISKFLDLEIIKNLYNFFNVDQNQVILICAGEKNIVLECLGKVRNKIAKEFDLIDNEKFNFL

SEQ ID NO: 185909 - protein, 229 aa, Unknown
  Bacterial polypetide isolated from the Sargasso Sea
MNKYRSHNCSELRKKDVNNKAVLSGWINKKRDHGNLLFIDLRDNYGITQCIIDKQNSNFLKLEKVQLETVIKIEGKVVNRSKETINKDIETGEVEVVIENYEILGSCKELPMPVFSDQEYSEEIRLKYRFIDLRRKKIHENIILRSKVVSFIRDEMNKLGFLEFQTPILTSSSPEGARDFLVPSRLNPGKFYALPQAPQQFKQLIMVSGFDKYFQIAPCFRDEDARSDR

SEQ ID NO: 185910 - protein, 247 aa, Unknown
  Bacterial polypetide isolated from the Sargasso Sea
MGGDIFKVAQDAGAGGLAFIRVKGDELETIGAIKNNLNKDHISNILKITEAKDGDLILLGAGNTQIVNQSLDRVRQYIAKDLKLIEKDKWNFLWVTDFPMFEMNEEEKRFEALHHPFCSPKNIKLEDSKELKEKIESSTAHAYDLVLNGLELGGGSLRIHQAEMQREVLRIVGLTDNQINEKFGFLIEALEMGAPPHGGIAFGVDRITMLILGEDSIRETIAFPKNQQAKCLLTNAPSNVSKSQLKE

SEQ ID NO: 185911 - protein, 265 aa, Unknown
  Bacterial polypetide isolated from the Sargasso Sea
FFQLFLDFYVTETPFPRITYADAMSRYGTDKPDLRNPINISNLTKEFNDDKVEFSAFKKIIEEGGEVIGIPAPDSSQKPRSFFDNLNNWARKEMNAAGLGYIVFDKSSSGVEGKGPIAKFIPSEIQEMILNKAGLKAGDSIFFACAKGKEVYDIAAAARDKIAIDLDLIEKKVFKFCWIVDFPMYEKDKETEKIDFSHNPFSMPQGGLEALNNSDPLNILGYQYDIVCNGVELSSGAIRNHVPEIMYKAFEIAGYSKDQVHEKLE

SEQ ID NO: 185912 - protein, 301 aa, Unknown
  Bacterial polypetide isolated from the Sargasso Sea
YQIDMEMSFATQEDILDVISRLLFDTFDKFKSKEKSINKLPFPTFTYRDSIENFGCDKPDLRNPLRLTNVTRYFEGSGLQIFENLIKKGAIVNCIQALKSEGKPRSFYDNLNKWAQEQGKKGLGYINFENLLPKGPLAKNFNQEKLNQMIKDNNFNQTDGLLFVCDTPEESYDFSSKVIAKVGEDLNLIDKNKYEFCWIIDYPMYEKDALTGKIDFSHNPFSMPQGGMDKLKKEDPLNILAYQYDIVCNGIELSSGAIRNHRPDIMKKAFEIAGYGESEIKTKFSALFEAFHYGVPPPWRL

SEQ ID NO: 185913 - protein, 312 aa, Unknown
  Bacterial polypetide isolated from the Sargasso Sea
LKHRTLDLRGPKMQENLRIKSRLTKSIRDYLEKHSFVDIETPILTKATPEGARDYLVPSRTSTGNFFALPQSPQLFKQMLMISGFDRYYQIARCFRDEDLRADRQPEFSQIDIEASFVNEGDVMKISEDMVKHAFNEVLDFKIKEIPKIKWSDAMNSYGSDKPDLRNPLRLIEIGEIFKNEEFKVFSDPANDPKSRIASLVIENGDDIGRGQIDRYTDFVKEFGAKGLAYIRVDEANVEGLNSPIIKYLSENCQKSILKELNLKKGSLVFFGAGNKKTVNEYMSRLMSKIGGDLNLLEDGFRFCWVTDFPMF

SEQ ID NO: 185914 - protein, 293 aa, Unknown
  Bacterial polypetide isolated from the Sargasso Sea
EMSFVDQDDVKSEMESMVRELFKSVLDIDLEKQFSQITHAEAMDRFGSDSPHLGIEMELTEVSNLMKDVEFKVFAGPANDDDSRVACLVLKDSSDLSRKQIDDYTDFVSNYGAKGLAYIRVNEIEKGIDGLQSPILKFLNDSVTNQLIETLSLKNGDTVFFGADKKEIVNASLGALRVKMAEDFGLIKDGWFPLWITDFPMFHWDEKEKRWSSEHHPFTSPLNPDPEELKNNPKDALSKGYDMVLNGHEIGGGSIRIHSEEMQQAVFSILGINEEEADEKFGFFLEALKYGCP

SEQ ID NO: 185915 - protein, 90 aa, Unknown
  Bacterial polypetide isolated from the Sargasso Sea
LGIGQEEASDKFGFLLEALKYGCPPHGGIAFGLDRLTMILAETDSIRDVIAFPKTQNANCLLTSAPSKAEAEQLEELAIRLVRPEVKEDT

SEQ ID NO: 185916 - protein, 213 aa, Unknown
  Bacterial polypetide isolated from the Sargasso Sea
MKRTHKCNEVTSELIGEEIYVSGWIHRRRDHGGVIFFDLRDEGGLVQVVYNPDSRDTFSLAESCRNEYVILSKGIVRERPEGTVNESLVTGRVEIIASELEILNASLPMPFQLDEHTSVGEETRLKYRFLDLRRSDMQENLRLRSRVSGSLRNFLNAQEFIEIETPLLTKATPEGARDYLVPSRTFPGSFFALPQSPQLFKQTLMASGFEKYY

SEQ ID NO: 185917 - protein, 197 aa, Unknown
  Bacterial polypetide isolated from the Sargasso Sea
MNKYRSHNCSELDDKEIGKIVHLSGWLHRKRDHGNLLFVDLRDHYGITQCVIENNNKFFPVLEKLKPESVLKINGEVIKRSKENENLELKTGKIEVKITSIEVLSSAKDLPIPVFGEQDYPEDIRLKYRFLDLRREEMHNNIILRAKVISFIRTEMIQLGFLEYQTPILTSSSPEGARDFLVPSRLNQGKFYALPQA

SEQ ID NO: 185918 - protein, 237 aa, Unknown
  Bacterial polypetide isolated from the Sargasso Sea
SIRNEFVVQIHGVVKRRLEGTINKNMYTGEVEIEVINLNILNNAKTPVFPIDGYQDVNEDVRLKNRVLDLRRPEMNERIITRSKITSLIRNFLDKNDFHEIETPILTKATPEGARDYILPSRVQPGSFYALPQSPQLFKQLLMIGGLDKYYQIARCFRDEDLRADRQPEFTQIDIEASFLDQKEIMKISEKMIKDIILKFCDEKLEKFEVINWHDAMRDYGCDKPDLRIPLKLIEIS

SEQ ID NO: 185919 - protein, 154 aa, Unknown
  Bacterial polypetide isolated from the Sargasso Sea
MFEIDEKTNKVVFSHNPFSMPQGDLKKLDLSKPLEIKAYQYDIVCNGIELSSGAIRNHIPELMYKLFSIAGYDKKAVDEKFSGMINALSYGAPPHGGIAPGIDRIIMLLAGEKNIREVTMFPMNQNAQDLMMNAPSEVSLNQLKELNLSIKKNK

SEQ ID NO: 185920 - protein, 301 aa, Unknown
  Bacterial polypetide isolated from the Sargasso Sea
CVIENKDKNFKVLEKLKPESVILVEGKVIKRSKETENKDLKTGLIEVKVKNIQVLSEAKELPLPVFGEQDYPEETRLKYRFIDLRRNEMHKNIELRSKILSFLRSKMTENNFLEFQTPILTASSPEGARDFLVPSRVHPGKFYALPQAPQQFKQMIMISGFDRYFQVAPCFRDEDGRADRSPGEHYQLDMEMSFVEQEDVLKTVEPIFFDLFKNFAKNKKINKFPFPRIKYNDALNKYGTDKPDLRNPIELKDVTEIFKSDEVGLKIFKEIISKGGVVKAVPVSTPISNHVVFLMGLILGL

SEQ ID NO: 185921 - protein, 278 aa, Unknown
  Bacterial polypetide isolated from the Sargasso Sea
NFLGLEKTQLETVIKIEGKVVNRSNETVNKDIKTGEIEVVINKFEILGTCKELPMPVFSDQDYAEEIRLKYRFLDLRRKKIHENIILRSKVISFIRDEMIKFGFLEFQTPILTSSSPEGARDFLVPSRLNPGKFYALPQAPQQFKQLIMVSGFDKYFQIAPCFRDEDARADRSPGEFYQLDLEMSFVEQEDIFNVVEKLLVNTFKKFSNKKLMHIKFPKISYSNAMLMYGTDKPDLRNPLIINDITEIFIRDDVSFEIFKKLVKSGSKVRCISTKNTK

SEQ ID NO: 185922 - protein, 274 aa, Unknown
  Bacterial polypetide isolated from the Sargasso Sea
TQIDIETTFLDADGVMSITERMIRDLFNKMLNVDLGDFPRMTYKEAMTRFGSDKPDLRNPLELTDVADLLANVDFKVFSGPANDPKGRVAAIRVPGGASLSRKQIDDYTKFVGIYGAKGLAWVKVNDAGAGLEGLQSPILKFLSEDITNAMLERTGAQSGDILLFGADSYTVVTEAMGALRLKLGEDFELLEGEWKPLWVVDFPMFEEFDGQLHAIHHPFTAPRGLTPEELKANPAEALSDAYDMVLNGVELGGGSVRIHNEDMQSTVFNILWH

SEQ ID NO: 185923 - protein, 215 aa, Unknown
  Bacterial polypetide isolated from the Sargasso Sea
MKKYRTHTCGELNKSHKKKEISLSGWINKKRDHGNLLFLDLRDNYGVTQCVVDKSNEVFKKIEKLSLETVIKITGIVIERSDQTINKNISTGDIEVKINNIDILGQTKELPMPVFSDQEYAEEIRLKYRFLDLRRKKIHENIILRSKVISFIRNEMQKLGFLEFQTPILTSSSPEGARDFLVPSRLNPGKFYALPQAHQQFKQLIMVSGFDRYFK

SEQ ID NO: 185924 - protein, 247 aa, Unknown
  Bacterial polypetide isolated from the Sargasso Sea
GARDFVVPSRMNPTEFYALPQSPQTFKQLLMVSGYDRYFQIVKCFRDEDLRADRQPEFTQIDCEMAFVEQEDVIQTFEGLIKHLFENEKQITFKDEFPRISYANAMMKYGSDKPDIRFGMEFNYIKSLTSEAGFKVFDEAEEVIAITLKNCADYSRKKLDTLTNWVKRPQIGAKGLIYVKCNEDGSFKSSVDKFFSSDYLSSWAKECNAENGDLILILSGNKSTTQKQMSELRLKHGKDLNLYKEND

SEQ ID NO: 185925 - protein, 212 aa, Unknown
  Bacterial polypetide isolated from the Sargasso Sea
SLQKEIVKDLNINEGNILFMVGDKKNIACKALGNLRVLVAQREGLTNKDEYKPIWVTEFPMFDYDEDNDRYIAMHHPFTAPRESDIDKLDSDPGNALSRGYDLTMNGHEIAGGSIRIHSPAIQEKVFSLLGLSHEQAVEKFGFLVEALKYGAPPHGGIAFGFDRLVMLLAGTDNIRDVIAFPKTTSASSLMDDSPNYVDIDQLNELGLKLKD

SEQ ID NO: 185926 - protein, 280 aa, Unknown
  Bacterial polypetide isolated from the Sargasso Sea
DYPEDIRLKYRFLDLRREQMHKNIILRSKVISFIRNEMVKLGFLEYQTPILTSSSPEGARDFLVPSRLNPGKFYALPQAPQQFKQLIMVSGFDRYFQIAPCFRDEDARSDRSPGEFYQLDIEMSFVEQEDVFKVIESLMVNLFKAFSSKKMLYNKFPRISYEEAMLKYGTDKPDLRNPLIICNITKVFHRDDVKFDIFKKLVKSGCDVRCIITKNTKDKSRSFFDNIDKWAKEQGASGLAYFTFEKNEQITAKGPVGKFFSEESLKEIMNITGAEINDSI

SEQ ID NO: 185927 - protein, 159 aa, Unknown
  Bacterial polypetide isolated from the Sargasso Sea
IVDYPMYEIDEITKKIKFSHNPFSMPQGELDKLDLSNPLNIKAFQYDIVCNGIELSSGAIRNHVPELMYKLFEIAGYSKDDVDSKFSGMINALSYGAPPHGGIAPGIDRIVMLLANEKNIREVTMFPMNQNAQDLMMNAPSEISDNQLKELNLAIKNKK

SEQ ID NO: 185928 - protein, 293 aa, Unknown
  Bacterial polypetide isolated from the Sargasso Sea
RDEDLRADRQPEFTQIDCEMAFVEQEDILNMFEGLTRHLLKEIKGVEVEKFPRITYDYAMKTYGNDKPDIRFDIKFGELNEVAQHKEFSVFNSAELVVGIAAPGCANYTRKEIDALIDWVKRPQIGASGMVYVKCEADGTFKSSVDKFYDQEDLKKWAEATNAKTGDLILVLSGNADKTRTQLSALRMEVATRLGLRKPNEFAPLWVIDFPLLEWDEETNRYHAMHHPFTSPKPEDIKLIETEPGKVRANAYDMVLNGNEIGGGSIRIHDRELQSRMFDLIGFSKEEAEAQFG

SEQ ID NO: 185929 - protein, 328 aa, Unknown
  Bacterial polypetide isolated from the Sargasso Sea
MQEQIEVLGEFYQLDVEMSFVEQEDVFGVIETLFLKLFKTFSNKTILHEKFPRITYEDAMLKYGSDKPDLRNPLEISDLTIIFEREDVKFDIFKKLVKSGSLVRALVTKNTKDKPRSFFDSIDRWAKEQGTSGLAYFTLEKDDKINAKGPIGKFFSEDALLEIMKLTNANIGDTLFFSCGKKNDVEKILSVARNKIAEDLNLIDNEIFSFCWIIDYPMYEIDETTKKIKFSHNPFSMPQGEINKLDLSNPLNIKAYQYDIVCNGVELSSGAIRNHVPELMYKLFEIAGYSKNDVNSKFSGMINALSYGAPPHGGIAPGIDRICMLLAN

SEQ ID NO: 185930 - protein, 298 aa, Unknown
  Bacterial polypetide isolated from the Sargasso Sea
QIYKQILMISGYDRYFQIVKCFRDEDLRSDRQPEFTQIDIEMSFVNEEMIYNQMENLVRYLFKKVKDISLPNKFPTMTYQEAMNLYGSDKPDLRFDMKIIDFKSFVLESEFQAFKEAEMVRGLIVKNGAKFSRKAIDVLTEFVKSYRAKGLAWIKVIDEKFSGGISKFFSDTLQAKIIRNQNLESGDLLLLVGDKSKITLNCLGKLRKEVAIKENLIPNDIFQPLWVTDFPMFDYDKKRGTYTSMHHPFTAPKVKSFKEFEEDPYNCLSRGYDLTINGYEVAGGSIRIHSTDIQKKVF

SEQ ID NO: 185931 - protein, 311 aa, Unknown
  Bacterial polypetide isolated from the Sargasso Sea
MRTEYCGNVTKEHLGKDVSICGWVHRRRDHGGVIFLDVRDLEGICQAVIDPSNEEAFSLADKCRSEFVVQIKGSVRERPEGTVNSKMKTGEIEIEVSELEVLNSAATPAFPLDDYQDVNEDVRLKNRIIDLRRPEMNNRILKRSKIVSTIRNFLEGRSFNEIETPILTRATPEGARDYILPSRVHPGSFYALPQSPQLFKQMLMMGGMDRYYQVARCFRDEDLRADRQPEFTQIDIEASFVEEKDIIELGSSLLKLLLKDFANHNIDNIDELDYADAINKYGSDKPDLRIPLELIEISDEAKKEEFKVFSD

SEQ ID NO: 185932 - protein, 307 aa, Unknown
  Bacterial polypetide isolated from the Sargasso Sea
YGTDKPDLRNPLEIYDLTTIFHRDDVKFEIFKKLVKSGSIVRSIVTKNTKDKPRSFFDNLDKWAKSQGASGLAYFTIEKDKNIIAKGPVGKFFSIEALNEIMKITGAKVGDSLFFSCDKEVNVLQLMSSARDKIADELNLIDQDTFAFCWIVDYPMYEVDNVTKKIKFSHNPFSMPQGEEKNLDFKNPLNIKAFQYDIVCNGVELSSGAIRNHKPELMYKLFEIAGYKKDDVQEKFSGMINALSFGAPPHGGIAPGLDRIVMLLAGEKNIREVTLFPMNQHAQDLMMNSPSKVSDKQLSELNITIKK

SEQ ID NO: 185933 - protein, 267 aa, Unknown
  Bacterial polypetide isolated from the Sargasso Sea
TPILTRATPEGARDYLVPSRVHPGEFFALPQSPQLFKQLLMIGGLDKYYQIAKCFRDEDLRADRQPEFTQVDIEASFVSTEEIIELGEHLVTSLLSEFTDYQKAEVPRITYKQSIEKYGCDKPDLRIPLELNDISELVKDEEFKVFSGPANDQASRVVALKVPEAASMTRKKIDEYTDYVGKLGAKGLAYIKVLDLDQENGLQSPILKFFQKETIDSILASLNVQNNDIIFFGAGKADIVNLSMSSLIKRLGEDLSLINSSWAPCWI

SEQ ID NO: 185934 - protein, 306 aa, Unknown
  Bacterial polypetide isolated from the Sargasso Sea
IDCEMSFVNQEDILNQFENLISHLIKKINNYKLDKFTRMTYDQAMREYGTDKPDIRFEMKLADITKNAKGFGFKVFDSSESIIGFPIKKAANYSRKEIDYWINWVKQPQIGAEGIVWIKYNDDKTLKSSVDKFYSQDVLLKWMKTFKANPGDLVFILSGELKKILKQLGELRLNIAQKIGLRDPTVFAPLWIVDFPLFKYDEVSSRLLAVHHPFTSPKEEDIKILKDNPEKVRANAYDLVINGNEIGGGSIRIHDSKLQKEIFKLLNLSDEEVDEQFGFLIDAFKYGAPPHGGIAFGLDRLVAILG

SEQ ID NO: 185935 - protein, 296 aa, Unknown
  Bacterial polypetide isolated from the Sargasso Sea
MHKNIELRSKILSFLRIKMTENNFLEFQTPILTASSPEGARDFLVPSRVHPGKFYALPQAPQQFKQMIMISGFDRYFQIAPCFRDEDGRADRSPGEHYQLDMEMSFVEQEDVLKTVEPIFFDLFKKFGKSKKINQIPFPRIKYKDALNKYGTDKPDLRNPIELVDATEIFNSKEVELKIFKEIISKGGIVKAIPVSNTHTKPRSFFDGLNNWAISEGASGLAYITFERVGSKILGKGPIAKFFSEQALLKLAKLCKINEKDSIFFVCNKEKEAINFSGIVRQKIAEELKIIDSDSF

SEQ ID NO: 185936 - protein, 154 aa, Unknown
  Bacterial polypetide isolated from the Sargasso Sea
MRSHFCGELNESNVDEDVVLCGWIHRRRDHGGVIFLDLRDREGLAQVVYDPDTKESFKIAEGVRNEFVVEVKGRVRLRPSGTINDEMPTGRIEILGNELKVLNASETPPIQLDEHAEVGEDVRLKYRYIDLRRPEMAARLRFRSKVGNTIRNFL

SEQ ID NO: 185937 - protein, 268 aa, Unknown
  Bacterial polypetide isolated from the Sargasso Sea
MRADRQPEFTQIDVETSFMTAPQVREIMEEMIRKLWLHILNVDLGDFPIMTFDEAMRRFGSDKPDLRLPMELVDVADLLTEVEFAVFAGPAKDPKGRVAALKVPGGAELSRKQIDEYTKFVGIYGAKGLAWMKVNDAGSGLEGVQSPVAKFLSDAIVREILARTGAMDGDIIFFGADSKKVVCDAMGALRLKVGRDLGLVENVWKPLWVIDFPMFEEDGEGGLAAMHHPFTAPSNLGPSELKANPVGAYANAYDMVINGYEVGGGSVR

SEQ ID NO: 185938 - protein, 214 aa, Unknown
  Bacterial polypetide isolated from the Sargasso Sea
MNKYRTHNCGELNKNNKSTEVILSGWINKKRDHGNLLFIDLRDNYGVTQCVIDKSNEHFAKLEKIQLESVIKILGKVVERTKETINLELKTGEIEVVIDSFEVLGSCKELPMPVFSDQEYSEEIRLKYRFLDLRRKKIHENIILRSKVISFIRKEMNELGFLEFQTPILTSSSPEGARDFLVPSRLNPGKFYALPQAPQQFKQLIMVSGFDKYF

SEQ ID NO: 185939 - protein, 319 aa, Unknown
  Bacterial polypetide isolated from the Sargasso Sea
MKKYRTHNCNELRKEDVDKKISLSGWVNKKRDHGNLLFIDLRDNYGITQCIIDKDNKYFSDLEKMQLETVIKVEGKVVNRSKETINSEIETGEIEVVIDKYEVLGTCKELPMPVFSDQEYAEEIRLKYRFLDLRRKKIHENIILRSKVISYIRNEMTKLGFLEFQTPILTSSSPEGARDFLVPSRLNPGKFYALPQAPQQFKQLIMVSGFDRYFQIAPCFRDEDARADRSPGEFYQLDLEMSFVEQEDVFNVVEKLMVNTFKNFSTKKLMFEKFPKISYKEAMLQYGTDKPDLRNPLIINDITEIFTREDVSFEIFKKL

SEQ ID NO: 185940 - protein, 403 aa, Unknown
  Bacterial polypetide isolated from the Sargasso Sea
RSETVLQVEGKVRARPGESLNDKLATGAVEVLASGITVLNSVKGNLPFPVSVHDEENTREELRLRHRYLDLRRKRMNDNLRLRAQTIQAARRFLEDEGFIEVETPVLTRSTPEGARDYVLPSRVCGGEWFALPQSPQLFKQLLMVGGIERYYQVARCFRDEDLRADRQPEFTQLDIEMSFMDQEQILELNESLICAIWKAVKGIDLPRPFPRMTWHDAMERYGTDRPDTRYGMELTNVSDIVKDMGFKVFSGAVKSGGAVKCIAVPGGNDAVSNVRIKPGGDVFSEAQKAGAGGLAFIRVRDGGEIDTIGAIKDNLSDEQKQELLSRTGAEPGTLLLFGAGDTATVNKALDRVRQYLAKELGMVKADSDNDQWNFLWVVDFPMFEFNSDENRYEALHHPFCAP

SEQ ID NO: 185941 - protein, 416 aa, Unknown
  Bacterial polypetide isolated from the Sargasso Sea
VEVVIKNFNVLGTCKELLMPIFSDQEYSEEIRLKYRFLDLRRKKIHENIILRSKVISFIRNEMNNLGFLEYQTPILTSSSPEGARDFLVPSRLNPGKFYALPQAPQQFKQLIMVSGFDKYFQIAPCFRDEDARADRSPGEFYQLDLEMSFVEQEDVFNVVETLLVNTFRNFSKKKLLEKKFPRIPYKESMIKYGTDKPDLRNPLIINDITEIFLRDDVKFEIFKKLVKSGSKVRCIITKNTKNKPRSFFDGIDKWAKDQGASGMAYFTFEKDKEVSGKGPVGKFFSKEALEELMKKTGAKIGDSIFFACNKEKDLEVITSLARNKIAKDLNLIDENIFAFCWIVDYPMYERDEVTKKINFSHNPFSMPQGDIDKIDFNKPLEILAYQYDIVCNGIELSSGAIRNHIPKLMYKLFSV

SEQ ID NO: 185942 - protein, 248 aa, Unknown
  Bacterial polypetide isolated from the Sargasso Sea
TNYVGKLGAKGLAYIKVIDLKQENGLQSPILKFFQQETIDSILAFLNVQNDDIIFFGAGKADIVNLSMSSLIKRLGEDLSLMNSSWAPCWIVDFPMFERNKENNLTSLHHPFTLPAVTIDELKKDPDNSLACAYDFVLNGYELGGGSLRVYEPSMQKEIFSILGISSDEAKEKFGFLLSALSSGCPPHGGIAFGLDRIVMLLSDTTNIRDVIAFPKTQSASCLLTDAPGTVSADQLDELSVKSTFEPD

SEQ ID NO: 185943 - protein, 201 aa, Unknown
  Bacterial polypetide isolated from the Sargasso Sea
VNKALDRVRQYLAKELGMVKADRDNDQWNFLWVVDFPMFEFNSDENRYEALHHPFCAPNAEDLGSDASQWADTLPAARAQAYDLVLNGLELGGGSLRIHDSALQRQVLQTVGLPLEEAQEQFGFLMDALDVGAPPHGGLAFGIDRMVMLLAGEESIRDTIAFPKTQQARCLMTNAPGGVANKQLEELHVASTWVDPSDDDA

SEQ ID NO: 185944 - protein, 423 aa, Unknown
  Bacterial polypetide isolated from the Sargasso Sea
ILTAPSPEGARDYLVPSRIHKGSFYALPQAPQQFKQLYMASGVDKYFQIAPCFRDEDSRADRSPGEFYQIDMEMSFATQEDILDIISRLLFDTFDKFKSKEKSINKLPFPTFTYRDSIENFGCDKPDLRNPLRLKNVTRYFEGSGLQIFENLIKKGAIVNCIQALKSEGKPRSFYDNLNKWAQEQGKKGLGYINFENLLPKGPLAKNFNQEKLNQMIKDNNFNQNDGLLFVCDLPEESYDFSSNVIAKVGDDLNLIDKNKYEFCWIVDYPMYEKDVLTGKIDFSHNPFSMPQGGMDKLIKEDPLSVLAYQYDIVCNGIELSSGAIRNHRPDIMKKAFEIAGYGESEIKTKFSALFEAFHYGVPPHGGCAPGLDRIIMLLSDNENIREVIAFPFNQRAQDLMMNAPVKIDSKQLKELNLKKISD

SEQ ID NO: 185945 - protein, 410 aa, Unknown
  Bacterial polypetide isolated from the Sargasso Sea
MSKYRTHTCNELRKEDVDKKVFLSGWINKKRDHGNLLFIDLRDNYGVTQCIIDKDNKNFTNLEKTQLETVVKIEGKVVARSEDTINKEIGTGEIEVTIDTYEELGSCKELPMPVFSDQEYAEEIRLKYRFLDLRRKKIHENIILRSKVISHIRNEMTKLGFLEFQTPILTSSSPEGARDFLVPSRLNPGKFYALPQAPQQFKQLIMVSGFDKYFQIAPCFRDEDARADRSPGEFYQLDLEMSFVEQEDVFNVVEKLMVNTFKTFSNKKLLNDKFPRISYKDAMLKYGSDKPDLRNPLEIKDITEIFTREDVSFEIFKKLVKSGSRVRCIITKNTKDKQRSFFDNIDKWAKEQGASGLAYFTFEKDTELSGKGPIGKFFSKEALSEIMNLTNAEVGDSIFLACGKQNELEK

SEQ ID NO: 185946 - protein, 366 aa, Unknown
  Bacterial polypetide isolated from the Sargasso Sea
EVLGEFYQLDLEMSFVEQEDVFNVVEKLMVNTFKNFSNKKLMFDKFPKISYKEAMLKYGTDKPDLRNPLIINDITEIFTREDVSFEIFKKLVKSGSRVRCIVTKNTKDKPRSFFDNIDKWAKGEGASGLAYFTFEKDKDILAKGPIGKFFSKDALVEIMKKTKCEIGDSIFMACGKQDELEKITSLARDKLAKDLDLIDENIFAFCWIVDYPMFEKDELTNKIEFSHNPFSMPQGNLSEKDLENPLDILAYQYDIVCNGIELSSGAIRNHKPELMYKLFSIAGYDKIQVDEKFSGMINALSYGAPPHGGIAPGIDRIVMLLANEKNIREVTMFPMNQNAQDLMMNAPSEVNPDQIKELNLILKTKK

SEQ ID NO: 185947 - protein, 351 aa, Unknown
  Bacterial polypetide isolated from the Sargasso Sea
MAFVEQDDVFNAIEPILHSVFTTFSDFNVTETPFPRITYADAMSRYGTDKPDLRNPINISNLTKEFNDDKVEFSAFKKIIGEGGEVIGIPAPDSSQKPRSFFDNLNNWARKEMNAAGLGYIVFDKSSSGVEGKGPIAKFIPSEIQEMILNKAGLKAGDSIFFACAKGKEVYDIAAAARDKIAIDLNLIEKGVFKFCWIVDFPMYEKDKETGKIDFSHNPFSMPQGGLEALNNSDPLNILGYQYDIVCNGVELSSGAIRNHVPEIMYKAFEIAGYSKDQVHEKFGGMINAFTYGVPPHGGIAPGIDRIVMLLAQEKNIREVILFPMNQQAQDLMMLAPAEVDKTTLDELNLE

SEQ ID NO: 185948 - protein, 320 aa, Unknown
  Bacterial polypetide isolated from the Sargasso Sea
MNKYRSHNCSELTEKDSGKTVSISGWLHRKRDHGNLLFIDLRDHFGLTQCVIENNSKFFSELEKLRPESVLTVTGKVIKREKGTENLELSTGKIEINIQSIKILSESKDLPMPVFGEQDYPEDIRLKYRFLDLRREEMHKNIILRSKVISFIRAEMLKLGFLEYQTPILTSSSPEGARDFLVPSRLNPGKFYALPQAPQQFKQLIMVSGFDKYFQIAPCFRDEDARADRSPGEFYQLDIEMSFVEQEDVFKVVETLMINLFKNFSSKKIMNDKFPKIPYQEAMLRYGTDKPDLRNPLLINDITNIFTRDDVKFDIFKKLV

SEQ ID NO: 185949 - protein, 292 aa, Unknown
  Bacterial polypetide isolated from the Sargasso Sea
MNKYRTHTCGELNISNKGQKIILSGWINKKRDHGNLLFIDLRDNYGLTQCVVDNENKVFKEIENLSLETVLKISGKVIERNKDTINENLSTGEIEISIIDFEILGQTKELPMPIFSNQEYSEEIRLKYRFLDLRRKKIHQNIILRSKVISFIRSEMNNLGFLEFQTPILTSSSPEGARDFLVPSRLNPGKFYALPQAPQQFKQLIMVSGFDKYFQIAPCFRDEDARADRSPGEFYQLDLEMSFVEQQDVFEVVEKLMVKVFKNFSDKKLLFETFPKISYSDAMLKYGSDKPD

SEQ ID NO: 185950 - protein, 332 aa, Unknown
  Bacterial polypetide isolated from the Sargasso Sea
MNKYRTHKCNELRKEDVDKKISLSGWINKKRDHGNLLFIDLRDNYGITQCIIDKDNKYFSDLEKMQLETVIKVEGKVVNRSKETINSEIDTGEIEVVIEQHEVLGTCKELPMPIFSDQEYAEEIRLKYRFLDLRRKKIHENIILRSKVISYIRNEMTKLGFLEFQTPILTSSSPEGARDFLVPSRLNPGKFYALPQAPQQFKQLIMVSGFDRYFQIAPCFRDEDARADRSPGEFYQLDLEMSFVEQEDVFNVVEKLMVNTFNNFSSKKLMFDKFPKISYKEAMLKYGTDKPDLRNPLIINDITEIFTREDVSFEIFKKLVKSGSKVRCIVTK

SEQ ID NO: 185951 - protein, 360 aa, Unknown
  Bacterial polypetide isolated from the Sargasso Sea
PEFTQVDIEASFVSAEEILDLGEDLVTSLLSEFTDYQKTEVPRITYKESIEKYGCDKPDLRIPLELNDISKFVKHEEFKVFSGPANDPASRVVALKVPGAASLTRKKIDEYTDYVGKLGAKGLAYIKVVDLDQENGLQSPILKFFQQETIDSILSSINAQNNDIIFFGAGKAGIVNLSMSSLIKKLGEDLGLMNSSWAPCWIVDFPMFERNKENNLTSLHHPFTLPAVTIDELKNDPDNALACAYDFVLNGYELGGGSLRVYEPSMQKEIFSILGISSNEAKEKFGFLLSGLSSGCPPHGGIAFGLDRIVMLLSDTTNIRDVIAFPKTQSASCLLTDAPGIVSDDQLDELNIKSTFEREQ

SEQ ID NO: 185952 - protein, 401 aa, Unknown
  Bacterial polypetide isolated from the Sargasso Sea
MEHRTHTCGQLTSKEKDLNVVLNGWVNSIRLHGQIIFIDLRDRYGKTQLVFDSKTFLGDFENVKKLSLEDVLSIEGIVSLRAESAINEDIITGQIEILVSNILLVNEAKPLPFVISDRNSAEENLRLKYRYLELRTEELQYNLIIRHKAYQAVRSYLSNNDFLEIETPVLMKSTPEGARDYLVPSRIHKGKFYALPQSPQLYKQILMISGFDRYFQIVKCFRDEDLRSDRQPEFTQIDIEMSFVDEDHVMNYMEKLTKHVFKTVKNIELDTPFQKLTWSKAMDSYGSDKPDLRFELELIDFKEYALKSSFKTFFEADAIKAVIVNNADLFTRKKIDNLTDIAKTYGARGLAWFKVGNNELSGGISKFFDEDLSLEMIETLNLSENDILFIVADSHKVACTA

SEQ ID NO: 185953 - protein, 504 aa, Unknown
  Bacterial polypetide isolated from the Sargasso Sea
LIEVKIISAKVLSESKELPLPVFGEQDYPEEIRLKYRFIDLRRNEMHDNIKLRSEILSFLRTKMNKNNFLEFQTPILTASSPEGARDFLVPSRLHPGKFYALPQAPQQFKQMIMISGFDRYFQIAPCFRDEDGRADRSPGEHYQLDIEMSFVEQEDVLKVIEPIFYDLFIKFGNGKKINKIPFPRIKYKDSLERFGTDKPDLRNPIELLNVTDIFKSENVKLKIFKDIIAKGGIVKAIPVSNTSSKPRSFFDGLNNWAISEGASGLAYMTFEKKENKIVGKGPISKFFSEKSILELIKTCKLNETDSVFFVCNKEKEANKFSGVVRQKIAEDMKLIDEKSFKFCWITDYPMYEYDDKEKKIDFSHNPFSMPQVDMKDFDKTDPLKILAYQYDLVCNGYELSSGAIRNHIPEYLFKVFHKVGYSKSMVEKNFSGMIKALSYGAPPHGGMAPGIDRIVMLLANQKNIREVTLFPLNQNAEDLLMEAPSEASEKQLKELNIKTIKKD

SEQ ID NO: 185954 - protein, 588 aa, Unknown
  Bacterial polypetide isolated from the Sargasso Sea
MKSHYCGEITSSNLKEKVTICGWIHRRRDHGGVIFLDVRDIKGICQAVVNPDNKESFQLAESIRNEFVVQIEGVVRNRLEGTINKNMQTGEIEIEVANINILSKANTPVFPIDEYQEVNEDVRLKNRVLDLRRPEMNERIIKRSKITSLIRNYLDKNEFHEIETPILTKATPEGARDYILPSRVQPGSFYALPQSPQLFKQLLMIGGLDKYYQIARCFRDEDLRADRQPEFTQIDIEASFINQEEIMKLSEKMIKDVIKEFCGEKLDKFEVIDWHDAMEEYGCDKPDLRIPLKLKEISDLVMNEEFKVFSDPAKKEGSRVVALKVPNGNTMSRGQIDDYTKFVSKLGAKGLAYIKINDVKDLENGIQSPILKFLNKKTIQNIFKTLEVKTDDLIFFGAGSESVVNLSMSSLIKKLGHDLDLYVSKWAPCWIVNFPMFELNAEGSLTPLHHPFTLPKASKKELLENPNDVLAYAYDVVLNGYEIGGGSLRIYDKNMQEAIFEILNISKKEAESKFGFLLKALSSGCPPHGGIAFGLDRIVMLVTDTTNIRDVIAFPKTQSATCLLTDAPSKVDKDQLDELKIISTHKEE

SEQ ID NO: 185955 - protein, 466 aa, Unknown
  Bacterial polypetide isolated from the Sargasso Sea
YGKTQLIFDENNFPTKFENIKKFSVEDVISIKGTVEHRSDSSINPSMKTGEIEVSITIYTMLNESEPLPFVLSDRNSAEEHFRLKYRYLELRIDELQNNLIIRHDTYQATRKFLSKNNFLEVETPVLMKSTPEGARDYLVPSRLHNGKFYALPQSPQIYKQILMISGYDRYFQIVKCFRDEDLRADRQPEFTQIDIEMSFVDEDDVFLNMENLTRDIFSSVRGIKLPSTFPRITYKEAMETYGSDKPDIRYEMKLVDLISYTDRSDFNAFNSVESVYGIIVEKGAAYSRKIIDELTEEVKKYNAKGLAWMKYESGKFGGGVSKFFSDSLQKEIVKNLNINDGDILFMVGDKKNIACKALGNLRVLVAQREGLTNKDEYKPIWVTEFPMFDYDEDNDRYIAMHHPFTAPRESDIDKLDSDPGNALSRGYDLTMNGHEIAGGSIRIHSPAIQEKVFSLLGLSHEQAVE

SEQ ID NO: 185956 - protein, 455 aa, Unknown
  Bacterial polypetide isolated from the Sargasso Sea
KLRHDTLRALRRVLEDEYGFLEVETPTLTRSTPEGARDYLVPSRLQPGGAYALPQSPQLFKQMLMVAGVDRYYQVARCFRDEDLRADRQPEFTQLDIEMAFTDEEGIMKLAEDLMRAAFKSGVDVDLPSSFPKMTYAEAMEKYGSDKPDLRYGLEMATLDAALEGCEFKIFSTALAAAGGTVKALVVNDDGKIPNSKLKPKGDVFNEAVAAGAGGLAFARVAADGVSLEGAKGLVEATAAHAAAMIAAAGAKPGELLLFAAGHKALVNKTLDRVRQFVAKTYGFVPENSHAVTWITEFPMFEYNEDESRFEAMHHPFTAPNQDDVRADPDDLTNARAIAYDLVYNGVEIGGGSLRIYRRDTQEKVFDAIGLSADEAENKFGYLMEAFQYGAPPHGGLAFGLDRLVMMLAGAKSIRDVIAFPKTAAGQCLLTRAPGAVSDEQYADLHVASVAPPRE

SEQ ID NO: 185957 - protein, 351 aa, Unknown
  Bacterial polypetide isolated from the Sargasso Sea
MSFVEQEDVFKSIEPVLFEIFDENKSFNREHDAKVNSYPFPRIPYHESLSKYGTDKPDLRNPLLIKDYTKVFDNSGFKIFAEKINSGCIVKGIVIKKTEDKPRSFFDKLNNWARDEGSAGLGYISLINGEYKGPIAKNLSNDKLVKLELNDGDSIFFICDNLKEAELFSGKVRDKLCLEMNLLDKNSFQFCWIVDFPMYELDEKTNKIQFSHNPFSMPQGELESLETKNPLDIKAFQYDIVCNGVELSSGAIRNHKPEIMYKAFEIAGYKKEEVEKKFSGMLNALKFGAPPHGGSAPGIDRIVMLLADEPNIREVIAFPMNQQAMDLMMEAPAEINKERLEELGLKLIEKN

SEQ ID NO: 185958 - protein, 414 aa, Unknown
  Bacterial polypetide isolated from the Sargasso Sea
MTIYRTHNCNELNLTHKGNQITLSGWINKKRDHGNLLFLDLRDNYGLTQCVIDKSNPIFKKIEKLPLETVIKIEGNVVERTKDTINKSISTGDIEVLIKAFEILGSTKELPMPIFSDQEYSEEIRLKYRFLDLRRKKIHQNIILRSKIISFIRSEMEKLGFLEFQTPILTSSSPEGARDFLVPSRLNPGKFYALPQAPQQFKQLIMVSGFDRYFQIAPCFRDEDARSDRSPGEFYQLDVEMSFVKQEDVFEVFEKLFLKVFTKFSNKKILQNKFPKITYSESMLKYGTDKPDLRNPLIISDITEIFQRDDVKFEIFKKLVKSGSLARCLITKNTKDKSRSFFDKIDNWAKEQGSSGLAYFTIEKNEKFIGKGPVGKFFSEESIKEIMKLTNAEVGDTVFLSCGKKNEIEKILNM

SEQ ID NO: 185959 - protein, 220 aa, Unknown
  Bacterial polypetide isolated from the Sargasso Sea
IKIIEDSIIESLVSSLEVQEGDIIFFGAGKRNIVNDSLAALRDLIAKDLDLLTCEWAPCWVVDFPMFEKNKSGDLTPLHHPFTAPKCTADELKNNPLGALTEAYDIVLNGTELGGGSVRIHDRLMQETVLKLLSINEKEAEEKFGFLIAALQHGCPPHAGLAIGFDRMIMLMTGSDSIRDVIAFPKTQTASCLLTEAPGQAAQEQLEELHIRFHGLEKED

SEQ ID NO: 185960 - protein, 202 aa, Unknown
  Bacterial polypetide isolated from the Sargasso Sea
MTIRTHNCGELNNNHIDKTVQLSGWVNSIRTHGQIIFIDIRDRFGKTQVILSSDELIEIGKTLSNEDVIHVSGKVTAREKDLINPDLSTGEIEVLVEKIDLLSTAEPMPLSIQNREASSEEHRLKYRYLELRNSSLQSNLIIRHKTAQVVRNFLSENNFLEIETPVLMKSTPEGARDYLVPSRVHNGQFYALPQSPQMYKQL

SEQ ID NO: 185961 - protein, 336 aa, Unknown
  Bacterial polypetide isolated from the Sargasso Sea
MRSLYCGDINSSDVGSDVEISGWVHKRRDHGGVIFLDIRDLRGIVQTVFNPSLKKVFEMADSCRSEYVVNIKGKVRKRIDGAVNPKMLTGEVEIEASDLSIFSSAVTPQFPLDDYQDVNEDIRLKHRFLDLRRPDVNQRLVQRSKITSEIRSILEKNNFYEIETPILTKATPEGARDYLVPSRVHPGEFFALPQSPQLFKQLLMIGGLDKYYQIAKCFRDEDLRADRQPEFTQVDIEASFVSTEEIIEIGEDLVISLLSKFTDYKKTSVPRISYAESIEKYGCDKPDLRIPLQLKDIAELVKDEEFKVFSGPANDPASRVVALKVPEAATMTRKKI

SEQ ID NO: 185962 - protein, 464 aa, Unknown
  Bacterial polypetide isolated from the Sargasso Sea
YLDLRREVMQQNMTLRSDVVASIRKRMWDLNFREYQTPIITASSPEGARDFLVPSRLHPGKFYALPQAPQQFKQLIMVSGFDKYFQIAPCFRDEDPRADRSPTDFYQLDVEMSFVTQQDVFDTISPVIAGVFEEFGSNRKVDDPAEWPQISYEDSAKWYGTDKPDLRNPIKMQDVSEHFRGSGFAIFANLLEQEGTEIRAIPAPAGGSRKFCDRMNAFAQKEGLPGMGYIFWRDNGDGMEAAGPLAKNIGPERTEALRAQLDLGTGDAAFFLGGKPKNFEKVAGKARDVIGDELNLTDHDRFAFAWIVDFPIYEKDEETGRIDFEHNPFSMPQGGMDALEADPLQVKGFQYDLACNGYELVSGAIRNHRPEIMFKAFEIAGYDEHEVKNRFGGMVNAFQYGAPPHGGCAAGIDRIVMLLADQQNIREVIMFPMNQRAEDLMMEAPSEPLPDQLMELNLRVIPQE

SEQ ID NO: 185963 - protein, 335 aa, Unknown
  Bacterial polypetide isolated from the Sargasso Sea
MNKYRTHTCGELTKLHKEKEISLSGWINKKRDHGNLLFVDLRDNFGITQCVIDKSNEIFKKIEKLSLETVIKVTGIVIERSDETINKNISTGEIEVKIDNIDILGETKELPLPVFSDQEYAEEIRLKYRFLDLRRKKIHQNIILRSKVISFIRNEMQKLGFLEFQTPILTSSSPEGARDFLVPSRLNPGKFYALPQAPQQFKQLIMVSGFDKYFQIAPCFRDEDARADRSPGEFYQLDVEMSFVEQENVFEVIETLFLKLFKSFSNKKILHERFPRITYEDAMLKYGSDKPDLRNPLEISDLTKIFEREDVKFEIFKKLVKNGSIVRALVTKNTK

SEQ ID NO: 185964 - protein, 159 aa, Unknown
  Bacterial polypetide isolated from the Sargasso Sea
LFEYSEAEKRFVSSHHPFTMPNLEDLEAYGQNQPERIRSRAYDITLNGVEIGGGSIRIHRGDIQDQVFKLLKLEADELESKFGFLMKALSYGAPPHGGIALGFDRIMMFLLNTESIRDVIAFPKTQRASCLMTEAPSNVSEDQLEELQLRIRASAAKQN

SEQ ID NO: 185965 - protein, 584 aa, Unknown
  Bacterial polypetide isolated from the Sargasso Sea
MCEDIDHSDIGKQVSVSGWVHRRRDHGGVIFIDLRDVSGILQLVFDPENKELFTTAEKIRSEFVLSVTGIIRERPEGTANDQMKTGAVELLVESGEVLNSSKTPPFHHDEATNEDIRLKYRYLDLRREEMSKNIKIRHEITRSLRDYLNKSAYFEIETPILTKATPEGARDYLVPSRTQQGNFFALPQSPQLFKQLLMMSGFDRYYQIARCFRDEDLRADRQPEFTQLDVEMSFVDQDDVKSEMESMVRELFKSVLDVDLENQFSQITHAEAMDRFGSDSPHLGIEMELTEVSDLMKDVEFKVFAGPANDDDSRVACLVLKDSSDLSRKQIDDYTDFVSNYGAKGLAYIRVNEIEKGIDGLQSPILKFLNDSVINQLIEKLSLENGDTVFFGADKKEIVNASLGALRVKMAEDFDLIKNGWFPLWITDFPMFHWDEKEKRWSSEHHPFTSPVNLDPEELKNNPKDALSKGYDMVLNGHEIGGGSIRIHSEEMQQAVFSILGINEEEADEKFGFFLEALKYGCPPHGGIAFGIDRIVMLMTGSSSIRDVIAFPKTQTASCLLTDAPSLAGKAQLNELGVSVKKKS

SEQ ID NO: 185966 - protein, 278 aa, Unknown
  Bacterial polypetide isolated from the Sargasso Sea
MHNYRTHKCDELRSNNIGEQVRLSGWVHRIRDHGGLLFIDLRDHYGVTQCVVEPGMEAFSVAEKVRSEWVVCLTGTVKARMDETINVDKSISSLPTGDIELFINEIEILSKSEELPLPIFGEPDYPEDIRLKYRFLDLRRETIHNNIVLRSKIIQSIRKRMLDANFNEYQTPILTASSPEGARDFLVPSRMHPGKFYALPQAPQQFKQLIMMAGFDRYFQIAPCFRDEDARADRSPGEFYQLDVEMSFVTQDDVFNAIEPVLLGVFGEFSGSMTVDKV

SEQ ID NO: 185967 - protein, 317 aa, Unknown
  Bacterial polypetide isolated from the Sargasso Sea
TYEDAMLKYGSDKPDLRNPLEISDLTIIFEREDVKFDIFKKLVKNGSLVRALVTKNTKDKPRSFFDSIDRWAKEQGSSGLAYFTLEKDDKINAKGPIGKFFSENALLEIMKLTNANIGDTVFLSCGKKSDVEKILSVARNKIAEDLNLIDNETFSFCWIIDYPMYEIDETTKKIKFSHNPFSMPQGEINKLDLSNPLNIKAYQYDIVCNGIELSSGAIRNHVPELMYKLFEIAGYSKNDVNSKFSGMINALSYGAPPHGGIAPGIDRIVMLLANEKNIREVTMFPMNQNAQDLMMSAPSEISDDQLKELNLTIKKKK

SEQ ID NO: 185968 - protein, 584 aa, Unknown
  Bacterial polypetide isolated from the Sargasso Sea
MRTHYCGEVKKTEVGQEVEVCGWVHRRRDHGGVIFLDVRDRSGIVQVVYDPDTEDSFATADRVRNEFVLRAKGLVRDRPDGTVNPEMATGEVEILGSQLEILNAALTPPFQLDEYSEAGEDVRLKYRYMDLRRPEMQEKLKVRAQITSAIRSVLEEENFLEVETPTLSKSTPEGARDYLVPSRTYPGQFFALPQSPQIYKQLLMMSGLDRYYQVARCYRDEDLRADRQPEFTQIDIEASFITAHDVMALTETMLKKVFQRVLNVELEDFPVLSWEEAMRDYGSDRPDLRNPLKLKDVADLMREVDFKVFSGPANDQDSRVVALLAPGGGKLSRKVIDDYTKFVGVYGAKGLAYIKVNKKSDGIEGLQSPILKFIPEKTVESLLERVGASDGDIVFFGADKTKTVNDAMGALRQKLAEDLEIIDLGFAPCWVVDFPMFSSSREGLAAEHHPFTRPTSSVEDLLADPISAKAEAYDVILNGYELGGGSLRIHDQEIQQAVFKLLGMDENEVQSKFGFLLDALKFGCPPHGGIALGLDRIVMLMTDSPSIRDVIAFPKTQSASCLMMAAPGEVDEKQLKELSIRLRS

SEQ ID NO: 185969 - protein, 165 aa, Unknown
  Bacterial polypetide isolated from the Sargasso Sea
MFFSFCWVVDYPMFEIDENTKKIEFSHNPFSMPQGDTDNLDLSEPLKLKAFQYDIVCNGIELSSGAIRNHKPDLMYKLFEIAGYSKEEVDEKFSGMINALSYGAPPHGGIAPGIDRIVMLLAEEKNIREVTMFPMNQNAQDLMMNAPSEVDENQLKELYISKRKK

SEQ ID NO: 185970 - protein, 437 aa, Unknown
  Bacterial polypetide isolated from the Sargasso Sea
MSKYRTHTCGELTLNNKDQTIKLSGWINKKRDHGNLLFLDLRDHYGLTQCVIDEGKKIFKEIEKLPLETVLQVEGKVLAREKDTINKNLNTGEIEVGIEKFKILARTKELPLPVFSDQEYSEEIRLKYRFLDLRRNKIHNNIILRSKIISFIRSEMQKYGFLEYQTPILTSSSPEGARDFLVPSRLNPGKFYALPQAPQQFKQLIMVSGFDKYFQIAPCFRDEDARADRSPGEFYQLDLEMSFVEQEDVFKIVEELFVNLFKKFSSKKLLHEKFPRIPFDRAMLKYGSDKPDLRNPLEIADITEIFKRDDVNFEIFKKLVSKGSIVRGIVAKNTSEKPRSFFDGIDKWAKDEGSSGLAYFSIENSDKLSAKGPVGKFFSDKSLEEIMIKMNAEIGDTIFMSCGNKSEVEKLLSNARSKIANELNLIDENVFFILLGS

SEQ ID NO: 185971 - protein, 296 aa, Unknown
  Bacterial polypetide isolated from the Sargasso Sea
PDTRFEMHLVEVKSHTDQSEFNAFKSSPYVKAVVVKSGAKYSRKNIDDYTDYVKKYKAKGLAWMKMESDELVGGISKFFDNAIQKDLIQSANIEDGDIIFLIGDEKEVVLTALGALRVLIGKEEGLCDPTKFNPVWITDFPMFEFDSDSNRYVARHHPFTAPSSSDIKDLDSDPSSLKSRGYDLTMNGYEIAGGSIRNHQPDFQSKIFELLGMDKKEINSRFGFLVDALKYGTPPHGGIAFGFDRLIMILSGSSNIRDVIAFPKTTSASSLMDESPSSVSTEQLFDLNINIIDKKK

SEQ ID NO: 185972 - protein, 187 aa, Unknown
  Bacterial polypetide isolated from the Sargasso Sea
DAMGALRLKLGKDLNITDEAKWAPLWVIDFPMFEDDGEGGLTAMHHPFTAPKDMTAAELKAAPEDAVANAYDMVINGYEVGGGSVRIHNGDMQQTVFGILGINEQEQREKFGFLLDALKYGTPPHAGLAFGLDRLTMLLTGTDNIRDVIAFPKTTAAACLMTEAPSFANEAALAELSIQVVKKAENN

SEQ ID NO: 185973 - protein, 591 aa, Unknown
  Bacterial polypetide isolated from the Sargasso Sea
MRSHYCGDVNKSHVGQEVTLVGWVNRSRDLGGVVFLDLRDREGLVQVVYDPDLPEVFNVASTLRAEFCVQVKGVVRARPDSQVNAQMKTGEIEVLGKALTIINSSEPLPLSLDNYQNNSEEQRLKYRYLDLRRPEMAQRLMFRAKVTSAVRRFLDSNGFLDIETPILTKATPEGARDYLVPSRTYKGQFFALPQSPQLFKQLLMMSGFDRYYQIVKCFRDEDLRADRQPEFTQIDIETSFMSSEQVMAKTEEMMRGLFLEMLNVDLGEFPRMTYNEAMRRFGSDKPDLRNPLELVDVADLLKEVEFAVFSGPANDEEGRVAALRIPGGASLSRKQIDDYTKFVGIYGAKGLAWMKLNDLTQGLEGIQSPVLKFLNENIVNEIISRTGAQTGDIILFGADQATVVAESMGALRLKAGEDFNLLEGQWRPLWVVDFPMFEKINGSFHAVHHPFTAPRGVTPLELEANPANRVSDAYDMVLNGCELGGGSVRIHNQEMQSAVFRILGITDEEAKEKFGFLLEALRYGTPPHAGLAFGLDRIIMLMTGASSIRDVMAFPKTTTAACPLTNAPGFANPQQLAELGISVVKAAKTED

SEQ ID NO: 185974 - protein, 556 aa, Unknown
  Bacterial polypetide isolated from the Sargasso Sea
MKRTHKCNQVTEDLIGQEISVTGWIHRRRDHGGVIFFDLRDEDGLVQVVYNPESENTFSLAETCRNKYVILSKGLVRERPEGTENSNLVTGKVEIVASELEVLNSSLPIPFQLDEYTSVGEETRLKYRFLDLRRPEMQQNLRLRSKVSSVFRSFLDNQDFVEIETPLLTKATPEGARDYLVPSRTFPGQFFALPQSPQLFKQTLMASGFEKYFQFAKCFRDEDLRADRQPEFTQLDIELSFADSEEVITLITEMIKQVFKETLSVDLGDFPKIPYQEAISKYGIDKPDLRNPLELIEVKDLFLDCDFKVFNEPANDSNSRIAALRVPNGKLLTRKQIDDYTDFVGNYGAKGLAYIRVEDPSKGKEGLQSPIIKFIEDSIIDSLLKVLDVKEGDIIFFGAGKNNVVNDSLAALRDLVAKDLDLLTCEWAPCWVVDFPMFEKNKSGELTPLHHPFTAPSCSIEELKKDPLSALTEAYDVVLNGTELGGGSVRIHDKEMQKAVLELLNIEDQEAEEKFGFLISALQHGCPPHAGLAIGFDRMIMLMTDSESIRDVIAFP

SEQ ID NO: 185975 - protein, 236 aa, Unknown
  Bacterial polypetide isolated from the Sargasso Sea
SKLDIKDVKSPIAKFLSAEHVIEIFSIFGASESDIIFISAGENDKVNECLGSLRNKLAKDLELIDENKINFLFVTNFPLFEFDKESGQWLAMHHVFSSPTKETEEFMDSDPSKVIGNLFDLVCNGVELGSGSIRIHNRKTQEKVFSIIGYSKSEVEDRFGPLLESFEYGAPPHGGMGLGIDRLVALFSNEESIRDVISFPKTQSASDLLWGAPSLIEEKQKKELNIKSINQEKDKN

SEQ ID NO: 185976 - protein, 395 aa, Unknown
  Bacterial polypetide isolated from the Sargasso Sea
MPQSPQLFKQMLMISGFDRYYQIARCFRDEDLRADRQPEFSQIDIEASFVEENDVMKISEGMVKHAFKEVLNFEIKEIPKINWSDAMEHYGSDKPDLRNPLRLVEIGEIFKEEEFKVFSDPANDPESRIAALVIENGDSVGRGQVDRYTDFVKEFGAKGLAYIRVEEADISGLNSPILKYLSEKCLKSILKDLNLKKGSLVFFGAGDKKTVNDYMSKLISRVGDDLNLLEDGYKFCWVTDFPMFEKSADGNLTSLHHPFTSPEEEDPKKLAKIDPLDMNSRAYDMVVNGIEIGGGSIRIHRNEVQEQIFSILGLTEDEANEKFGFFIRALKTGCPPHGGIAFGLDRLAMIMTGSDSIRDVIAFPKTQSALCLLTEAPGSVPDESLEELKIERKED

SEQ ID NO: 185977 - protein, 532 aa, Unknown
  Bacterial polypetide isolated from the Sargasso Sea
MRTHYCGELNSGHIDQEIELCGWVHRRRDHGGVIFLDLRDREGLSQIVFNPDHPEPFAIADSVRNEFVIKIAGKVRVRPEGSVNPDLPTGEIEVVGHKIEILNKSKTPPIQMDDEDVHEDIKLRYRYIDLRRPLMQKNLQLRSKIVKEMRAFLDNKGFLDIETPMLTKATPEGARDYLVPSRTQPGNFFALPQSPQLFKQLLMVSGMDRYYQIVRCFRDEDLRADRQPEFTQLDIETSFLNEDDITNIMEEMISLLFKNILNIELPSPFPCLSYKNAMDRFGSDRPDLRNPLELIDVGDLMKEVDFKVFSGPANMEDGRVAALNVPSGSSLTRKEIDDYTAFVSQYGAKGLAYIKVNDIESGLEGLQSPILKFLPDEVVSKIIERTKSANGDLIFFGADKTKIVNDSLGSLRNKLGHDLKLIKNEWAPVWVKDFPMFEYNEDEKRWESLHHPFTSPEVEDIESIKKDPKNTISRAYDLVMNGFELGGGSIRIHNAKMQKAVLELLGISSDEANEKFGFLLDALEYGCPPHGG

SEQ ID NO: 185978 - protein, 514 aa, Unknown
  Bacterial polypetide isolated from the Sargasso Sea
MRSEYCGLVTEELLGQSVSLCGWVSRRRDHGGVIFIDLRDREGLVQVVCDPDRAEMFKTAEGVRNEFCLQIKGVVRARPEGTTNASLKSGKIEVLCHELIVLNPSITPPFQLDDDNLSETTRLTHRVLDLRRPQMQHNLRLRYRVAIEVRKYLDSLGFIDIETPMLTKSTPEGARDYLVPSRTNPGQFFALPQSPQLFKQLLMVANFDRYYQIVKCFRDEDLRADRQPEFTQIDCETSFLSEQEIRDLFEAMIRHVFKETIGVELDEKFPVMEYSEAMRRFGSDKPDLRVKLEFTDLTDAVKDVDFKVFSTPANTKDGRVAAIRVPKGGELSRGDIDSYTEFVRIYGAKGLAWIKVNEVAKGRDGLQSPIVKNLHDEAVKAIIERTGAQDGDIIFFAADRAKVVNDSLGALRLKIGHSEFGKANGLVESGWKPLWVIDFPMFEYDEEDNRYVAAHHPFTSPKDEHLEYLETDPARCLAKAYDMVLNGWEIGGGSVRIHREEVQSKVFRALKIGA

SEQ ID NO: 185979 - protein, 586 aa, Unknown
  Bacterial polypetide isolated from the Sargasso Sea
MNRTYCGSVDNKAINNNLVVNGWVNTRRDHGGVIFIDLRDHTGILQVVFNPDNKKVFEQAQNLRTEYVLEIKGNIKKRLDGTVNKEMLTGEVELIADELVILNTSKTPPFKINDKQTNEDLRLQYRYIDLRGSKMQDTLRFRSKLYNIIRNHLSENEFNEIETPILTKPTPEGARDYIVPSRVHKSNFFALPQSPQLFKQMLMISGLDKYFQIAKCFRDEDLRADRQPEFTQLDIECSFYNEEQVMELSESLMNKIFSSLIQENIKLDYPRMTYKESMNKYGCDKPDLRNPLILNDITTIFTNTEFKVFKDCSNDSKKRIVALNVPGGSQMSRKNIDEYTELVKTFGAKGLAYFKIDNIDDIESGVNSPIKKFLNINEIQNILQIVKPKSGDLIFFSADTLDIVNSSMSTLISRIGKDLDLVSNDFKFLWIIDYPMFEYEKNSNQLTSLHHPFTSPSDDGAPNFSDKTLSRAYDLTLNGNEIGGGSVRIHKKSLQMDVFKALNLTNEDIDNKFGFFLEALEYGCPPHAGIAFGLDRIVMILKNLTSIRDTIAFPKTQSSACLLTDAPTEIDSDQLRELSIKINKPK

SEQ ID NO: 185980 - protein, 504 aa, Unknown
  Bacterial polypetide isolated from the Sargasso Sea
INKNLQTGEIEIKIQDYKILSKSEILPLPVNSDIEYGEEIRLKYRFLDLRRNKLHKNIILRSKIISDIRKKMIDRNFVEFQTPILTSSSPEGARDYLVPSRIHQGKFYALPQAPQQFKQLLMIAGFDKYFQIAPCFRDEDSRADRSPGEFYQLDFEMSFVTQEDVFDAIEPVLFEIFDENKKNNEIKVSPYPFRRIPYKESMEFYGSDKPDLRNPLVIDDYTNVFKGSNFKIFSNQIEKGSVVKGIIVKNTGDQPRSFFDKLNNWAREEGAAGLGYISFTENSFKGPIAKNLNEDQLLLLKLEENDSIFFICDKLKDAQLFSGKVREKICNDLNLLNKNSFEFCWIVDFPMYEIDEKTNKIQFSHNPFSMPQGEMEALEKKDPLDIKAFQYDIVCNGVELSSGAIRNHKPEIMYKAFDIAGYSRKDLEEKFSGMLNALKFGAPPHGGSAPGIDRIVMLLADEPNIREVIAFPMNQQAMDLMMDAPASIDKERLEELGIKLIDKN

SEQ ID NO: 185981 - protein, 340 aa, Unknown
  Bacterial polypetide isolated from the Sargasso Sea
MRTKYCGNVTKEHLGKDVSICGWVHRRRDHGGVIFLDVRDLEGICQAVIDPSNEEAFSLADKCRSEFVIQIKGSVRERPEGTVNSKMKTGEIEIEVSGLEILNSAATPAFPLDDYQDVNEDVRLKNRIIDLRRPEMNNRILKRSKIVSAIRNFLEGRSFNEIETPILTRATPEGARDYILPSRVHPGSFYALPQSPQLFKQMLMMGGMDRYYQVARCFRDEDLRADRQPEFTQIDIEASFVEEKDIIELGTSLLKLLLKDFANYNIDNIDELDYEDAINKYGSDKPDLRIPLELIDISDEAKKEEFKVFSDPAKNDGSRVVALKVDGGNKLTRSQIDEYT

SEQ ID NO: 185982 - protein, 366 aa, Unknown
  Bacterial polypetide isolated from the Sargasso Sea
MRTEYCGNVTKEHLGKDVSICGWVHRRRDHGGVIFLDIRDLEGICQAVIDPSNEEAFSLADKCRSEFVIKIKGSVRERPEGTVNSKMKTGEIEIEVSELEVLNSAATPAFPLDDYQDVNEDVRLKNRILDLRRPEMNNRILKRSKIVSTIRNFLEGRSFNEIETPILTRATPEGARDYILPSRVHPGSFYALPQSPQLFKQMLMMGGMDRYYQVARCFRDEDLRADRQPEFTQIDIEASFVEEKDIIELGSSLLKLLLKDFANHNIDNIDELDYADAINKYGSDKPDLRIPLELIEISDEAKKEEFKVFSDPAKNDGSRVVALKVDGGNKLTRSQIDEYTNFVGKLGAKGLAYIKINDTSDIEDDS

SEQ ID NO: 185983 - protein, 588 aa, Unknown
  Bacterial polypetide isolated from the Sargasso Sea
MKSHYCGEITSSNLKEEVTICGWIHRRRDHGGVIFLDVRDIKGICQAVVNPDNEKSFKLAESIRNEYVVQIKGGVRKRLEGTINKNMHTGEIEIEVKDLIILSKASTPVFPIDEYQEVNEDVRLKNRVLDLRRPEMNERIITRSKITSLIRNYLDKNDFHEIETPILTKATPEGARDYILPSRVQPGSFYALPQSPQLFKQLLMIGGLDKYYQIARCFRDEDLRADRQPEFTQIDIEASFIDQDEIMKISEKMIKDIIKEFCGDKLEKFEVINWHDAMRDYGCDKPDLRIPLKLVDISEIVKDEEFKVFSEPAKKKGSRVVALKVPNGNSLSRGQIDDYTKFVSKLGAKGLAYIKINDVSDLENGIQSPILKFLKPETVANIIKSLEIKTDDLIFFGAGIESVVNLSMSSLIKKLGEDLDLYLTKWAPCWIVDFPMFETNKEGDLTPLHHPFTLPKCSTKDLEDNPKDSIAHAYDVVLNGYEIGGGSLRIYDNAMQKIIFNVLNISKEDAESKFGFLLKALSSGCPPHGGIAFGLDRIVMLVTDTTNIRDVIAFPKTQSAACLLTDAPSKVEKDQLDELKIISTHKEE

SEQ ID NO: 185984 - protein, 335 aa, Unknown
  Bacterial polypetide isolated from the Sargasso Sea
MSKRKYCGDLSESHIGEIITLYGWVNKVRDHGGVIFVDLRDTKGVTQVVFNPEEKEIFNISERLRNEFIIKISGKVRARPQDAENKNLSSGSVEIVATEIEILSEAQTPPYSFDDDVSEDVRLKHRFHDLKSKKMQKNIIFRSELIKVIRDFLYDKGFIDIETPILTKATPEGARDFLVPSRLNKGDFYALPQSPQLFKQLLMMSGFERYYQIAKCFRDEDLRADRQPEFTQLDIEQSFESSESLINYVEEMFQIIFKKLKNVEVKVPFKKLTYQECIDQYGTDAPDLRILLQLNKVDHIFEKTEFEIFRKPANDKNCKVSALVVPGKDISRKEY

SEQ ID NO: 185985 - protein, 598 aa, Unknown
  Bacterial polypetide isolated from the Sargasso Sea
MRTEYCGLVTEHLLGQTVSLCGWVQRRRDHGGVIFIDLRDREGLVQVVCDPDRAEMFATAEGVRNEFCVQIKGLVRNRPEGTVNAGLKSGKIEVLCHELNVLNASVTPPFQLDDDNLSETTRLTHRVLDLRRPQMQHNLRLRYRVAIEARKYLDEQGFIDIETPMLTKSTPEGARDYLVPSRVNAGQFFALPQSPQLFKQLLMVANFDRYYQITKCFRDEDLRADRQPEFTQIDCETSFLGEQEIRDLFEDMIRHIFKTTIDVELDAKFPVMPYSEAMARFGSDKPDLRVQLEFTELTDAMKDVDFKVFSTPANAKDGRVAALRVPKGGELSRGDIDGYTEFVRIYGAKGLAWIKVNEKAKGRDGLQSPIVKNLHDASIAAILERTGAEDGDIIFFAADRAKVVNDSLGALRLKIGHSEFGKANGLVQAGWKPLWVVDFPMFEYDDEDARYVAAHHPFTSPKDEHLEYLETDPGRCLAKAYDMVLNGWEIGGGSVRIHREEVQSKVFRALKIGAEEAQLKFGFLLDALQYGAPPHGGIAFGLDRIVTMMAGADSIRDVIAFPKTQRAQDLLTQAPSPVDERQLRELHIRLRQPEQPKA

SEQ ID NO: 185986 - protein, 338 aa, Unknown
  Bacterial polypetide isolated from the Sargasso Sea
MVNTFKNFSDNKLMYDIFPKIPYSESMLKYGSDKPDLRNPLIINDITEIFSREDVSFDIFKKLVRTGSRVRSITTKNTKDKPRSFFDNIDKWAKEQGASGLAYFTFEKNNKISAKGPVGKFFSEDALLEIMKITKSELGDSIFLACGKQNELEKITALARDKIAKDLELIDDDTFAFCWIVDYPMFEKDELTNKIKFSHNPFSMPQGELKDKDFENPLDILAYQYDIVCNGIELSSGAIRNHKPDLMYKLFSIAGYNKAEVDEKFSGMINALRYGAPPHGGIAPGIDRIVMLLANEKNIREVTMFPMNQNAQDLMMNAPSEINQDQLKELNLSIKTKN

SEQ ID NO: 185987 - protein, 231 aa, Unknown
  Bacterial polypetide isolated from the Sargasso Sea
MNKYRTHKCNELRKSDVDKSVSLSGWINKKRDHGNLLFIDLRDNYGITQCIIDKENKNFSELEKIQLETVIKVNGKVVNRSHETKNKDIETGEIEVVISEYETLGTCKELPLPVFSDQEYAEEIRLKYRFLDLRRKKIHENIILRSKVISYIRNEMTKLGFLEFQTPILTSSSPEGARDFLVPSRLNPGKFYALPQAPQQFKQLIMVSGFDKYFQIAPCFRDEDARADRSP

SEQ ID NO: 185988 - protein, 187 aa, Unknown
  Bacterial polypetide isolated from the Sargasso Sea
MNIRTHTCGELQSKDSGKSVVLNGWVNTVRLHGQVVFVDLRDRYGKTQIVFNSDDYNGDFEQVKKLSMEDVLSISGDVRDRDKSSVNSDMHTGEVEVYVTTMEILNYADPLPFVISDRNSAEEDLRLKYRYLELRTEELQENIKMRHNTYQAVRNYLSKNNFIEVETPVLMKSTPEGARDYLVPSRI

SEQ ID NO: 185989 - protein, 174 aa, Unknown
  Bacterial polypetide isolated from the Sargasso Sea
MIKKYRTHLCEDIDHSDIGKKVSVSGWVHRRRDHGGVIFIDLRDVSGILQLVFDPENKELFNTAEKIRSEFVLSVSGIIRERPEGTINDQMKTGAVELLVESGEVLNSSKTPPFHHDEATNEDIRLKYRYLDLRREEMSKNIKIRHEITRSLRDHLNRAAYFEIETPILTKATP

SEQ ID NO: 185990 - protein, 313 aa, Unknown
  Bacterial polypetide isolated from the Sargasso Sea
SYAESIQKYGTDKPDLRVEIELDDITEVFVDSGFKIFADQISKNEKIKVWAIPSKTGGSRAFCDKMNKWAIEEGQPGLGYIFFKDGKGSGPIAKNIGDEKTELIKNKFSLDDGDSIFFVCGIPNNFLDFISRARVKIGNELELIKKDSFEFCWIVDFPMFEYNEELKKIDFSHNPFSMPQGGLESLENIDPLKIKAFQYDIVCNGVELSSGAIRNHRQDILLKAFEIAGYNIDEIKKRFGAMYDAFGYGAPPHGGIAPGIDRIVMLIAGVENIREVIAFPMNQQAQDLMMNAPSEISSDQLKEIGIKIVEKKE

SEQ ID NO: 185991 - protein, 515 aa, Unknown
  Bacterial polypetide isolated from the Sargasso Sea
MNRRTHTCGELTSGNLGEKVCLNGWVNAVRFHGQIVFVDLRDRYGKIQIVYNQDNFNGDFELVKKLSMEDVLSVKGVVQERDQNSHNSNISTGEIEVIISEHEILNEADPLPFIITDRNSAEENLRLKFRFLELRTNELQENIKVRHNTYQAVRTFLSDNNFFEVETPVLMKSTPEGARDYLVPSRIHNGKFYALPQSPQMYKQLLMISGFDRYFQIVKCFRDEDLRADRQPEFTQIDIEMSFVDENDIMKKCEELTRYIFNKVQNIDLIKPFPKMTYNDAMSKYGTDCPDLRYDLLLNDFKPFSEKSEFKAFHSVESVMCIVVPGGAKYSRKDIDHYTEHVQRYKAKGLAWMKFSDGVLTGGISKFFSDDLHSKITKKLNMDNGDIIFIIGDDIKTTQLSLGALRIAIAKKEEYVKSNDFKPVWITDFPMFEYNKEEKRYHSLQHPFTQPKTNDLEKLKSSPESIPSKQYDLIINGYEVAGGSVRIHNSDMQKVIFDILGIDRKEANERFGFFI

SEQ ID NO: 185992 - protein, 320 aa, Unknown
  Bacterial polypetide isolated from the Sargasso Sea
MRSNYCGELSKKHIDNIVTVCGWVHRRRDHGGVIFLDVRDKTGIVQVVVNPENKKPFSLAEKIRSEFVLKISGKVNERPEDAENEDLTTGVIEIIADEIIVLNEAETPAFPLDQSAEVSEEVRLKNRTLDLRRPEMQKNLETKSKISQIVRKELEKKDFIDIETPILTKATPEGARDYLVPSRTNRGSFFALPQSPQLFKQMLMISGFEKYYQIARCFRDEDLRADRQPEFSQLDIESSFVEEKDIMNLTNDLMRKVFKEIAKEDLKNIEVITWEKSMEEFGSDKPDLRNPLRLIEVKKLFEKEEFKVFSEPANDNESRI

SEQ ID NO: 185993 - protein, 223 aa, Unknown
  Bacterial polypetide isolated from the Sargasso Sea
GPIGKFFSKKSLEDLMNKTNAEVGDSIFMACDKENELVKIIAQARDKIAKDLNLIDENVFAFCWIVDYPMFERDEVINNIKFSHNPFSMPQGNLTDKDLKNPLDILAYQYDIVCNGVELSSGAIRNHKPELMYKLFSIAGYEKSQVDEKFSGMINALSYGAPPHGGIAPGIDRIVMLLANEKNIREVTMFPMNQNAQDLMMKAPSVVTEDQLKELSLNLKLKK

SEQ ID NO: 185994 - protein, 347 aa, Unknown
  Bacterial polypetide isolated from the Sargasso Sea
YAIEPILYSVFKKFSKFDVSEMPFKKITYKDSMEQYGTDKPDLRNPITICNLSNEFVEEDVEFSAFKKIINEGGEVLGIPAPNTHNQPRSFYDNLNSWAKKDLNAAGLGYIIFEENDGKLRGKGPIAKFIPEAIQDRIAIKAKLKSGDSIFFACAKGKMVYDIAAAARNKIGDELGLIEKNKFKFCWIVDFPMYEKNPETGKIDFSHNPFSMPQGGLESLNEMDPLDILGYQYDIVCNGIELSSGAIRNHIPEIMFKAFEIAGYNKQQVNEKFGGMINAFTFGVPPHGGIAPGIDRIVMLLAQEKNIREVILFPMNQQAQDLMMLAPAEVDEEALNELSLKYIPTED

SEQ ID NO: 185995 - protein, 302 aa, Unknown
  Bacterial polypetide isolated from the Sargasso Sea
AKELPMLVFGEQDYPEDIRLKYRFLDLRRDEMHHNIILRSKVISFIREEMLKIGFLEFQTPILTSSSPEGARDFLVPSRLNPGKFYALPQAPQQFKQLIMVSGFDKYFQIAPCFRDEDARADRSPGEFYQLDLEMSFVEQEDVFQVVERLLTNVFKKFSNKNIKPTKFPRIPYKEAMQKYGTDKPDLRNPLIIHDVTEIFSRDDVKFDIFKKLVKSGSFVKAILTKNTKDKPRSFFDNIDKWAKEQGASGLAYFTFEKDEKITAKGPVGKFFSENSLKEIMKICNASIGDSLFLSCGNGKRT

SEQ ID NO: 185996 - protein, 357 aa, Unknown
  Bacterial polypetide isolated from the Sargasso Sea
QLDLEMSFVEQEDVFKVVEQLLVNTFKKFSKKKIITEKFPRITYKDALLKYGSDKPDLRNPLIVYDITETFTREDVSFEIFKKLVSSGSNVRCIVTHNTKDKPRSFFDNIDKWAKDEGASGLAYFTIENEISAKGPVGKFFSKESLEEIMKKTGAKVGDSIFLACSKKKDLERITSLARDKIAKDLNLIDDNVFSFCWIVDYPMFEKNNQTNKIEFSHNPFSMPQGDIQKLNFEKPLDMLAYQYDIVCNGIELSSGAIRNHIPELMYKLFAIAGYDKDQVDEKFSGMINALSYGAPPHGGIAPGIDRIIMLLANEKNIREVTMFPMNQNAQDLMMNAPSSIDEKQLKELNLALKIKK

SEQ ID NO: 185997 - protein, 407 aa, Unknown
  Bacterial polypetide isolated from the Sargasso Sea
PGKFYALPQAPQQFKQLIMVSGFDKYFQIAPCFRDEDARADRSPGEFYQLDLEMSFVDQEDVFEVVEKLMINVFKNFSDKKMINQKFPRITYSDTMLKYGTDKPDLRNPLVIHDLTEVFKRKDVSFEIFKKLVSKGSIVRGIVTKDTKDKPRSFFDGIDKWAKEQGASGLAYFTIEQDTEIKGKGPVGKFFSSASLSEIMKISNAKVGDSIFLACGKTSEVETILSSAREKIANDLKLIDENSFAFCWIVDYPMFEIDEKTNKLIFSHNPFSMPQGDLQKLDLSKPLEIKAYQYDIVCNGIELSSGAIRNHIPDLMYKLFSIAGYDKKVVDEKFSGMINALSYGAPPHGGIAPGIDRIIMLLAGEKNIREVTMFPMNQNAQDLMMNAPSEINLNQLKELNLSIKKNK

SEQ ID NO: 185998 - protein, 268 aa, Unknown
  Bacterial polypetide isolated from the Sargasso Sea
MHQYRTHNCNGLRAEDINQEVRLSGWVHRKRDHGGLLFIDLRDHFGLTQLVFDPDSAAFQEAEKVRNESVITINGKVVQRSDDTINKVLPTGKIEVYVDTLEVIGSSDDIPLPVFGEPDYPEEIRLKYRFLDLRRETLHKNIILRSEIINFIRSKMIEGDFLEIQTPIMTASSPEGARDYLVPSRVHQGKFYALPQAPQQFKQLLMTSGFDKYFQIAPCFRDEDARADRSPGEFYQLDIEMSFVNQEDIFESVEPLLRDVLKNFENRL

SEQ ID NO: 185999 - protein, 198 aa, Unknown
  Bacterial polypetide isolated from the Sargasso Sea
DDDLIFFGAGPSEVVNLSMSSLIKRLGKDLDLYQKDWAPCWITNFPMFESDAGNLKALHHPFTRPKEDLEKFRKDPSGAQAYAYDLVLNGYEIGGGSLRVHDSKMQSAIFDALNISSEEASLKFGFLLDALKTGCPPHGGIALGLDRIVMLLTQTENIRDVIAFPKTQSASCLLTDAPNIVDESQLNELHIKKDLNEE

SEQ ID NO: 186000 - protein, 404 aa, Unknown
  Bacterial polypetide isolated from the Sargasso Sea
MWLDPRRRDHGGIIFIDLRDYTGIVQLVFNPDQRNNFEIADHCRNEFVLRVVGEVSSRSSDTINKNMKTGEIEVCVEEIEVLSKSETPAFPLDNFQDVGEEARLKNRILDLRRPEVNERLISRSKITSFIRSFLEEDGFNEFETPILTKATPEGARDYVVPSRLNNGEFYALPQSPQLFKQMLMIGGLEKYYQIARCFRDEDLRADRQPEFTQIDIEASFVNEEAILDLTTRLVCDLFKEFANCSLQEFETLTYENAIRKFGCDKPDLRIPLFLEDIKSLVKDQEFKVFSDPANDENSRVVALRIPNGAKFTRAKIDEYTNFVAKLGAKGLAYIKINTLDDMQSPILKFIEGECTSAIVKQVNATEGDLIFFGAGTSDVVNLSMSSLIKKIAEDHNLYVKDWAP

SEQ ID NO: 186001 - protein, 557 aa, Unknown
  Bacterial polypetide isolated from the Sargasso Sea
MCEDIGASHIGKQVMVSGWVHRRRDHGGVIFIDLRDVSGILQLVFDPENQDLFATAEKIRSEFVLSVTGIVRERPQGTINDQMKTGEVELLVEKGEVLNTSETPPFHHDEATNEDIRLKYRYLDLRRENMSNNIKVRHEITKSLREYLNEASYFEIETPILTKATPEGARDYLVPSRTQQGNFFALPQSPQLFKQLLMMSGFDRYYQIARCFRDEDLRADRQPEFTQLDVEMSFVDQEDVKSQMESMVKDLFKSVLGIDLEKQFPQITHAEAMDRFGSDSPHLGIDMELIEVSDLMKEVEFKVFSGPANDEDSRVACLVLRDSSEMSRKQIDDYTDFVSNYGAKGLAYIRVNDIEKGIEGLQSPILKFLNDEVINQLIEKLSLSNGDTVFFGADKKDIVNASLGALRVKMAEDFSLIKDGWFPLWVTDFPMFHWDEREKRWSAEHHPFTSPINPDPEELKNNPKDALSQGYDMVLNGHEIGGGSIRIHSEAMQQAVFSILGIGEEEANEKFGFFLEALKYGCPPHGGIAFGIDRIVMLITGSSSIRDVIAFPKTQTA

SEQ ID NO: 186002 - protein, 232 aa, Unknown
  Bacterial polypetide isolated from the Sargasso Sea
MHNYRSHTCADLKIEDVGSNVRLSGWVHRVRDHGGVLFIDLRDHYGVTQVLCDPDSPVFSQVENVRSEWCIRIDGEVKARDPELINTKISTGGIEVFVRDIEVLGASAELPLMVFGDQEYPEETRLRYRYLDLRREVMQENIKLRADVIASIRRKMWDIGFREYQTPIITASSPEGARDFLVPSRLHEGKFYALPQAPQQFKQLIMVSGFDKYFQIAPCFRDEDPRADRSPT

SEQ ID NO: 186003 - protein, 507 aa, Unknown
  Bacterial polypetide isolated from the Sargasso Sea
MHAYRTHNCGELRAANAGIEARLSGWVHRKRDHGNLLFVDLRDHFGLTQCVIEVDSDIFPKIEALRLETVICVTGRIEERGGDMKNPDLPTGEVELRIDTCEVLGTTEQLPLEVNSDRDYGEEVRLRYRFLDLRRDKVHRNVVLRSAVISSIRRRMIDQGFMEFQTPILTSTSPEGARDFLVPSRLHPGQFYALPQAPQQFKQLIMVAGFDKYFQIAPCFRDEDARADRSPGEFYQLDIEMSFVTQDDVFNAIEPVLHGVFEEFADGRSVSPAPFPRITFADAMQKYGSDKPDLRNPIEMSDITDTFRGSGFKIFAGMIEKDENVRVWAIPAPGGGSRAFCDRMNSWAQKEGQPGLGYIFYRDGEGAGPVAKNIGEDRTEALRGQLGLGDGDAVFFVAGVPKNFAYFAGQARTQVGEALKLVDENKFEFCWVVDYPMYELDENTGKIEFSHNPFSMPQGGLEALETRNPLDILAYQYDIVCNGIELSSGAIRNHRPEIMYKAFEIAG

SEQ ID NO: 186004 - protein, 337 aa, Unknown
  Bacterial polypetide isolated from the Sargasso Sea
MSFVNQEYVLNTFEGLVQNLFKVCIGASLEKFDRISYSDAMELYGSDKPDTRFGMQFVNLSEKAKGSGFKIFDSSESIYGFNIENGESFSRKEIDYYTDWVKRPQIGALGLIWIKHNHDGTIKSSIDKFFNEEQLKSMTGSKAGDLTFIISGDKKKTLTQLGSLRIHVAEKLGLRNKNKFNALWVTDFPMFEWDEDSKRYHAMHHPFTSPVENIIGEDPGSTLANAYDLVINGNEIGGGSIRIHDQKLQEEVFSILGFSKKEAFDQFGFLLEAFNYGAPPHGGIAFGLDRLAAVMNGEESIRDYIAFPKNNSGRDVMIDSPSKIDKGQLDDLNIKLK

SEQ ID NO: 186005 - protein, 588 aa, Unknown
  Bacterial polypetide isolated from the Sargasso Sea
MKSHYCGEITSSNLKEKVTICGWIHRRRDHGGVIFLDVRDIKGICQAVVNPDNKESFQLAESIRNEFVVQIEGVVRNRLKGTINKNMQTGEIEIEVANINILSKANTPVFPIDEYQEVNEDVRLKNRVLDLRRPEMNERIVKRSKITSLIRSYLDKNEFHEIETPILTKATPEGARDYILPSRVQPGSFYALPQSPQLFKQLLMIGGLDKYYQIARCFRDEDLRADRQPEFTQIDIEASFINQEEIMKLGEKMIKDVIKEFCGEKLDKFKVIDWHDAMEEYGCDKPDLRIPLKLKEISDLVMNEEFKVFSDPAKKEGSRVVALKVPNGNTMSRGQIDDYTKFVSKLGAKGLAYIKINDIEDLENGIQSPILKFLNKKTIQNIFKTLEAKTDDLIFFGAGSESLVNLSMSSLIKKLGHDLDLYVSKWAPCWIVNFPMFEPNAEGSLTPLHHPFTLPKASKKELIENPNDVLAYAYDVVLNGYEIGGGSLRIYDKNMQEAIFEILNISKKEAESKFGFLLKALSSGCPPHGGIAFGLDRIVMLVTDTSNIRDVIAFPKTQSATCLLTDAPSKVDKDQLDELKIISTHKEE

SEQ ID NO: 186006 - protein, 405 aa, Unknown
  Bacterial polypetide isolated from the Sargasso Sea
MVGSNILLSGWINKKRDHGNLLFLDLRDNYGITQCIVDKENKNFKDLEKLQLETVINVEGKVVDRSADTINKEIETGEIEVTIENFVVLGKCKELPMPVFSDQEYSEEIRLKYRYLDLRRKKIHENIILRSKVISFIRNEMNKFGFLEFQTPILTSSSPEGARDFLVPSRLNPGKFYALPQAPQQFKQLIMVSGFDKYFQIAPCFRDEDARADRSPGEFYQLDLEMSFVEQEDVFKVVEQLLVNTFKKFSKKKIITEKFPRITYRDALLNYGSDKPDLRNPLIIEDITETFTREDISFDIFKKLVKSGSNVRCIVTQNTKDKPRSFFDNIDRWAKDEGASGLAYFTIENGISAKGPVGKFFSKESLEEIMKKTGAKVGDSIFMACSKKKDLERITSLARDKLQKI

SEQ ID NO: 186007 - protein, 369 aa, Unknown
  Bacterial polypetide isolated from the Sargasso Sea
MSDAQKEVVLSGWVQRSRDLGGMTFIDLRDRYGITQLAFNMEANSKLCLEARKLGREYVIKVSGQVIERQSKNSNMQTGDVEVVVKTLQILNSSKTPPFTIEEKTDGGEELRMEYRYLDLRRSPVQNNLFLRNKVALETRKYMDSKGFMDVETPVLIKSTPEGARDFVVPSRMNEGQFYALPQSPQTFKQLLMVSGIDRYYQIVKCFRDEDLRADRQPEFTQIDCEMSFVEQEDILQTFEGMVKHLFSSILNVSFEEPFPRITYQDAMERFGSDKPDMRFAMEFVDISKETQGKGFGVLDNSEIVLSINVHGAASYSRKKIDKLIDWVKRPQIGAKGMIYLKYNDDGTFKSSVDKFYDSEALQKWAEKA

SEQ ID NO: 186008 - protein, 228 aa, Unknown
  Bacterial polypetide isolated from the Sargasso Sea
EQKQELLSRTGAEPATLLLFGAGDTATVNKALDRVRQYLAKELGMVKADRDNDQWNFLWVVDFPMFEFNSDENRYEALHHPFCAPNAQDLGSDASQWADTLPGARAQAYDLVLNGLELGGGSLRIHDSALQRQVLQTVGLPLEEAQEQFGFLMDALDVGAPPHGGLAFGIDRMVMLLAGEESIRDTIAFPKTQQARCLMTNAPGGVADKQLEELHVASTWVDPSDDDA

SEQ ID NO: 186009 - protein, 388 aa, Unknown
  Bacterial polypetide isolated from the Sargasso Sea
VVYDPDVKESFKIAEGVRNEFVVEVKGRVRLRPSGTINHEMSTGRVEVLGNELKVLNASETPPIQLDEHAEVGEDIRLKYRYIDLRRPEMAARLRFRSKVGNIIRNFLDNNGFLDIETPLLTRATPEGARDYLVPSRTHQGRFFALPQSPQLFKQILMASGMDRYYQIAKCFRDEDLRADRQPEFTQIDVETSFMDEDQIMTIMEAMIKHTFKKTLNVDLGDFPRITYAEAMRLYGSDKPDLRIDLKLVDIADLMKSAEFKVFSGPANDEDSRVVALRVPGGARLTRKVIDDFTEFVGVYGARGLAWIKVNDLNSGPEGLQSPIIKFLDQEIIRNLLSTLAVETGDIIFFGADKTKVVNEAMGALRIKVAQELNLVASGWAPVWVVDF

SEQ ID NO: 186010 - protein, 418 aa, Unknown
  Bacterial polypetide isolated from the Sargasso Sea
MRNKTCGELRASAISANVQLCGWVDRRRDHGGVIFIDLRDRSGTIQITVDPDQGQDLFSIAESLRNETVLQINGLVRARPDEAINTKIPTGEVEVLAKNIKILNTVTNTLPFSVSIHDEESVKEEIRLRHRYLDLRRERMNNNLRLRHNTVKAARSFLENEGFIEVETPILTRSTPEGARDYLVPSRVCGGEFFALPQSPQLFKQLLMVGGVERYYQVARCFRDEDLRADRQPEFTQLDIEMSFMEEKEIIELNEKLIVSIWKKIKGIDLQTPFPRMTWQESMDRFGTDRPDTRYGMELVNTSDLFSKSGFKVFSNAISSGGCVKCITIEDGNNLISNVRIKPGGDIFSEAQKAGAGGLAFIRVRDDQEVDTIGAIKDNLTTSQIKELLLKTQAKPGDLILFGAGPTNIVNRTLDRVR

SEQ ID NO: 186011 - protein, 400 aa, Unknown
  Bacterial polypetide isolated from the Sargasso Sea
MKSHYCGEITSSNLKEEITICGWIHRRRDHGGVIFLDIRDIRGICQAVVNPSNKKSFELAESIRNEYVVQIYGVVRKRLEGTVNKNMFTGEIEVEVENINILSKANTPVFPIDEYQEVNEDVRLKNRVLDLRRPEMNERIITRSKITSLVRNYLDKNEFHEIETPILTKATPEGARDYILPSRVQPGSFYALPQSPQLFKQLLMIGGLDKYYQIARCFRDEDLRADRQPEFTQIDIEASFLSQEEIMHISEKMIKKIIKEFCNDSLKKFHIMDWHDAMKDYGCDKPDLRIPLNLVDISNSVKDEEFKVFSEPAKKKNCRVVALKVPNGNSLSRGQIDDYTKFVSKLGAKGLAYIKVNDVNDLENGIQSPILKFLKPLTISNIFKELEVQTDDLIFFGAGS

SEQ ID NO: 186012 - protein, 444 aa, Unknown
  Bacterial polypetide isolated from the Sargasso Sea
SKIVSTIRNFLEGRSFNEIETPILTRATPEGARDYILPSRVHPGSFYALPQSPQLFKQMLMMGGMDRYYQVARCFRDEDLRADRQPEFTQIDIEASFVEEKDIIELGSSLLKLLLKDFANHNIDNIDELDYADAINKYGSDKPDLRIPLELIEISDEAKKEEFKVFSDPAKNDGSRVVALKVDGGNKLTRSQIDEYTNFVGKLGAKGLAYIKINDASDIENGLQSPILKFLSKDFITDLFNKLNPVDDDLIFFGAGPSEVVNLSMSSLIKRLGKDLDLYQKDWAPCWITNFPMFESDAGNLKALHHPFTRPKEDLEKFRKDPSGAQAYAYDLVLNGYEIGGGSLRVHDSKMQSAIFDALNISSEEASLKFGFLLDALKTGCPPHGGIALGLDRIVMLLTQTENIRDVIAFPKTQSASCLLTDAPNIVDESQLNELHIKKDLNEE

SEQ ID NO: 186013 - protein, 397 aa, Unknown
  Bacterial polypetide isolated from the Sargasso Sea
KQMLMTSGFEKYYQIAKCFRDEDLRADRQPEHTQLDFEMSFVHQEDVLSNCEELYYFLSQKYQSKDIMYPFPRITYEESMERYGTDKPDTRFSLELKNLNGILSGTEFRVFNNVLDSKGSIKGISLKNSELIKRSYVDELNNFVIEMGGGGVIPISLENVKDISELKIQNVKSPIAKFLNEEHIKEIYKTFNASKDDIIFISAGETSKVNECLGSLRNKLAKDLGLIDQSKINFLFVTNFPLFEMDKDSGKWIAMHHVFSSPTKETERFLDSDPGKVIGNLFDLVCNGVELGSGSIRIHNRKIQEKVFSIIGYSSSEVEERFGSLLEAFEYGAPPHGGMGLGIDRLIAIFSGEDSIRDVISFPKTQSASDLLWGAPSLIEEDQKIELNLKIIDKEKG

SEQ ID NO: 186014 - protein, 364 aa, Unknown
  Bacterial polypetide isolated from the Sargasso Sea
MRSNGCGDLREQNIDNAVQLCGWVDRRRDHGGVIFIDLRDRSGTVQITVDPDLGADAFAVAEHLRSETVLQVEGKVRARPGESLNDKLATGAVEVLASGITVLNSVKGNLPFPVSVHDEENTREELRLRHRYLDLRRKRMNDNLRLRAQTIQAARRYLEDEGFIEVETPVLTRSTPEGARDYVLPSRVCGGEWFALPQSPQLFKQLLMVGGIERYYQVARCFRDEDLRADRQPEFTQLDIEMSFMDQEEILQLNESLICSIWKAVKGIDLPRPFPRMTWHDAMERYGTDRPDTRYGMELTNVSDIVKDMGFKVFSGAVKSGGAVKCIAVPGGNDAVSNVRIKPGGDVFSEAQKSGAGGLAFHRV

SEQ ID NO: 186015 - protein, 591 aa, Unknown
  Bacterial polypetide isolated from the Sargasso Sea
MRSHYCGDVNKSHVGQEVTLVGWVNRSRDLGGVVFLDLRDREGLVQVVYDPDLPEVFNVASTLRAEFCVQVKGVVRARPDSQVNAQMKTGEIEVLGKELAIINSSEPLPLSLDNYQNNSEEQRLKYRYLDLRRPEMAQRLMFRAKVTSAVRRFLDSNGFLDIETPILTKATPEGARDYLVPSRTYKGQFFALPQSPQLFKQLLMMSGFDRYYQIVKCFRDEDLRADRQPEFTQIDIETSFMTSEQVMAKTEEMMRGLFLEMLNVDLGEFPRMTYNEAMRRFGSDKPDLRNPLELVDVADLLKEVEFAVFSGLANDEEGRVAALRIPGGASLSRKQIDDYTKFVGIYGAKGLAWMKLNDLTQGLEGIQSPVLKFLNEGIVNEIISRTSAQTGDIILFGADNATVVAESMGALRLKAGEDFNLLEGQWRPLWVVDFPMFEKINGSFHAVHHPFTAPRGVTPQELEANPANRVSDAYDMVLNGCELGGGSVRIHNQEMQSAVFRILGITDEEAKEKFGFLLEALRYGTPPHAGLAFGLDRIIMLMTGASSIRDVMAFPKTTTAACPLTNAPGFANPQQLAELGISVVKAAKTED

SEQ ID NO: 186016 - protein, 586 aa, Unknown
  Bacterial polypetide isolated from the Sargasso Sea
MQRSYCGLIDLKSVEQNLVIKGWVNTRRDHGGVIFIDLRDHTGLVQVVFNPEEREIFEAAQAIRSEYVLEVCGIVKKRLDGTDNPEMSTGKIEIVAKDLTILNTSKTTPFKVNDEATNEDLRLQYRYIDLRSTYMQDNLRFRSKLFSTIRNHLNDMEFNEIETPILTKPTPEGARDYIVPSRVHKGSFFALPQSPQLFKQMLMMSGLDKYYQIAKCFRDEDLRADRQPEFTQLDIECSFYNEEDIMHLSESLMQKIFTELIDKDVTLKFPKISYKESMERYGCDKPDLRNPLHLVDISDYLVNTDFKVFKDCVNNSDKRIVALNIPDGSKLTRKNIDDYTDLVKTFGAKGLAYFKVEDSNNTDTGISSPIKKFLSSEEIDAIIKSVQPSSGDLIFFSADTVDIVNSSMSALISKIGSDLNLLKSGFEFAWIIDYPMFEYEKGTKNLTSLHHPFTSPASNDQDFNDQTLSRAYDLTLNGNEIGGGSVRIHEKSEQLKVFQALKLTDSEIESKFGFFLKSLEYGCPPHAGIAFGLDRIVMLLRGLSSIRDTIAFPKTQSSSCLLTEAPTEIDSEQLKELAIKTNKPKT

SEQ ID NO: 186017 - protein, 286 aa, Unknown
  Bacterial polypetide isolated from the Sargasso Sea
SDYTDVFKGSNFKIFSNQIEKNSVVKGIIVNDTANQPRSFFDKLNNWARDEGAAGLGYISFIENDFKGPIAKNLNENQLSMLKLQNNDSIFFICDKLKEAQTFSGIVRDKICNDLGLLKKDSFEFCWIVDFPMFEIDEKTNKIQFSHNPFSMPQGEMEALEKKDPLEIKAFQYDIVCNGVELSSGAIRNHKPEIMYKAFEIAGYSKKILEDKFSGMLNALKFGAPPHGGSAPGIDRIVMLLANEPNIREVIAFPMNQQAMDLMMDAPASIDKERLEELGIKLIDKN

SEQ ID NO: 186018 - protein, 590 aa, Unknown
  Bacterial polypetide isolated from the Sargasso Sea
MHQYRTHNCNDLRSDDIDKEVRLSGWVHRKRDHGGLLFIDLRDHFGLTQLVFDPDSHAFQEAEKVRNESVITINGKVVKRSDDTINESLSTGKVEIYVETLEVIGNSDDIPLPVFGEPDYPEDIRLKYRFLDLRRETLHKNIVLRSDIINFIRNKMIENNFLEIQTPIMTASSPEGARDYLVPSRVHQGKFYALPQAPQQFKQLLMTSGFDKYFQIAPCFRDEDARSDRSPGEFYQLDIEMSFVNQEDVFETVEPLLREVFENFSQNKTVNEEFRRISFADAIQKYGTDKPDLRVEIELDDITEVFVDSGFKIFADQISKNDKTKVWAIPSKEGGSRAFCDKMNKWAIEEGQPGLGYIFFKDGKGSGPIAKNIGDEKTELIKNKYSLDDGDSIFFVCGVPNNFLDFISKARVKIGNELGLIKKDTFEFCWIVDFPMFEYNEELKKIDFSHNPFSMPQGGLEVLNNSDPLEIKAFQYDIVCNGVELSSGAIRNHRQDILLKAFEIAGYDIEEIKSRFGAMYNAFGYGAPPHGGIAPGIDRIVMLIAGVENIREVIAFPMNQQAQDLMMNAPSEISKEQLKELGIKIVEKKE

SEQ ID NO: 186019 - protein, 156 aa, Unknown
  Bacterial polypetide isolated from the Sargasso Sea
SIGDHGRPIPAHHPFTMPHTSDMEALDSAQGEEYLDIRSQAYDLVLNGWELGSGSVRIHTPEIQSKIFEILGINEEESKEKFGFLLDAFRYGAPPHAGFAFGIDRLAAILSGEENIREVIAFPKTQSGADPLTNAPTQLENNHLEELGLRLIPPST

SEQ ID NO: 186020 - protein, 132 aa, Unknown
  Bacterial polypetide isolated from the Sargasso Sea
GELKDKDFESPLDILAYQYDIVCNGIELSSGAIRNHKPDLMYKLFSIAGYKKAEVDEKFSGMINALSYGAPPHGGIAPGIDRIVMLLANEKNIREVTMFPMNQNAQDLMMNAPSEINQDQLEELNLSIKTKN

SEQ ID NO: 186021 - protein, 554 aa, Unknown
  Bacterial polypetide isolated from the Sargasso Sea
FLDVRDIKGICQVVVTPDNKKSFKLAESIRNEYVIQINGVVRKRLKGTINKNMHTGEIEIEVKNIDILSKADTPVFPIDEYQEVNEDVRLKNRVLDLRRPEMNERIIIRSKITSLIRNYLDKNDFNEIETPILTKATPEGARDYILPSRVQPGSFYALPQSPQLFKQLLMIGGLNKYYQIARCFRDEDLRADRQPEFTQIDIEASFIEQDEIMQVSEKMIKNIIKDFSGDKLDKFKVLDWNDAMQDYGCDKPDLRIPLKLIEIADLVKNEEFKVFSDPAKNKDSRVVALKVPNGNSLSRGQIDDYTNFVSKLGAKGLAYIKINDVKDLENGIQSPILKFLKSETISDIIDVLKVNTGDLIFFGAGSQSIVNLSMSSLIKKLGEDLNLYTSKWAPCWIINFPMFEKNTEGDLTPLHHPFTLPKCSKKELLEDPSTSIAHAYDVVLNGYEIGGGSLRIYDKDMQQTIFDILNISKDESNKKFGFLLKALSSGCPPHGGIAFGLDRIIMLVTDTSNIRDVIAFPKTQSATCLLTDAPSKVEKEQLDELKIISTHKEE

SEQ ID NO: 186022 - protein, 119 aa, Unknown
  Bacterial polypetide isolated from the Sargasso Sea
KAFQYDIVCNGVKLSSGAIRNHRQDILLKAFEIAGYNIDEIKKRFGAMYDAFGYGAPPHGGIAPGIDRIVMLIAGVENIREVIAFPMNQQAQDLMMNAPSEISSDQLKEIGIKIIEKKE

SEQ ID NO: 186023 - protein, 579 aa, Unknown
  Bacterial polypetide isolated from the Sargasso Sea
MKSHYCGEITSSNLKEEVTICGWIHRRRDHGGVIFLDVRDIKGICQAVVNPDNEKSFKLAESIRNEYVVKIKGDVRKRLEGTINKNMHTGEIEIEVKDLIILSKANTPVFPIDEYQEVNEDVRLKNRVLDLRRPEMNERIITRSKITSLIRNYLDKNDFHEIETPILTKATPEGARDYILPSRVQPGSFYALPQSPQLFKQLLMIGGLDKYYQIARCFRDEDLRADRQPEFTQIDIEASFIDQDEIMKISEKMIKDIIKEFCGDKLEKFKIINWHDAMRDYGCDKPDLRIPLKLVDISELVKDEEFKVFSEPAQKKESRVVALKVPKGNSLSRGQIDDYTKFVSKLGAKGLAYIKINDVNDLENGIQSPILKFLKPETVTNIIKSLDTKTDDLIFFGAGSESVVNLSMSSLIKKLGEDLDLYLTKWAPCWIVDFPMFETSKEGNLTPLHHPFTLPKCSAKELEDNPKDSIAHAYDVVLNGYEIGGGSLRIYDNAMQKIIFNILNISKEDAESKFGFLLKALSSGCPPHGGIAFGLDRIVMLVTDTTNIRDVIAFPKTQSAACLLTRCIQVRLKKISLMN

SEQ ID NO: 186024 - protein, 475 aa, Unknown
  Bacterial polypetide isolated from the Sargasso Sea
GEQDYPEETRLKYRFLDLRRQEMHENIVLRSKVISFIRNKMIANGFLEFQTPILTASSPEGARDFLVPSRMHPGKFYALPQAPQQFKQMVMISGFDKYFQIAPCFRDEDGRADRSPGEHYQLDMEMSFVEQEDIFKMVEPIFFDLFFKFGKGKKISKPPFRKITYKNSMLKYGTDKPDLRNPIEIFDVTEVFKRDDVKLDIFKKLIKKGGIVRAIPAPQTSSKPRSFFDAYNNWAKDEGGKGLGYIILEKNNGKLVGKGPIAKFFSEKAISELVKVCKLKENDSVFFSSDKIKEAERISGMARQKLGKELNLIDSNTFEFCWITDYPMYQYDEREKRIDFSHNPFSMPQTDLKEFDKLDPLSINAYQYDLVCNGYELSSGAIRNHLPELMYKVFSKVGYSKKEVGNKFEGMIKALSYGSPPHGGMAPGIDRIVMLLAGKDNIREVTLFPNEPERTRFINGSPIKTKRFSTQGVKY

SEQ ID NO: 186025 - protein, 585 aa, Unknown
  Bacterial polypetide isolated from the Sargasso Sea
MFKRTHNCGELRITDIGETVNLNGWVNTVRLHGQVVFVDLRDRYGKTQIVFNADSFHGDFEVVKKLSMEDVLSVKGKVRERSESAVNPNLKTGEIEVLISDHLMLNEASPLPFVIHDRESAEEDLRLKYRYLELRMDVLQHNILTRHKTYQATRSFLSDHDFVEVETPVLMKSTPEGARDYLVPSRIHQGQFYALPQSPQIYKQILMISGYDRYFQIVKCFRDEDLRADRQPEFTQIDIEMSFVDEEDVFTNMENMTRYIFKTVNDVDLPDPFPRLTYQEAMEIYGSDKPDLRYEMQLLDLKKYTDISDFNAFRSVERVKGIVVKGGAKYSRKIIDELTEFVKKYKAKGLAWMKVQQDGFEGGISKFFSADLQDSLQNELGLKENDILFMIGDDSSIVLNALGQLRSKIAKMEDLANKDEFKPVWVTEFPMFDHDDEMGRFVAMHHPFTAPREEDVELLDSDPSKALSRGYDLTMNGYEIAGGSIRIHAPKIQEKVFSLLGLSHDEAVEKFGFLVEALTYGAPPHGGIAFGFDRLVMLLAGTENIRDVIAFPKTTSATSLMDQSPSSVSQLQLKELGITINDPED

SEQ ID NO: 186026 - protein, 588 aa, Unknown
  Bacterial polypetide isolated from the Sargasso Sea
MRSIYCGQVNEAHAGQTITLCGWVHRRRDLGGLIFIDMRDREGIVQVFFDPDKPDAFALASELRGEFCIQVSGVVRTRPDSQRNSDMATGAIEVFAHELTIINRAEPLPLDFNQVNSEEVSLKYRYLDLRRPEMAKYLKTRAKASAFVRRFMDEHGFLDIETPMLTKATPEGARDYLVPSRVHKGKFYALPQSPQLFKQLLMMSGFDRYYQIVKCFRDEDLRADRQPEFTQIDVETSFMTAPQVREIMEEMIRKLWLHILNVDLGDFPIMTFDEAMRRYGSDKPDLRLPMELVDVADLLTAVEFAVFAGPANDPKGRVAALKVPGGAELSRKQIDEYTKFVGIYGAKGLAWMKVNEAANGIEGVQSPVAKFLSDAIVREILARTGAADGDIIFFGADSKKVVCDAMGALRLKVGRDLGLLENVWKPLWVIDFPMFEEDGEGGLAAMHHPFTAPSGLSPEQLKANPVGAYANAYDMVINGYEVGGGSVRIHNSEMQATVFDILGITPAEQRLKFGFLLDALKYGTPPHAGLAFGLDRLSMLLTGTENIRDVIAFPKTTAAACLMTDAPSFANAAQLGELAIATTVKGDE

SEQ ID NO: 186027 - protein, 502 aa, Unknown
  Bacterial polypetide isolated from the Sargasso Sea
MYRTNNCGELKISDVGKTVTLAGWVQKIRNKGFLIWIDLRDRYGITQLIINSEKSSKKVIDSVKDIGREFVIQVEGEVIKREAINKNIPTGEIEILVTEINILNSSKLPPFTIENETDGGEELRMKYRYLDLRRPALKDNIIFRNELTFQVRKYLKEEGFIDIETPYLIKSTPEGARDFVVPSRINPGEFYALPQSPQTFKQLLMVSGFDKYVQIVKCFRDEDLRADRQPEFTQIDCEMSFVNQEDILNTFEGLVKNLFKVCIGASLEKFDRISYADAMELYGSDKPDTRFGMKFLNLSEKAKGSGFKIFDSSESIYGFTIENGESFSRKDIDYYTDWVKRPQIGALGLIWIKHNQDGSVKSSVDKFFNEEQLKSMTGSKAGDLTFIISGDKKKTLTQLGSLRIHVGEKLGLRDKNKFNALWVTDFPMFEWDEETKRYHAMHHPFTSPVENTIGEDPGSTLANAYDLVINGNEIGGGSIRIHDQKLQEEVFSILGFSKKGGV

SEQ ID NO: 186028 - protein, 319 aa, Unknown
  Bacterial polypetide isolated from the Sargasso Sea
MNINELVNAKNNAEVQNVNGWVSSIRDHGGLTFIDLRDFYSSIQIVYEQSKNMPSDIKNEYYISVSGVFKERDKELVNKNTQLGMYEIQASEINIINKSKTLPFQIDNNIDTDESIRLKYRYLDLRRQSMKSNIVGRSNTFKSIRKIMDKMDVLEIDTPTLIKSTPEGAKDFLVPSRKNSNTFYALPQSPQMYKQLFMMAGFPNYYQIAKCYRDEDSRKDRQPEFTQLDVEFSNANPEIVKKNIETIVKFVFKDAYDIKIDSAFKNMTFSEAISLYGTDKPDLRIKETISDCTEVFKATEINFLSDILNKEGVIRFLKT

SEQ ID NO: 186029 - protein, 231 aa, Unknown
  Bacterial polypetide isolated from the Sargasso Sea
MSKYRTHTCGELTLKNKDQTIKLSGWINKKRDHGNLLFLDLRDHYGLTQCVIDEGNKIFKEIEKLPLETVLQVEGKVLVREKDTINENLNTGEIEVGIEKFKILARTKELPLPVFSDQEYSEEIRLKYRFLDLRRNRIHNNIILRSKIISFIRSEMQKYGFLEYQTPILTSSSPEGARDFLVPSRLNPGKFYALPQAPQQFKQLIMVSGFDKYFQIAPCFRDEDARADRSP

SEQ ID NO: 186030 - protein, 534 aa, Unknown
  Bacterial polypetide isolated from the Sargasso Sea
KEIFEIADSCRSEYVVNINGKVRKRIEGAINPKMSTGEIEIEATSLTIFSSAVTPQFPLDDYQDVNEDIRLKYRFLDLRRPDVNQRLVQRSKITSEIRSILEKHNFHEIETPILTKATPEGARDYLVPSRVHPGEFFALPQSPQLFKQLLMIGGLDRYYQIAKCFRDEDLRADRQPEFTQVDIEASFIINEDIFEIAEDLVITLLSKFTDYKKTSVPRITYAESIEKYGCDKPDLRIPLQLKDISELVKDEEFKVFSGPANDPLSRVVALKVPEAASMTRKKIDQYTDYVGTLGAKGLAYIKVVELDSDNGLQSPILKFFKKETVESILNSLDVKNNDIIFFGAGSTKIVNLSMSSLIKKLGEDLNLISSSWAPCWIVDFPMFERNKDNNLTSLHHPFTLPAVTVDELKNDPENALACAYDFVLNGYELGGGSLRVYEKSMQKEIFEILGISNEEANEKFGFLLSALSSGCPPHGGIAFGLDRIVMLLSDTTNIRDVIAFPKTQSASCLLTEAPSVVSDDQLDELNISSTSNKE

SEQ ID NO: 186031 - protein, 465 aa, Unknown
  Bacterial polypetide isolated from the Sargasso Sea
MTKYRTHNCNELNLTHKGNQIILSGWVNKKRDHGNLLFIDLRDNYGLTQCVIDKSNSIFKDIEKLPLETVVKLEGTVVERTKETINLNIATGQIEISINTFEILGTTKELPMPVFSEQEYSEEIRLKYRFLDLRRKKIHQNIILRSKIISFIRSEMENLGFLEFQTPILTSSSPEGARDFLVPSRLNPGKFYALPQAPQQFKQLIMVSGFDKYFQIAPCFRDEDARADRSPGEFYQLDLEMSFVEQEDVFNVVEKLMVNTFKTFSNKKLLNDEFPRISYKEAMLKYGSDKPDLRNPLIINDITEIFTREDVSFEIFKKLVKSGSRVRCIVTKNTKDKPRSFFDNIDKWAKEQGASGLAYFTFEKDTELSGKGPIGKFFTKEALLEIMNLTNAEVGDSIFLACGKQNELEKITSQARNKIAEDLDLIDEDVFAFCWIVDYPMFERDEVTNKIEFSHNPFSMPQGDL

SEQ ID NO: 186032 - protein, 545 aa, Unknown
  Bacterial polypetide isolated from the Sargasso Sea
WNHTNKLLIHLSDHFKTIEYLSLESVICVSGKVLKRSEDTINKNLPTGEVEVNLESLEVLSSAASLPLQVNSQEDYGEETRLRYRYLDLRRSRPHSNIVLRSNIIQKIREKMLDQGFLEFQTPILTASSPEGARDFLVPSRINKGKFYALPQAPQQFKQLIMISGFDKYFQIAPCFRDEDSRADRSPGEFYQLDLEMSFVEQQDVFNAVQPVIYEVFRSFTKKEVLEDFEKIKYHDAILKYGTDKPDLRFDLIIQDVTEIFSDSEFKIFSNNIKSGAVVRGVPGLKCGTRAIADKMDSWAKGEGAPGLGYIIFNNGEGKGPIANALGKMKVLELMRQFELSDGDALFFTCDKLKAASELAGKARLKIARDQNMINTNQFKFCWIVDYPMFEINEKTNKIEFSHNPFSMPQGGMQALVEQNPLDVLAYQYDLVCNGIELSSGAIRNHVPEIMYKAFEIAGYSKDVVDEKFTGMINAFCYGAPPHGGIAPGIDRIVMLLADEPNIREIILFPMTGKAEDLMMGAPSEINKEQLKELGIEFSIKKNIS

SEQ ID NO: 186033 - protein, 144 aa, Unknown
  Bacterial polypetide isolated from the Sargasso Sea
MWLASPFPAPREEDVELLDTDPSKALSRGYDLTMNGYEIAGGSIRIHSPKIQEKVFSLLGLSHDEAVEKFGFLVEALTYGAPPHGGIAFGFDRLVMLLAGTENIRDVIAFPKTTSATSLMDQSPSSVSQAQLKELGITINDPED

SEQ ID NO: 186034 - protein, 205 aa, Unknown
  Bacterial polypetide isolated from the Sargasso Sea
KELNLNKNDLVFFGAGKAKIVNDYMSRLINKIGKDFNLLKDGYEACWVTEFPMFEKDNDGKVSALHHPFTSPAQSDLEELQKIDINTIKSRAYDFVVNGIELGGGSIRIHNKEIQEQIFKLLNLSQKEANEKFGFFLKVLGTGCPPHGGIAFGLDRIAMILTGAETIRDVIAFPKTQSAMCLLTEAPGEVPDESLEELNIKKIEE

SEQ ID NO: 186035 - protein, 344 aa, Unknown
  Bacterial polypetide isolated from the Sargasso Sea
LSLEVRNYLSDNGFLDIETPYLIKSTPEGARDFVVPSRMHPDQYYALPQSPQIFKQLIMIGGLDKYYQIVKCFRDEDLRADRQPEFTQIDCEMSFVNESDILEQFEGLILHLLKKFGKTVKTFPKITYKDALENYGTDKPDLRFDIKINEVTDSVKGKDFNIFDKAEYIGCLALNDKAELSRKEIDDLTEWVKRPQVGANGMLWIKNNGDTIKSSFDKFFTPDDLKNLTKNIGSKAGDLILIMAGTKKETLEHLGTLRLEIGKRYNFINHDLFCPAWITDFPLFGYDDQEKKFKSMHHPFTSPNKESLDHLDSNPENVIANAYDLVLNGNEIGGGSIRIHDYNT

SEQ ID NO: 186036 - protein, 434 aa, Unknown
  Bacterial polypetide isolated from the Sargasso Sea
SLARNFFNEKGFIEIETPYLTKSSPEGARDYLVPSRVHQSSFFALPQSPQILKQILMTSGFDRYYQIVRCFRDEDLRADRQPEFTQIDLEMSFVNQEDVIDIVEELLKKIFMEIKGIDLKSKFKSITYKESMEKYGNDRPDLRFNLELKTITEIFKDTKFKVFKDVVSADGSIKCIKVNGSSMTRKNIDDLTSFAQEHGAKGLAWIKVLETELQSPILKFFSEQEINSLKEKLKLSLNDIVFFGAGDLETVNNYMSAVRNKLGEDLGLISKDSYEFVWITDFPLFLKVDDSLTSTHHPFTMPQNEVLNEANLSSQLSQAYDIVLNGTEIGGGSIRIHKRDLQEKIFNILGISKEEYESNFGYLLNALESGTPPHGGLALGLDRLMMYLTDSQSIRDIIAFPKTQKASCLLTEAPSKVFSEKQLNELGIKLLDEE

SEQ ID NO: 186037 - protein, 171 aa, Unknown
  Bacterial polypetide isolated from the Sargasso Sea
GLANENQLEFAYIIDFPLFEPGENEGQWTAAHHAFTMPKDGDAAKLETDPGSVIADSYDLVCNGLEIASGSIRVHDRELQERILGVLGYSTDQISERFGQLLESFDYGAPPHGGIAPGIDRLVMVLAGLESIRDTIAFPKTQSAVDPLFGSPGPVEDVHLAELKLNIIDTD

SEQ ID NO: 186038 - protein, 347 aa, Unknown
  Bacterial polypetide isolated from the Sargasso Sea
LKTVEPIFYDLFKEFGEGKKVNSPPFPRIKYRDCLNKYGTDKPDLRNPIELVDVTEIFKSKEVNLKIFKDIISKGGIVKAIPAPNTLSKPRSFFDSLNNWAIKEGASGLAYITFEKTGDKINGKGPIAKFFAEKSISELLKKCKISEKDSVFFVCNKENEANNFAGIARQKIAEELKIVDTNSFKFCWITDYPMYEYDEKEKKIDFSHNPFSMPQLDMKDFDKTDPLKILAYQYDLVCNGYELSSGAIRNHIPEYLFKVFSKVGYSKEAVEKNFSGMIKALSYGAPPHGGMAPGIDRIVMLLANQKNIREVTLFPLNQNAEDLLMEAPSEATDKQLKELNIKTVKKI

SEQ ID NO: 186039 - protein, 467 aa, Unknown
  Bacterial polypetide isolated from the Sargasso Sea
MDISNLTKLTNNEKVNDLRGWVDTIRHHGGLMFFELRDHETKVQIVTDTPDNFDNVKNEYYVSVNGVLVKRKKENINKEVLFGDIEIELSNLEIISESKTLPFQIEDDIDTDEQIRLKHRYLDIRRSEMNKNIIARSKTFKSIRESMNKLGINELDTPTLIKSTPEGAKDFIVPSRKSPGNFYALPQSPQMYKQLFMLSGLKNYYQIAKCYRDEDSRKDRQPEFTQLDIEISNGNPEIVQKIIESTMKHVLKNVYSIQVKTPFKKMTYDEAMNMYGTDKPDLRIKETISDFTDIFRDTEISFIKESINNKGEVRGFVINKILSRSEIDTLDENIKNEGSPGLGWFKIENKKVTGPLAKILNEKENKELIKYDNSTVLFQSGSKHETSQYLDTLRRQIYTIQNENTYEFLWIYDFPYFEIENDQLQPSHHPFTSPKNTAEFLSNPEDAKALHYDLVLNGIELGSGSQK

SEQ ID NO: 186040 - protein, 427 aa, Unknown
  Bacterial polypetide isolated from the Sargasso Sea
MRSKIISSIREKMTSAGFTEFQTPILTSTSPEGARDYLVPSRIHHGQFYALPQAPQQFKQLLMMAGFDKYFQIAPCFRDEDSRADRSPGEFYQLDFEMSFVTQDDVFNSIEPVLYEVFDENKNYHTDENVTVSSYPFKRIPYEESLEIYGTDKPDLRNPLVIRDCTDIFKDSDFKIFSSLIEKNYKVKGIVVSNTSDKPRSFFDKLNNWARDEGAAGLGYISYSDNKHKGPIAKNLDTNRLNQLKLQDGESIFFVCDTQKDAQLFAGKVRDKLCLDLNLLNKHAFEFCWIVDFPMYEIDESTNKIEFSHNPFSMPQGEMDSLLNKDPLDIKAYQYDIICNGVELSSGAIRNHRSDIMYKAFEIAGYKKEELESKFSGMLNAMKFGAPPHGGSAPGIDRIVMLLANEPNIREVIAFPMNQQAMDLMMN

SEQ ID NO: 186041 - protein, 266 aa, Unknown
  Bacterial polypetide isolated from the Sargasso Sea
MYYRQGKQKFKELEKIQLETVIKIDGKVIDRSKDTINKDIQTGEIEVVIEDFEILGVCKELPMPVFSDQEYSEEIRLKYRFLDLRRKKIHENIILRSKVISFIRTEMNKLGFLEFQTPILTSSSPEGARDFLVPSRLNPGKFYALPQAPQQFKQLIMVSGFDRYFQIAPCFRDEDARADRSPGEFYQLDLEMSFVEQEDVFNVVETLLVNTFKKFSNKKLMFDKFPRITYADALLKFGSDKPDLRNPLLINDITEIFTREDVSFEI

SEQ ID NO: 186042 - protein, 234 aa, Unknown
  Bacterial polypetide isolated from the Sargasso Sea
MNKYRTHNCSELNEKNIGKKVKLSGWVHRKRDHGNLLFVDLRDHFGITQCVIENKNKNFKIIEKIKPESVVCFEGEVIKRSKDTENKELKTGMIEIKIINTEILSEAKDLPMPVFGEQDYPEDIRLKYRFIDLRRKEMHKNIKLRSNVLSFIRSKMIENNFMEFQTPILTASSPEGARDFLVPSRTHPGKFYALPQAPQQFKQMVMISGFDRYFQIAPCFRDEDGRADRSPGEH

SEQ ID NO: 186043 - protein, 346 aa, Unknown
  Bacterial polypetide isolated from the Sargasso Sea
VFEVIETLFLKLFKKFSKKKILHEKFPRITYEDAMLKYGSDKPDLRNPLEIYDLTNIFDREDVTFDIFKKLVKSGSIVRSIVTKNTKDKPRSFFDGIDKWAKEEGTSGLAYFTLEKGDKISAKGPVGKFFSENSLIEIMKQTSANIGDTVFLSCGKKNDVEKILSTARNKIAEDLDLIDNETYSFCWIVDYPMYEIDETTKKIKFSHNPFSMPQGDIKNLDLSNPLNVKAYQYDIVCNGIELSSGAIRNHVPDLMYKLFEIAGYSKNDVNSKFSGMINALSYGAPPHGGIAPGIDRIVMLLANEKNIREVTMFPMNQNAQDLMMNAPSEVSEEQLKELNISVKKKL

SEQ ID NO: 186044 - protein, 486 aa, Unknown
  Bacterial polypetide isolated from the Sargasso Sea
FLAIPFQLDEYTSVGEETRLKYRFLDLRRPEMQQNLRLRSKVSSVFRSFLDKQDFVEIETPLLTKATPEGARDYLVPSRTFPGQFFALPQSPQLFKQTLMASGFEKYFQFAKCFRDEDLRADRQPEFTQLDIELSFADSEEVIGLITEMIKQVFKETLSVDLGDFPKIPYQEAISKYGIDKPDLRNPLELIEVKDLFLDCDFKVFNEPANDSNSRIAALRVPNGKLLTRKQIDDYTDFVGNYGAKGLAYIRVEDPSKGKDGLQSPIIKFIEDSIIDSLLKVLDVKEGDIIFFGAGKNNVVNDSLAALRDLVAKDLDLLTCEWAPCWVVDFPMFEKNKSGELTPLHHPFTAPSCSIEELKKDPLSALTEAYDVVLNGTELGGGSVRIHDKEMQKAVLELLNIEDQEAEEKFGFLISALQHGCPPHAGLAIGFDRMIMLMTDSESIRDVIAFPKTQTASCLLTDAPGEAAKDQLEELHIRFHGIDKEV

SEQ ID NO: 186045 - protein, 271 aa, Unknown
  Bacterial polypetide isolated from the Sargasso Sea
MNKYRTHTCGQLTIKEKNKDVSLSGWINKKRDHGNLLFLDLRDNYGITQCVIENSHANFKEFEKLPLETVIKINGKVLERSRETINKDLNTGEIEISIISFVELGKTKELPLPIFSDQEYSEEIRLKFRFLDLRRKKIHQNMILRSEVISFIRSEMKKFGFLEFQTPILTSSSPEGARDFLVPSRLNPGKFYALPQAPQQFKQLIMVSGFDKYFQIAPCFRDEDARADRSPGEFYQLDLEMSFVEQEDVFEVVEKLMINIFTKFSDKKTTI

SEQ ID NO: 186046 - protein, 438 aa, Unknown
  Bacterial polypetide isolated from the Sargasso Sea
INRKRDHGNVLFIDLRDHYGVTQCVIEKTNTKLLKEFESLRAESVIKIDGRVIKRDKETINESLATGKIEISVDALEVLSAANELPMPVFGENDYPEEIRLKYRFLDIRREELHNNIVLRSSIISYIRELMSEAGFLEMQTPILTASSPEGARDYLVPSRIHPGKFYALPQAPQQFKQLIMAGGFDKYFQIAPCFRDEDARADRSPGEFYQLDMEMAFVEQDDVFNAIEPVLSSVFKKFSNFKVTDLPFPRITYKEAMKKYATDKPDLRNPIEVCDITQEFSDDDVEFKAFKKVIDAGGRVLGIPAPKSSIQPRSFFDNLNNWAKKEMNAPGLGYIIFEEVDGILTGKGPIAKFIPSNIQLEIAKKANLNSGDSIFFACDKGKSVYDIAAAARNKIGEILDLIEKDVFRFCWIVDFSMYEQDRETGKIDFSHNPFSMP

SEQ ID NO: 186047 - protein, 362 aa, Unknown
  Bacterial polypetide isolated from the Sargasso Sea
MIDNQEFSQIDIEASFVEENDVMKISEGMVKHAFKEVLDFKIKEIPKIKWSDAMEHYGSDKPDLRNPLRLVEIAEIFKEEEFKVFSDPANDTESRIAALVIENGDSVGRGQIDRYTDFVKEFGAKGLAYIRVEEANISGLNSPILKYLSEKCLESILKNLKLKKGSLVFFGAGDKKTVNDYMSKLISRIGEDLNLLEDGYKFCWVTDFPMFEKSADGNLTSLHHPFTSPEEEDPKKLAKIDPLEMNSRAYDMVVNGIEIGGGSIRIHRNEVQEQIFSILGLTEDEANEKFGFFIRALKTGCPPHGGIAFGLDRLAMIMTGSDSIRDVIAFPKTQSALCLLTEAPGSVPDESLEELRIERKED

SEQ ID NO: 186048 - protein, 519 aa, Unknown
  Bacterial polypetide isolated from the Sargasso Sea
MNISELKNKKINTEVTNLMGWVSSVRDHGNLIFIELRDTDSRIQLVLDAEKVELDTFKSEYYISIDGEFIKRDPEMINDSQPLGKFEINVKNFNILSKSNTLPFQLDDSLDTDENIRLKYRYLDLRREDMKKNIVTRSKTFRSIRESMNELGFLELDTPTLTKSTPEGAKDFLVPSRKQNGAFYALPQSPQMYKQLFMVSGFDKYYQIAKCYRDEDSRKDRQPEFTQLDLEISNGSPEIVRDITESIVKNLLTDVYEQKVEVPFIDMTYDEAINTYGTDKPDLRIKNTIQDFTNIFKNTEIKFIKSAIENNGFVKGFVTEEILSRSQIDKLDEIVKDNGSNGLGWFKIENNEVSGPLSKIINEDEKNNILKLGEGMLIFQSGTKEIYPILDILRRSIFKPDDTLNFLWIYDFPYFETENGEIQPSHHPFTSPKDVDSFVNDPSASKALHYDLVLNGSELGSGSQRINDPTIQTKVLEMWGLSDSDIKNRFGWFIEALSYGTPQHAGIALGIDRFVAVML

SEQ ID NO: 186049 - protein, 355 aa, Unknown
  Bacterial polypetide isolated from the Sargasso Sea
GNYYTSHRFFEIETPILTKSTPEGARDYLVPSRVNPGMFFALPQSPQLFKQLLMISGYDRYMQLARCFRDEDLRGNRQPEFTQIDLELSFTEPEEIFGLTEGLMVELFKEIMGLEIDIPFPRLTYQQAMEDYGSDAPDIRFELKLKDISDIASECELRVFNEVVKKGGIVKAICVPGGAEFSRKELDDLTEYSKIFGAKGMAWIKSNQDGWQSPIGKFFTDTQKKDLEERVGLNHGDLVLFCADKEKIVYDTLGNLRKEIARRRGLVDQNEFRFVWVTDFPLFEYSDEEKSYTSSHHPFTMPDLDDLEKYGDNEPEKIRSRAYDVVLNGVELGGGSIRIHKKDIQQKVFSLLNLS

SEQ ID NO: 186050 - protein, 321 aa, Unknown
  Bacterial polypetide isolated from the Sargasso Sea
MNISELKNKDTNSEVTNLMGWVSSVRDHGNLIFIELRDTDSRIQLVLDAEKVDLDTFKSEYYISIDGLFIKRDPEMINDSQPLGEFEINVKNFSILSKSNTLPFQLDDSLDTDENIRLKYRYLDLRREDMKKNIITRSKTFRSIRESMNELGFLELDTPTLTKSTPEGAKDFLVPSRKQNGAFYALPQSPQMYKQLFMVSGFDKYYQIAKCYRDEDSRKDRQPEFTQLDLEISNGSPEIVREITESIVKNLLTDVYELEVEIPFIEMTYDEAINKYGTDKPDLRIKNTIQDFTNIFKNTEIKFIKSAIENNGFVKGLLQKK

SEQ ID NO: 186051 - protein, 506 aa, Unknown
  Bacterial polypetide isolated from the Sargasso Sea
IETGEIEVAISEYETLGTCKELPLPVFSDQEYAEDIRLKYRFLDLRRKKIHENIILRSKVISYIRNEMTKSGFLEFQTPILTSSSPEGARDFLVPSRLNPGKFYALPQAPQQFKQLIMVSGFDKYFQIAPCFRDEDARADRSPGEFYQLDLEMSFIEQEDVFNIVEKLMVNTFKNFSDKKLMYDIFPKIPYSEAMLKYGTDKPDLRNPLIINDITEIFGREDVSFDIFKKLVKSGSKVRSITTKNTKDKPRSFFDNIDKWAKDQGASGLAYFTFEKENKISAKGPVGKFFSEEALLEIMKITKSKVGDSIFLACGKQNELEKITALARDKIAKDLDLIDDNTFAFCWIVDYPMFEKDELTNKIKFSHNPFSMPQGELKDKDFENPLDILAYQYDIVCNGIELSSGAIRNHKPDLMYKLFSIAGYNKAEVDEKFSGMINALSYGAPPHGGIAPGIDRIVMLLANEKNIREVTMFPMNQNAQDLMMNAPSEINQDQLKELNLSIKTKN

SEQ ID NO: 186052 - protein, 348 aa, Unknown
  Bacterial polypetide isolated from the Sargasso Sea
QPEFTQLDIEISNGDPKIVQKIIESTMKHVLKTVYSIEVKTPFTKITYDEAMSLYGTDKPDLRIKETITDFTNIFMDTEISFIKETIKNNGTVRGFLINNLLSRSEIDNLDKLLKNEGSPGLGWFKIENKKVSGPLAKILNEKENNELVKNDNCTMLFQSGKQDESSHYLDTLRRKIYSIPNENTYEFVWIDDFPYFEIENGELQPSHHPFTSPKDTSEFLSNPNDAKALHYDLVLNGIELGSGSQRINDPKLQKEVLSKWGLSESDINDRFGWFIEALSYGSPQHAGFAVGIDRFIAEMMNADSIRDVIPFPKTQSGLDPLTNAPSNLSKLELQEYNISIESIENEE

SEQ ID NO: 186053 - protein, 496 aa, Unknown
  Bacterial polypetide isolated from the Sargasso Sea
EGQSNPNLCTGQVELVANSLTIFNSAKTPAFPIDENKTSVGSDTRLKYRYLDLRTPKTQERIIKRSEITRFIRQFMDAEQFLDIETPVLTKATPEGARDYLVPSRTQQGHFFALPQSPQLFKQLLMVSGFDRYYQVVKCFRDEDLRADRQPEFTQLDIEASFVQEEDIISLIQTMLQKLFKNVLDTDLPETFPRMTYQEAMQRFGSDRPDMRIPLEFTDIKDLMQKVDFQVFAKPAQDENCRVVAMKVPGASEKLSRKQLDDYVNFVKIYGAKGLAYIRVQEKAKGIEGLNSPILKYLPEDVVMAIIERVQAEDGDILFFGADQSAIVNDALGALRGKLGKDLDLYTCKWAPLWVTEFPMFEEHDGHIQAMHHPFTAPSVSTPEEIKELPLNKILSRSYDIILNGYEIGGGSIRIHQKNMQSAIFDRIGLSQAQAEEKFGFFLDALAYGTPPHGGIALGLDRLVMLMTDASYIRDVIAFPKTQTASCLLTGAPSQA

SEQ ID NO: 186054 - protein, 156 aa, Unknown
  Bacterial polypetide isolated from the Sargasso Sea
YPIFEKDEITKKIKFSHNPFSMPQGDIKNIDFSDPLSLKAYQYDIVCNGVELSSGAIRNHIPELMYKLFEIAGYSKSNVDKKFSGMINALSYGAPPHGGLAPGIDRIVMLLADEKNIREVTMFPMNQNAQDLMMNAPSNVDEEQLKELNILLKKNT

SEQ ID NO: 186055 - protein, 592 aa, Unknown
  Bacterial polypetide isolated from the Sargasso Sea
MRSHFCGELNESNVDEDVVLCGWIHRRRDHGGVIFLDLRDREGLTQVVYDPDTKESFKIAEGVRNEYVVEVKGRVRLRPSGTINDEMPTGRIEILGNELKVLNASETPPIQLDEHAEVGEDIRLKYRYIDLRRPEMAARLRFRSKVGNTIRNFLDNNGFLDIETPLLTKATPEGARDYLVPSRTHQGRFFALPQSPQLFKQILMASGMDRYYQIAKCFRDEDLRADRQPEFTQIDVETSFMDEDEIMAIMEAMIKHTFKKTLNVDLGDFPRITYAEAMRLYGSDKPDLRIDLKLVDVASLMKSAEFKVFSGPANDEDSRVVALRVPGGASLTRKVIDDFTEFVAVYGARGLAWIKVNDLRNGSEGLQSPILKFLDEEIIGNLLSTLAVETGDIIFFGADKSKIVNEAMGALRIKVAQELNLVASGWAPVWVVDFPMFELTSEGDLTSLHHPFTAPSLDAEELVKDPTKALSRAYDMVLNGTELGGGSIRIHDAKVQRAVFDVLGISEAEAEEKFSFLLDALSLGCPPHGGIAFGFDRLIMLMTDSHSIRDVIAFPKTQSASCPLTDAPGYVSPSQLRELSIRLRDPNKPLNG

SEQ ID NO: 186056 - protein, 588 aa, Unknown
  Bacterial polypetide isolated from the Sargasso Sea
MKSHYCGEITSKNLKEDVTICGWIHRRRDHGGVIFLDVRDIKGICQAVVNPDQKDSFKLAESIRNEFVVQITGKVRKRLEGTVNKTMHTGEIEIEVNIINILSKANTPVFPIDEYQEVNEDVRLKNRVLDLRRPEMNERIITRSKITSLIRNFLDDNDFNEIETPILTKATPEGARDYILPSRVQPGSFYALPQSPQLFKQLLMIGGLNKYYQIARCFRDEDLRADRQPEFTQIDIEASFLDEEAIMKVSEEMIKKVINKFCGDKLSKFAVLDWQDAMDRYGCDKPDLRIPLELIEISDLVKDEEFKVFSDPAKKKNSRVVALKVPKGNSMSRGQIDEYTKFVSKLGAKGLAYIKVNDVNDIENGIQSPILKFLNVETVTKILKKLDIQTDDLIFFGAGSESIVNLSMSSLIKKLGEDLSLYTEKWAPCWIINFPMFETNSDGDLTPLHHPFTLPKCSSKEIKNDPENTTAYAYDVVLNGYEIGGGSLRIYDKSMQETIFEILKISKEEADKKFGFLLKALSSGCPPHGGIAFGLDRIVMLVTNTNNIRDVIAFPKTQSAACLLTDAPSTVEKAQLDELKIESTHKED

SEQ ID NO: 186057 - protein, 270 aa, Unknown
  Bacterial polypetide isolated from the Sargasso Sea
MVRALVTKNTKDKPRSFFDGIDRWAKEQGSSGLAYFTLEKDDKINAKGPIGKFFSENALLEIMKLTNANIGDTVFLSCGKKNDVEKILSVARNKIAEDLDLIDNKIFSFCWIIDYPMYEIDETTKKIKFSHNPFSMPQGEINKLDLSNPLNIKAYQYDIVCNGIELSSGAIRNHVPELMYKLFEIAGYSKNDVNSKFSGMINALSYGAPPHGGIAPGIDRIVMLLANEKNIREITMFPMNQNAQDLMMNAPSEISEDQLKELNLSLKKKN

SEQ ID NO: 186058 - protein, 67 aa, Unknown
  Bacterial polypetide isolated from the Sargasso Sea
AIGAPPHGGIALGLDRIVMLLTNTSNIRDVIAFPKTQSAACILTDAPSNISNEQMLELGIKILDENK

SEQ ID NO: 186059 - protein, 291 aa, Unknown
  Bacterial polypetide isolated from the Sargasso Sea
IFQRDDVKFDIFKKLVKSGSFVRCLVTKNTKDKPRSFFDRIDNWAKEQGSSGLAYFTIEKNDKFSGKGPVGKFFSEESIMEIIKITKADVGDTVFLSCGKKNDIEKILNLARTKLAEELELIDDDYFSFCWIVDYPIFEKDEITKKIKFSHNPFSMPQGDIKNIDFSDPLSLKAYQYDIVCNGVELSSGAIRNHIPELMYKLFEIAGYSKSDVDKKFSGMINALSYGAPPHGGLAPGLDRIVMLLANEKNIREVTMFPMNQNAQDLMMNAPSSIDEEQLKELNLLVKKKNN

SEQ ID NO: 186060 - protein, 407 aa, Unknown
  Bacterial polypetide isolated from the Sargasso Sea
PGKFYALPQAPQQFKQLIMVSGFDRYFQIAPCFRDEDARADRSPGEFYQLDLEMSFVEQEDVFNVVEKLMVNTFKNFSTKKLMFDKFPKISYKEAMLKYGTDKPDLRNPLIVNDITEIFTREDVSFEIFKKLVKSGSKVRCIVTKNTKDKPRSFFDNIDKWAKEEGASGLAYFTFEKDKDISAKGPIGKFFSQDALVEIMNKTNCEIGDSIFMACGKQDELEKITALARDKIAKDLDLIDENIFAFCWIVDYPMFEKDESTNKIEFSHNPFSMPQGDLSEKDFENPLDILAYQYDIVCNGIELSSGAIRNHKPELMYKLFSIAGYDKNQVDEKFSGMIKALSYGAPPHGGIAPGIDRIVMLLANEKNIREVTMFPMNQNAQDLMMNAPSEVNPDQLKELNLALKTKK

SEQ ID NO: 186061 - protein, 505 aa, Unknown
  Bacterial polypetide isolated from the Sargasso Sea
FVLSVTGIVRERPHGTINDQMKTGEVELLVEKGEVLSASETPPFHHDEATSEDIRLKYRYLDLRREEMSNNIKVRHEITKSLREYLNNASYFEIETPILTKATPEGARDYLVPSRTQQGNFFALPQSPQLFKQLLMMSGFDRYYQIARCFRDEDLRADRQPEFTQLDVEMSFVDQDDVKSQMESMVKDLFKSVLGIDLEKQFPQITHAEAMDRFGSDSPHLGIDMELIEVSDLMKEVEFKVFSGPANDEDSRVACLVLRDSSEMSRKQIDDYTDFVSNYGAKGLAYIRVNDIEKGIEGLQSPILKFLNNEVINQLIEKLLLSNGDTVFFGADKKDIVNASLGALRVKMAEDFSLIKDGWFPLWVTDFPMFHWDEREKRWSAEHHPFTSPINPDPEELKNNPKDALSQGYDMVLNGHEIGGGSIRIHSEAMQQAVFSILGIGEEEANEKFGFFLEALKYGCPPHGGIAFGIDRIVMLITGSSSIRDVIAFPKTQTASCLLTDAPSH

SEQ ID NO: 186062 - protein, 327 aa, Unknown
  Bacterial polypetide isolated from the Sargasso Sea
KFSNRKIDSVFPKITYKDSMLKYGNDKPDLRFTLEIKDVTDFFANSGFTIFAKSIENGAVVRGIPGPHCGSRAVADRMNSWAQGEGAPGMGYIIFGEGTAKGPIANALGIDRSIEMKALFDLKDGDALFFSCANENEAANLAGKARVKIANDRELIEHDIFKFCWVVDYPMYEKDDKTGEIEFSHNPFSMPQGGMEALLNKDPLEILAFQYDLVCNGIELSSGAIRNHVPEIMYKAFEIAGHKRDVVDNKFPGMINAFKFGAPPHGGIAPGIDRIVMLLADEPNIREVILFPMTGKAEDLMMNAPNEISDAQIKELGIKLDKKTKIN

SEQ ID NO: 186063 - protein, 276 aa, Unknown
  Bacterial polypetide isolated from the Sargasso Sea
MNKYRTHTCGELTKLHKEKEISLSGWINKKRDHGNLLFIDLRDNFGITQCVIDKSNEIFKKIEKLSLETVIKITGMVIERSNETINKNISTGEIEVKINNIDILGETKELPMPVFSDQEYAEEIRLKYRFLDLRRKKIHQNIILRSKVISFIRNEMQKLGFLEFQTPILTSSSPEGARDFLVPSRLNPGKFYALPQAPQQFKQLIMVSGFDKYFQIAPCFRDEDARADRSPGEFYQLDVEMSFVEQEDVFGVIETLFLKLFKTFSNKKILHKKFPR

SEQ ID NO: 186064 - protein, 495 aa, Unknown
  Bacterial polypetide isolated from the Sargasso Sea
MSIYRSHLCSDLSINDLDKEVTLSGWIDTKRDHGNLLFIDLRDNYGITQCVIDAKNSIFNEVSNLNHETVIKVIGKVVKRSKETINNSLKTGQIEVEIVSYEVLSNSEILPLPVNSDIEYGEEVRLKYRYLDLRRNKLHNNIILRNKVISSIRKKMIERGFVEFQTPILTSTSPEGARDYLVPSRIHHGQFYALPQAPQQFKQLLMIAGFDKYFQIAPCFRDEDSRADRSPGEFYQLDFEMSFVTQDDVFNAIEPVLFEIFNENKKNQSIGVSSYPFKRIPYIEALEKYGTDKPDLRNPLIILDYTNIFKGSNFKIFSDQIQKGSVVKGIIVKNTAKQPRSFFDKLNSWAREEGAAGLGYISLSDKNYKGPIAKNLNENQLSSLKLDNNDTVFFVCDKLNEAQIFSGKVRDKLCNDLDLLNKNSFEFCWIVDFPMFEIDEKTNKLQFSHNPFSMPQGEMESLEKKDPLEIKAYQYDIVCNGIELSSGAIRNHKPE

SEQ ID NO: 186065 - protein, 433 aa, Unknown
  Bacterial polypetide isolated from the Sargasso Sea
MALRTHNCGELNKNHIDQTVKLSGWVNSIRTHGQIIFIDIRDRFGKTQIVLNSDELIKIGKTLSNEDVINIEGKVSLRSKDLINPDLKTGEIEILGEKMMVLSSAEPMPMSIQDRDASSEEHRLKYRYLELRNNDLQKNIIIRHNTAQVVRNFLSENNFLEIETPVLMKSTPEGARDYLVPSRVHNGKFYALPQSPQMYKQLFMISGLDRYFQIVKCFRDEDLRSDRQPEFTQIDLEMSFVDEEDVRSIVEKLLTKVFKEVINVELKEFPILSYHDAIEKYGTDKPDLRFDITIEDFKTFSNKSDFKAFSDCDSVRIISVPNGEFFTRKIIDELDSYAQSLGAKGLAWLKVNNNEFSGGISKFFDSNLSKEIIDNLKLKDNSICFMVGDKLNTSLRVLGKIRSKVADLLELKDNSVFSPVWIVDFPLFMWNEE

SEQ ID NO: 186066 - protein, 361 aa, Unknown
  Bacterial polypetide isolated from the Sargasso Sea
IDCSSIEVLNTAETPAFPLDQSSEVGEDVRLKHRTLDLRRPVMQENLRIKSKLTKSIRDYLEKHSFVDIETPILTKATPEGARDYLVPSRTNPGNFFALPQSPQLFKQMLMISGFDRYYQIARCFRDEDLRADRQPEFSQIDIEASFVEESDVMKISEGMVKHAFKEVLDFKIKEIPKIKWSDAMEHYGSDKPDLRNPLRLVEIAEIFKEEEFKVFSDPANDTESRIAALVIENGDSVGRGQIDRYTDFVKEFGAKGLAYIRVEEANISGLNSPILKYLSEKCLESILKDLKLKKGSLVFFGAGDKKTVNDYMSKLISRIGEDLNLLEDGYKFCWVTDFPMFEKSADGNLTSLHHPFTSPE

SEQ ID NO: 186067 - protein, 390 aa, Unknown
  Bacterial polypetide isolated from the Sargasso Sea
MNKYRTHNCGELDIDSVKKPVLVSGWVHKKRDHGNLLFIDLRDNFGITQCITDKDNKSFSDLEKIPLETVIKIEGIVLPRSNETINNEISTGEIEIKIKDFEILGKTKELPLPVFSEQEYAEEIRLKYRFLDLRRKKIHNNIILRSKVISFIRKEMEKLGFNEFQTPILTSSSPEGARDFLVPSRLNPGKFYALPQAPQQFKQLIMVSGFDRYFQIAPCFRDEDARADRSPGEFYQLDIEMSFVEQEDVFEVVEKLMVSLFNKFSKKKMLYKKFPRIPFKEAMNKYGTDKPDLRNPLLIHDISEVFKRDDVNFEIFKKLFKSGSLIKSIVTKKTSAKPRSFFDNIDKWAKDQGWGGLAYFSIEKDESGKIIGKGPVGKFFSEDALKRNQK

SEQ ID NO: 186068 - protein, 143 aa, Unknown
  Bacterial polypetide isolated from the Sargasso Sea
KFSHNPFSMPQGELKDKDFENPLNILAYQYDIVCNGIELSSGAIRNHKPDLMYKLFSIAGYNKAEVDEKFSGMINALSYGAPPHGGIAPGIDRIVMLLANEKNIREVTMFPMNQNAQDLMMNAPSEINQAQLKELNLSIKTKS

SEQ ID NO: 186069 - protein, 432 aa, Unknown
  Bacterial polypetide isolated from the Sargasso Sea
ETPLLTKSTPEGARDFLVPARLSNGEFFALPQSPQLFKQLLMVGGLDKYYQIAKCFRDEDLRADRQPEFTQLDIEMSFISEEEIISFNESLIKKIWKEVLNINFNNAFPRMTWQAAMDNYGTDRPDTRYQMLLKDLGGVLGNIGFNIFTKAIKSGGYIKSITVKGGNSSISNVRIKPGGDIFKVAQDAGAGGLAFIRVKGDELETIGAIKNNLSEEHIADILKITEAKDGDLILLGAGDKQIVNQSLDRVRQYIAKELNLIDKSKWNFLWVTDFPMFERNEDENRYEALHHPFCSPKNIKSKDSENLKKEIESSTANAYDLVLNGLELGGGSLRIHEANLQRQVLKTVGLTDKEIDEKFGFLIEALEMGAPPHGGIAFGLDRITMLIIGADSIRETIAFPKNQQAKCLLTNAPSNVSESQLKELDIEITIDE

SEQ ID NO: 186070 - protein, 583 aa, Unknown
  Bacterial polypetide isolated from the Sargasso Sea
MTIRTHNCGELNNNHIDKTVQLSGWVNSIRTHGQIIFIDIRDRFGKTQVILSSDELIEIGKTLSNEDVIHVSGKVSSREKDLINPDLSTGEIEVLVEKIDLLSTADPMPLSIQDREASSEEHRLKYRYLELRNSSLQNNLIIRHKTAQVVRNFLSENNFLEIETPVLMKSTPEGARDYLVPSRVHNGQFYALPQSPQMYKQLFMISGLDRYFQIVKCFRDEDLRSDRQPEFTQIDLEMSFVDEAEVRNLVQNLIVKVFKEIINVDLNDFPILPYKEAIEKYGTDKPDLRFEMLINDFKPFSDKSDFKAFSSCEAVRMIHIQEADKFSRKVIDEMDAYAQSIGAKGLAWYKVNNGDFEGGISKFFDSELRNEIISNFGIKDNSICFMIGDNLNNSLKILGKVRSRLGDILNLKDNSLFAPVWIVDFPLFDWNDETERFDSVNHPFTAPKDSDIENVLSNPGDIISKGYDIVINGYEVAGGSIRIHDHKLQKDIFKIMNLSDKEISEKFGFFIDALKYGTPPHGGIAFGLDRLVMLLAGVTNIRDVIAFPKTTSASALMEEAPNLVSEEQLNELGIKIVDDEKNV

SEQ ID NO: 186071 - protein, 433 aa, Unknown
  Bacterial polypetide isolated from the Sargasso Sea
MRTNFCGELNKKFIGKEVTICGWIHRRRDHGGVIFLDIRDTTGIVQIVIRPETKETFKIAEQVRSEFVLKATGNVEERPKDSENTTLTTGEIEIDCSSIEVLNTAETPAFPLDQSSEVGEDVRLKHRTLDLRRPIMQENLRLKSKLTKSIRDYLEKHSFVDIETPILTKATPEGARDYLVPSRTNPGNFFALPQSPQLFKQMLMISGFDRYYQIARCFRDEDLRADRQPEFSQIDIEASFVEENDVMKISEGMVKHAFKEVLNFEIKEIPKINWSDAMEHYGSDKPDLRNPLRLVEIGEIFKEEEFKVFSDPANDPESRIAALVIENGDSVGRGQVDRYTDFVKEFGAKGLAYIRVEEADISGLNSPILKYLSEKCLKSILKDLNLKKGSLVFFGAGDKKTVNDYMSKLISRVGDDLNLLEDGYKFCWVTDFP

SEQ ID NO: 186072 - protein, 313 aa, Unknown
  Bacterial polypetide isolated from the Sargasso Sea
MGWVSSVRDHGNLIFIELRDTDSRIQLVLDAEKVELDTFKSEYYISIDGEFIKRDPAMINESQAFGEFEINVKNFNILSKSKTLPFQLDDSVDTEENIRLQYRYLDLRREDMKKNIITRSETFKSIRGTMNELGFLELDTPTLTKSTPEGAKDFLVPSRKQNGAFYALPQSPQMYKQLFMVSGFDKYYQIAKCYRDEDSRKDRQPEFTQLDLEISNGSPEIVREVTESIVKNLLTDVFEFDVEIPFIDMTYDEAINTYGTDKPDLRIKNKIKDFTNIFEKTEIKFIKSALENNGFVKGFVTEDILSRSQIDEL

SEQ ID NO: 186073 - protein, 534 aa, Unknown
  Bacterial polypetide isolated from the Sargasso Sea
MKSHYCGEITSSNLKEEVTICGWVHRRRDHGGVIFLDVRDIKGICQAVVNPDNKESFKLAESIRNEYVVQINGVVRNRLEGTINKNMHTGEIEIEVKNIDILSKANTPVFPIDEYQEVNEDVRLKNRVLDLRRPEMNERIITRSKITSLIRNYLDKNDFHEIETPILTKATPEGARDYILPSRVQPGSFYALPQSPQLFKQLLMMGGLNKYYQIARCFRDEDLRADRQPEFTQIDIEASFVEQKEIMQISEKMIKNIIKEFCDETLDKFEVLNWHDAMEEYGCDKPDLRIPLKLIEISDLVKDEEFKVFAEPAKDQNSRVVAMRVPNGNSLSRGQIDDYTKFVSKLGAKGLAYIKINDVKDLENGIQSPILKFLKSETISNIVDVLKVKTDDLIFFGAGPQSVVNLSMSSLIKKLGEDLNLYSSKWAPCWIVNFPMFEENAEGDLTPLHHPFTLPQCSKKELLEDPKKSIAHAYDVVLNGYEIGGGSLRIFDKDMQQSIFSILNISKEEADKKFGFLLKALSSGCPPHGGIAFG

SEQ ID NO: 186074 - protein, 599 aa, Unknown
  Bacterial polypetide isolated from the Sargasso Sea
MVKYRTHNCNELKESDENKDVKLAGWINRKRDHGNVLFIDLRDHYGVTQCVIEKTNTKLLKEFESLRAESVIKIHGKVIKRDKETINESLLTGKIEISVDALEVLSAANELPMPVFGENDYPEDIRLKYRFLDIRREELHNNIVLRSSIISYIRKLMSEAGFLEMQTPILTASSPEGARDYLVPSRIHPGKFYALPQAPQQFKQLIMAGGFDKYFQIAPCFRDEDARADRSPGEFYQLDMEMAFVEQDDVFNAIEPVLSSVFKKFSNFKVTDLPFPRITYKEAMKKYATDKPDLRNPIEVCDITQEFSDDDVEFKAFKKVIDAGGRVLGIPAPKSSMQPRSFFDNLNNWAKKEMNAPGLGYIIFEEVDGILTGKGPIAKFIPSNIQLEIAKKANLNSGDSIFFACDKGKLVYDIAAAARNKIGEILDLIEKDVFRFCWIIDFPMYEQDRDTGKIDFSHNPFSMPQGGLEALENSDPLDVLGYQYDIVCNGIELSSGAIRNHIPEIMYKAFEISGYTKKQVQDKFGGMINAFSYGVPPHGGIAPGIDRIVMLLAQEKNIREVILFPMNQQAQDLMMLAPAEVDDKTLDELNLKVIPNEED

SEQ ID NO: 186075 - protein, 587 aa, Unknown
  Bacterial polypetide isolated from the Sargasso Sea
MKILSKDISEKDIDKTVTLSGWVNKRRDHGGIIFVDLRDHTGIVQIVFNPDNKDIFKDAEILRSEFVISVTGTITARSEDTINKDISSGKIEVVADHLTILNNSETPPFMINDHNVSEDLKLQYRYIDLRSRKLQNNLKFRSDLLKVIRDYFHENEFIDVETPILTKTTPEGARDYLVPSRLKKESFFALPQSPQIFKQTLMIGGIEKYYQIARCFRDEDLRSDRQPEFTQLDVELAFATEEKIINLTEKLFHKIFRDIFSVNDVVFNKMTYEDAMENYGCDKPDLRNPLKMISIKEDIKDTKFKVFSDPANTQDGKVVALRVPGGNKLSRKDIDVLTEMLKEFGAKGLAYLKCDDINDISEGINSPIKKFLDDEIVKKIIGKTNAESGDIIFFSAGNKDVVNLSMSCLIKELGKQLNMLSDEWKFLWITDYPLFERQSGTNAPTPLHHPFTAPVNVHDLDKNNIFEIKSRAYDLVLNGAEIGGGSIRIHSSKLQSKVFELLGLSKEEVDNKFGFFVNALSMGCPPHGGIAFGIDRIVMMLLKTDSIRDVIAFPKTQSASCLMTDAPSSVSNEQLSELGIKTIKNPK

SEQ ID NO: 186076 - protein, 219 aa, Unknown
  Bacterial polypetide isolated from the Sargasso Sea
GSELRNEIINNFGIKDNSICFMVGDELNNSLKILGKVRSRLGDMLNLKDNNLFSPVWIVDFPLFDWNDETKRFDSVNHPFTAPKDSDIENVLSNPGEIISKGYDIVINGYEVAGGSIRIHDHKLQKDIFKIMNLSDNEISEKFGFFIDALKYGTPPHGGIAFGLDRLVMLLAGVTNIRDVIAFPKTTSASALMEEAPNVVSEEQLNELGIKILDDEKNI

SEQ ID NO: 186077 - protein, 309 aa, Unknown
  Bacterial polypetide isolated from the Sargasso Sea
MYRSHNCGELKISDVGKNVKLAGWVQKIRNKGFLIWIDLRDRYGITQLIINSEKSSKKVIESVKDIGREFVIQVEGEVIKREAINKNISTGEIEILVSEISVLNSSKLPPFTIENDTDGGEELRMKYRYLDLRRSILKDNIIFRNELTFQVRKYLKEQGFIDIETPYLIKSTPEGARDFVVPSRINPGEFYALPQSPQTFKQLLMVSGFDKYVQIVKCFRDEDLRADRQPEFTQIDCEMSFVNQEDVLNTFEGLVQNLFKVCIGASLEKFDRISYSDAMELYGSDKPDTRFGMQFLNLSEKAKGSGFKI

SEQ ID NO: 186078 - protein, 479 aa, Unknown
  Bacterial polypetide isolated from the Sargasso Sea
TVIMVSGIINERPKDSINTNLSTGELELKVEDLQVLNQIKNNLPFPVSIHDYENTKEELRLKYRYLDLRRGKLLENLKTRHKIIKVAREFLDNFGFTEVETPLLTKSTPEGARDFLVPARLSNGEFFALPQSPQLFKQLLMVGGLDKYYQIAKCFRDEDLRADRQPEFTQLDIEMSFISEEEIISFNESLIKKIWKEVLNINFNNAFPRMSWQAAMDNYGTDRPDTRYQMLLKDLGGVLGDIGFNIFTKAIKSGGYIKSITVKGGNSSISNVRIKPGGDIFQVAQDAGAGGLAFIRVKGDELETIGAIKNNLSEEHIADILKITEAKDGDLILLGAGDKQIVNQSLDRVRQYIAKDLNLIDKSKWNFLWVTDFPMFERNEEENRYEALHHPFCSPKNIKSKDSENLKKEIESSTANAYDLVLNGLELGGGSLRIHEGNLQREVLKTVGLSDQEIDEKFGFLIEALEMGAPPHGGIAFGL

SEQ ID NO: 186079 - protein, 231 aa, Unknown
  Bacterial polypetide isolated from the Sargasso Sea
KNNEISAKGPVGKFFSKESLEEIMQKTGAKIGDSIFLACNNQKELERVTSLAREKIANDLDLIDNDSFAFCWIVDYPMFERDEQTNKIKFSHNPFSMPQGDLDKINFEKPLDILAFQYDIVCNGIELSSGAIRNHIPDLMYKLFSIAGYNKKQVDEKFSGMINALSYGAPPHGGIAPGIDRIVMLLANEKNIREVTMFPMNQNAQDLMMNAPSNVNESQLKELNLSLKLKK

SEQ ID NO: 186080 - protein, 604 aa, Unknown
  Bacterial polypetide isolated from the Sargasso Sea
MRSHSCGDLRSDAIDSSVLLSGWVDRRRDHGGVIFIDLRDRSGTVQITVDPDMGAEAFAVAEHLRNETVLQVEGRVRARPDESRNERLATGEVEVLAQHLKVLNAPSRNLPFAVSVHDDEQVREELRLRHRYLDLRRERMRRNLNLRHQTVQTARRFLEDEGFIEVETPVLTRSTPEGARDYLVPSRVCGGEWFALPQSPQLFKQLLMVGGLERYYQVARCFRDEDLRADRQPEFTQLDMEMSFLDQEQILDLNERLIARIWKVVKGVELPLPLPRMTWHEAMERYGTDRPDTRYGMELVGVSDIVADMGFKVFSGAVAAGGSVKCITVPGGNDKVSNVRIKPGGDVFSEAQKAGAGGLAFIRVREGGEIDTIGAIKDNLSDEKKAELIRRTGAQPGSLILFGAGDTATVNKALDRVRQYLAKELEMVPAEAWNFLWVVDFPMFEFNADENRLEALHHPFCAANPEDLGDDPAQWSERLPKARAQAYDLVLNGLELGGGSLRIHDAALQNQVLQTIGLAQEEAQEQFGFLLEALEMGAPPHGGIAFGLDRMVMLLAGEESIRDTIAFPKTQQARCLMTSAPGGANDKQLEELHVASTWVEPEEN

SEQ ID NO: 186081 - protein, 404 aa, Unknown
  Bacterial polypetide isolated from the Sargasso Sea
FYALPQAPQQFKQLIMISGFDKYFQIAPCFRDEDARSDRSPGEFYQLDLEMSFVEQEDVFKVVEKLMVNLFKNFSSKKLIHEKFPRISYEEAMLKYGSDKPDLRNPLIISDLTKIFTRDDVTFEIFKKLVKKGSKVRCIVAKNTKDKSRNFFDNIDKWAKEQGASGLAYFTLEKNTKITGKGPVGKFFSEEALKEIMKITSAEIGDSIFFACGNIHEVQSISSLARDKIAKDLDLIDESKFAFCWIVDYPMFELDEKTKKIKFSHNPFSMPQGDINKLNFDKPLEIKAYQYDIVCNGIELSSGAIRNHLPELMYKLFSIAGYNNKQVNEKFSGMINALSYGAPPHGGIAPGIDRIVMLLANEKNIREVTMFPMNQNAQDLMMNAPSEVSEDQLKELNLSLKKKK

SEQ ID NO: 186082 - protein, 593 aa, Unknown
  Bacterial polypetide isolated from the Sargasso Sea
MKKRTHKCNEISKDLIGKEISIAGWIRRRRDHGGVIFFDVRDETGLVQVVYNPELKEIFELAESCRNEFVIYSKGKVRERPDGTVNENLISGKVEIEANELTILNTSLPLPFQLDEYSSVGEETRLKFRFLDLRRDEMQSNLRLRAKASQVLREFLDLNDFIEIETPLLTKATPEGARDYVVPSRTFPGSFFALPQSPQLFKQTLMASGFERYYQFAKCFRDEDLRADRQPEFTQLDIESSFVDASDIINLVTEMIKHVFKESLDIDLGDFPVLTYSEAIELYGIDKPDLRNPLTLIEVKDLFKDSDFKVFSEPANDEESRIAALSVPKGETLTRKQIDDYTEFVGNYGAKGLAYIRVEDPSKGKEGLQSPIIKFIDDEIIKKLLKVLDVKKGDIIFFGAGKRNVVNDSLAALRNLLGKDLDLLESDWAPCWVVDFPMFEKNSKGELTPLHHPFTAPRGSIDELKAEPLNALTDAYDVVLNGTELGGGSVRIYDHEMQKVVLSLLGINEEQAEEKFGFLTSALQHGCPPHAGLAIGFDRMIMLMTNSESIRDVIAFPKTQTASCLLTDAPGEASNEQLDELHIKFHGLEKEKK

SEQ ID NO: 186083 - protein, 393 aa, Unknown
  Bacterial polypetide isolated from the Sargasso Sea
MYRDLMCGKISSTNEGKKVKLAGWVSRRRDHGQLIFIDLRDKSGIMQIVFNPETSQETHEKAKNLRSEWVISVTGTVNRRIEGAENKEISTGDYEMTVESMDVLSKSKTPPFEISDNKEVSEEVRLKYRFLDLRRESMQNKLNLRHKVTRFIWDDLSSKGFTHIETPILIKSTPEGARDYVVPSRVNNGSFYALPQSPQQMKQMLMVSGCDRYFQIARCFRDEDLRADRQPEHTQLDLEMSFVHQNDVIDVVESLYIDLIKNIDKTIKVDSSFEKLTYSAAMDRFGTDKPDMRFGMELSNFTNIAQSIESNVISNSLKSGGILKGLVAKNLSKYGRRDFDRLTDKVKEQGAGGLIYISIPEDIDGEITLDKTSGPLNKFYSEKNFQDIRNLTS

SEQ ID NO: 186084 - protein, 568 aa, Unknown
  Bacterial polypetide isolated from the Sargasso Sea
MDISDLSKLKNKEKVNDLRGWVDTIRHHGGLMFFELRDHETKVQIVTDNPEQFDNLKNEFYVSVTGILVKRKKENVNKEVLFGDLEIELSNLEIISESKTLPFQIEDNIETDEQIRLKHRYLDIRRKEMNNNIIARSNTFKSIREVMNKLNINELDTPTLIKSTPEGAKDFIVPSRKSPGSFYALPQSPQMYKQLFMLSGLKNYYQIAKCYRDEDSRKDRQPEFTQLDIEISNGDPKIVQKIIESTMKHVLKTVYSIEVKTPFTKITYDEAMSLYGTDKPDLRIKETITDFTNIFMDTEISFIKETIKNNGTVRGFLINNLLSRSEIDNLDKLLKNEGSPGLGWFKIENKKVSGPLAKILNEKENNELVKNDNCTMLFQSGKQDESSHYLDTLRRKIYSIPNENTYEFVWIDDFPYFEIENGELQPSHHPFTSPKDTSEFLSNPNDAKALHYDLVLNGIELGSGSQRINDPKLQKEVLSKWGLSESDINDRFGWFIEALSYGSPQHAGFAVGIDRFIAEMMNADSIRDVIPFPKTQSGLDPLTNAPSNLSILELQEYNISIESIENEE

SEQ ID NO: 186085 - protein, 583 aa, Unknown
  Bacterial polypetide isolated from the Sargasso Sea
MALRTHNCGELNKNHIDQTVKLSGWVNSIRTHGQIIFIDLRDRFGKTQIILNSDELIKIGKTLSNEDVVCIEGKVSSRSKDLINPDLETGEIEVLVEKMNVLSNAEPLPMSIQDRDASSEEHRLKYRYLELRNNDLQKNIIIRHNTAQTVRNFLSDNKFLEIETPVLMKSTPEGARDYLVPSRVHNGRFYALPQSPQMYKQLFMISGLDRYFQIVKCFRDEDLRSDRQPEFTQIDLEMSFVDEKDVRLIVEKLLTKVFKEVINIELKEFPILSYHDAIEKYGTDKPDLRFGITIEDFKPFSNKSGFKAFSDCDSVRIISVPNSEFFTRKIIDELDSYAQSLGAKGLAWFKVNNNEFSGGISKFFDSNLTKEIIDSLKLEDNSICFMIGDKLNTSLHVLGKIRSKLGDLLELKDNSIFSPVWIVDFPLFMWNEETQRYDSVNHPFTAPKDSDLSDVNSNPSEVISKGYDIVINGYEVAGGSIRIHDHSLQKDIFKIMDLSDEEISEKFGFFIDALKYGTPPHGGIAFGLDRLVMLLAGVSNIRDVIAFPKTTSASALMEEAPNLVSEEQLDELGIKILDDEKDV

SEQ ID NO: 186086 - protein, 425 aa, Unknown
  Bacterial polypetide isolated from the Sargasso Sea
MIGKEIELSGWINKRRDHGGLLFIDLRDRTGLIQVVFDPENIKENEFHWNQFRSEWVIQVKGIVQARPEGTENSNMTTGKIELIAKDYKVLNISKTLPFELTDFKEETDELLRLKYRYLDLRRPQKYEMLNLRHKVVKYIRDYLDKDGFLEVETPILIKSTPEGARDFVVPSRNNKGQFYALPQSPQQLKQLLMVSGVDKYFQIVKCFRDEDPRADRQPEFTQLDLEMSFVTQEDVLNLTEKMFSGLVNSLDLNKKINMPFQRMKYDVAMNLYGTDKPDLRFDMQIKDFTQQSSGNTFKVLSDTVKNGDSVKGIVAPTEGNYSRKKIDSLVEYVKELGGSGLIWIVLEEDYNSSNFDFKSIVKKYLDDEYVKSIAKSCEATKGDMILLVAGEEKSSLEILGALRNKLGKDLDLIDESQLNFCFIT

SEQ ID NO: 186087 - protein, 464 aa, Unknown
  Bacterial polypetide isolated from the Sargasso Sea
MNKFRTHKCNELRKEKVGDEVILSGWINKKRDHGNLLFVDLRDNYGITQCIIDKENSNFKILEKIQLETVIKIVGKVVERSKESINNDIETGEIEVVIKNFQILGECKELPLPVFTDREYAEEIRLKYRFLDLRRKKIHENIILRSKVISFIRNEMNKLGFLEFQTPILTSSSPEGARDFLVPSRLNPGKFYALPQAPQQFKQLVMVSGFDKYFQIAPCFRDEDARADRSPGEFYQLDLEMSFVEQEDVFNVVEKLFVNTFKKFSNRKLLFNQFPRISFKESMIKYGTDKPDLRNPLIIYDITEIFLREDVSFEIFKKLVKSGSKVRCIVTKNTINKPRSFFDNIDKWAKEQGASGLAYFTIEKDKEISAKGPVGKFFSKDSLNEIMIKTEAKVGDSIFLACGKLEEVEKITALARDKIGKDLGLIDENVFAFCWIVDYPMYEIENQTNKIKFSHNPFSMPQGD

SEQ ID NO: 186088 - protein, 289 aa, Unknown
  Bacterial polypetide isolated from the Sargasso Sea
MKSHYCGEITSSNLKEEVTICGWIHRRRDHGGVIFLDVRDIKGICQAVVNPDNEKSFKLAESIRNEYVVKIKGIVRKRLEGTINKNMHTGEIEIEVKDLIILSKANTPVFPIDEYQEVNEDVRLKNRVLDLRRPEMNERIITRSKITSLIRNYLDKNDFHEIETPILTKATPEGARDYILPSRVQPGSFYALPQSPQLFKQLLMIGGLDKYYQIARCFRDEDLRADRQPEFTQIDIEASFIDQDEIMKISEKMIKDIIKEFCGDKLEKFKIINWHDAMRDYGCDKPDLR

SEQ ID NO: 186089 - protein, 100 aa, Unknown
  Bacterial polypetide isolated from the Sargasso Sea
GSVRIHNSDMQKVIFDILGIDRKEANERFGFFIDALKYGTPPHGGIAFGFDRLVMLLAGTNNIRDVIAFPKTTSAMSLMDGAPSPVSKTQMKELGIQIKK

SEQ ID NO: 186090 - protein, 353 aa, Unknown
  Bacterial polypetide isolated from the Sargasso Sea
MSEQRDCLCADLDATSVDREIRLCGWVQRRRDHGGVIFIDLRDRSGLVQVVFDPDREQQFAVAESVRSEYVLQVVGRVRLRPEGTVNADLPTGEIELLGLEITVLNSADPLPFPIEDPDTGEALRLRYRYLDLRSDRMQHNLRLRHQVIRALRGYLDDRDFVEMETPVLTRSTPEGARDYLVPSRVHPGQFFALPQSPQLFKQLLMVSGFERYYQIARCFRDEDLRADRQPEFTQLDIEMSFVEESDIMSLMEEMVRSVFESVLSVTLPDPLPTLTYAEAMQRFGTDRPDLRIPLELVDIADLMAEVEFKVFAGPATTPGSRVAVLRVPGGAALSRQQIDGYTEFVKQFGAGG

SEQ ID NO: 186091 - protein, 232 aa, Unknown
  Bacterial polypetide isolated from the Sargasso Sea
MQSPILKFLPDAVVQQVMQRSGAEDGDLLFFGADRARVVNDALGGLRIRLGHDLGLVAEGWQPLWVVEFPLLEEDSDAGRWVALHHPFTAPHPEDVPLLESDRGAVRSRAYDLVLNGTEIGGGSIRIHQSAIQQKVFEALGLDEAQAKAQFGFLLDALRYGAPPHGGIAFGIDRIVSMAAGEDSIRDVIAFPKTQKASCLLTDAPGEVDAEQMRELGLRLSSAAQTGGTTAG

SEQ ID NO: 186092 - protein, 322 aa, Unknown
  Bacterial polypetide isolated from the Sargasso Sea
KISLDNDFERITYDDSIRRFGNDRPDMRFGLELEDITDIFKDTEFKVFKDVVKNNGVIKCLKVKDANLSRKDIDELTIFAQSNGAKGLAWIKVNGEELQSPIIKFFSENEITFLKKNQDLSDRDILFFGAGSIDEVNKYMSAVRLKLGEDLNLMNKNDFKFVWVTDFPLFIKDGAAVTSVHHPFTEPIAHDFNSDEILQVKSNAYDIVLNGTELGGGSIRIHRKELQEKIFGILNISEKEYKNNFGFLLSALESGTPPHGGLALGLDRILMFLTGANSIRDIIAFPKTQKASCLLTEAPSKVFSEKQLEELGINLIIPDEEQ

SEQ ID NO: 186093 - protein, 245 aa, Unknown
  Bacterial polypetide isolated from the Sargasso Sea
MKTNFRTDYCATFNESNEGEEVSITGWSSTVRDHGGVIFIDVRDKSGIIQIVSDPELFPEAHKTIEKIRNEFVINVKGKIRLRSDNSVNPKLPTGKIEILAEHVEIFNTCVPLPFQIEDEIDTDENIRLKYRYLDLRRPSISKNFILKSETMRVIRDYFHEHNFIDIETPYLTKSTPEGARDYLVPSRVHQNHFFALPQSPSILKQILMTSGFDRYFQIVRCFRDEDLRADRTPEFTPVDFEMSF

SEQ ID NO: 186094 - protein, 303 aa, Unknown
  Bacterial polypetide isolated from the Sargasso Sea
TPRFELKLVDLSDIASECGLRVFSEVVKKGGLVKAIRVPGGADLSRKALDDLTDFAAIYGAKGMAWIKRNEEGWQSPIAKFFSEEHQAALEKRTSMEVGDLVLFCADKPRIVHDTLGNLRKEIARQRGLIPENEFRFVWVTDFPLFEYSEAEKRFVSSHHPFTMPNLEDLEAYGQDQPERIRSRAYDITLNGVEIGGGSIRIHRGDIQDQVFKLLKLEEDEIESKFGFLMKALSYGAPPHGGIALGFDRIMMFLLNTESIRDVIAFPKTQRASCLMTEAPSNVSEDQLEELRLRIRASAVKQN

SEQ ID NO: 186095 - protein, 207 aa, Unknown
  Bacterial polypetide isolated from the Sargasso Sea
LLLKLKENDSIFFICDKLKDAQLFSGKVRERICNDLNLLNENSFEFCWIVDFPMYEIDEKTNKIQFSHNPFSMPQGEMEALEKKDPLDIKAYQYDIVCNGVELSSGAIRNHKPEIMYKAFDIAGYSKKDLEEKFSGMLNALKFGAPPHGGSAPGIDRIVMLLADEPNIREVIAFPMNQQAMDLMMDAPATINKERLEELGIKLIDKN

SEQ ID NO: 186096 - protein, 313 aa, Unknown
  Bacterial polypetide isolated from the Sargasso Sea
YFERITYQESMQRFGNDRPDMRFDLELKDITNFFKETEFKVFKQVIEANGIIKALKVEKSSLSRKEIDELTVFAQENGAKGLAWIKVNEDGLQSPIIKFFSDNELNNIKKEMNLDIGDIMFFGAGPEEEVNKYLSAVRLKLGKDLNLIKNGEFKFVWITDFPLFIKEGKHLNSVHHPFTMPKDEINDTNISSVRSCAYDVVLNGIELGGGSLRIHKRKLQEKIFNLLKISKEESKDNFGFLLDALESGTPPHGGLALGLDRILMFLTNSDSIRDVIAFPKTQKSSCLLTNAPSKVFSEKQLLELGIELIESED

SEQ ID NO: 186097 - protein, 198 aa, Unknown
  Bacterial polypetide isolated from the Sargasso Sea
LGAGDKQIVNQSLDRVRQYIAKELNLIDKSKWNFLWVTDFPMFERNEDENRYEALHHPFCSPKNIKSKDSENLKKEIESSTANAYDLVLNGLELGGGSLRIHEANLQRQVLKTVGLTDKEIDEKFGFLIEALEMGAPPHGGIAFGLDRITMLIIGADSIRETIAFPKNQQAKCLLTNAPSNVSESQLKELDIEITIDE

SEQ ID NO: 186098 - protein, 477 aa, Unknown
  Bacterial polypetide isolated from the Sargasso Sea
LKLEILNKSENPPFKINDPHVNEDQRLQFRYLDIRNDKMQNNIRFRSKLVASIREYFYTRDFIDVETPVLTKTTPEGARDYLVPSRIHERKFFALPQSPQLFKQTLMVGGIDKYFQIAKCFRDEDLRSDRQPEFTQLDVEMSFVSEEDIILLVEGLCNKIFKDLMPSQGKLVFERMSYDQSLQSYGCDKPDLRNPLKLIEIKEIVKDSEFKVFSDHVMDQESRIVALKVPNGIALSRKDIDELTNLVKKFNAKGLAYLKCEKINDIDNGIVSPIKKFLDSNLIKDILNAVSAKDGDLVFFSADHKDIVNSSMSVLIKKLGSQLNLLTNEWKFLWILDYPLFEKDSDDNPTSLHHPFTAPSDPADLTAEDIYSIKSRAYDLVLNGNEIGGGSIRIHSKDIQLKIFELLNIEKNEIDKKFGFFLKALSYGCPPHGGIAFGIDRLVMLLLNLESIRDTIAFPKTQSSSCLMTDAPSDVDT

SEQ ID NO: 186099 - protein, 534 aa, Unknown
  Bacterial polypetide isolated from the Sargasso Sea
FSIAEGCRNEFVIRAKGIVRKRPEGTVNKGLPTGMVELNSSVLEILNPSKPLPFSLDEHTSVGEETRLKYRFLDLRREEMQRNLRLRSKVSQEIRKFLEKNEFLEIETPILTKATPEGARDYIVPSRTYPGSFFALPQSPQLFKQTLMASGFEKYYQFAKCFRDEDLRADRQPEFTQLDLECSFVASQDIMDLITEMIRKVFKKAIDVDLGDFPVLTYKEAIKKYGSDKPDLRNPLQFVEVKELFTDSDFKVFSDPANSVDSRIAALRVPNGEKLTRKQIDDYTNFVGQFGAKGLAYIRVIDLSSSKEGLQSPILKFIDEKIIEELLTKLECQNGDIIFFGAGKTNVVNESLSSLRDLVASDLDLLNKDWAPCWIVDFPMFEYNKSGELTPLHHPFTSPTSLDDIEKDPTRTLSDAYDVVLNGTELGGGSVRIHESEILYKVLSLLGIEQKEAQEKFGFLLSALEHGCPPHAGLAIGFDRMIMLMTNSDSIRDSIAFPKTQSASCLLTEAPGSASIEQLDELNISIDIDTEEEM

SEQ ID NO: 186100 - protein, 445 aa, Unknown
  Bacterial polypetide isolated from the Sargasso Sea
SYIRNEMIKLGFLEFQTPILTSSSPEGARDFLVPSRLNPGKFYALPQAPQQFKQLIMVSGFDKYFQIAPCFRDEDARADRSPGEFYQLDLEMSFVEQEDVFNIVEKLMVNTFKNFSDKKLMYDTFPKIPYSEAMLKYGSDKPDLRNPLIINDITEIFSREDVSFDIFKKLVKSGSKVRSITTKNTKDKPRSFFDNIDKWAKDQGASGLAYFTFEKDNKISAKGPVGKFFSEDALLEIMKITKSELGDSIFLACGKQNELEKITALARDKIAKDLDLIDDDTFAFCWIVDYPMFEKDELTNKIKFSHNPFSMPQGELKDKDFENPLDILAYQYDIVCNGIELSSGAIRNHKPDLMYKLFSIAGYNKAEVDEKFSGMINALSYGAPPHGGIAPGIDRIVMLLANEKNIREVTMFPMNQNAQDLMMNAPSEINQDQLKELNLSIKTKN

SEQ ID NO: 186101 - protein, 202 aa, Unknown
  Bacterial polypetide isolated from the Sargasso Sea
SRRPTDGRYGENPNRLQHYYQYQVIIKPSPKNIKQLYLKSLAAIGIDVKNHDIRFVEDDWESPTLGAAGLGWEVWCDGMEITQFTYFQQMTGIECKPVPVEITYGLERLCMFVQGKNNVFDLDWNKEGVKYKEVFFQAEKEFSAYNFEFANTDTLLKHFENTENECKSLLEKKLSLPAYDQCLKASHIFNLLDARGVIGVAE

SEQ ID NO: 186102 - protein, 300 aa, Unknown
  Bacterial polypetide isolated from the Sargasso Sea
HYASALEKQYVLADFEARKDKVRQQLEDAAKNLSLKPDYDEELLEEIASLVEWPVVLQAGFDKGFLEVPKEALIYTMKDDQKYVPLLDSDGALSNTFLFVTNIESHDASQVISGNEKVIRPRLADAEFFFNSDKKTTLESRLESLETVLFQKQLGTLKEKSERISALSAFIASQIDANETQAARAGLLAKTDLMSNMVMEFPDVQGVMGKYYALNDGEDAPVAEALYEQYMPRFAGDALPSSGVSASVALADKLDTLVGIFGIGQLPKGDKDPFALRRAAIGVLRIVTELSLPLDLETLV

SEQ ID NO: 186103 - protein, 247 aa, Unknown
  Bacterial polypetide isolated from the Sargasso Sea
MEETNTELFEKIVKVAQARGFVFNASSIYGGLRSSYDYGPLGVLLKNNISNYWWNDINNENEISIFPVDTAIIQSSEVWKASGHLAEFSDPMVDHKPTGERYRADQVPDDIDKADLTEPRQFNLMFETGIGPVKNENSTVYLRPETAQGIFVNFENVLRTMRAKIPFGIANIGKSFRNEITPGQFIFRTREFEQMEIEFFCKEEDENKWFDYWVKKRMEWYKSIGIPDSSLRLREHSNNELAHYASK

SEQ ID NO: 186104 - protein, 140 aa, Unknown
  Bacterial polypetide isolated from the Sargasso Sea
MVSKKKTKNPKSFISFQDTILNLQKYWSKKGCVILQPYDLEVGAGTFHPATTLRSLGPKPWKTAYVQPSRRPTDGRYGENPNRLQHYYQFQVLIKPSPKDIKKMYLNSLSSVGIKYEEHDIRFVEDDWESPTLGAAGLGW

SEQ ID NO: 186105 - protein, 313 aa, Unknown
  Bacterial polypetide isolated from the Sargasso Sea
CPQCGVSLAEIDQSGPKLRFVQNIPGQPATDLLPGIVDAALAALPIPKRMRWGARKTEFVRPTQWLVMLLGEQVVPCEILSQQAGNLSRGHRFHHPDQVTIASPAAYAETLRSAHVIADFAERREIIKTRVDALAAEQQGTAIVPADLLDEVTALVEWPVPLVCSFEERFLEVPQEALISTMQDNQKYFCLLDAAGKLLPRFITVSNLESRDPAQIVEGNEKVVRPRLTDAEFFFKQDKKQPLETRNERLANVVFQADLGSVFEKAQRVSSLAGVIAAKIGGDAERAARAGLLSKCDLATEMVGEFPELQGIA

SEQ ID NO: 186106 - protein, 177 aa, Unknown
  Bacterial polypetide isolated from the Sargasso Sea
TKNQKDYSLSATVLSNDKSNSKLAINDPGSKEWVIPYVIEPSAGVDRGVLALLNEAYTEERLENDDTRIVLKLDPRLAPIKVAVIPLKKNNSEIVKLAHKIKDSIQSLRIGRIVIENTGNIGKSYRKHDEIGTPICITVDFDSLENEDVTIRDRDTMEQIRQPISKVSEFVKQQINK

SEQ ID NO: 186107 - protein, 151 aa, Unknown
  Bacterial polypetide isolated from the Sargasso Sea
MASKKKNSEIQTFQDTILNLQKFWAKNGCIILQPYDIEVGAGTFHPATTLRSLGPKPWRSAYVQPSRRPTDGRYGENPNRLQHYYQFQVIIKPSPKNIKRLYLSSLNAIGIKHNDHDIRFVEDDWESPTLGAAGLGWEVWCDGMEITQFTY

SEQ ID NO: 186108 - protein, 208 aa, Unknown
  Bacterial polypetide isolated from the Sargasso Sea
MASKKKNSKIQTFQDTILNLQKFWAKNGCVILQPYDIEVGAGTFHPATTLRSLGPKPWRSAYVQPSRRPTDGRYGENPNRLQHYYQFQVIIKPSPKNIKKLYLSSLNAIGIKHNDHDIRFVEDDWESPTLGAAGLGWEVWCDGMEITQFTYFQKMAGMDCKPISVELTYGLERLCMFTQKKKNVFDLVWNDEGILYKDVFLQAEKKNF

SEQ ID NO: 186109 - protein, 105 aa, Unknown
  Bacterial polypetide isolated from the Sargasso Sea
MASKKSKKKPKFQTFQDTILNLQKYWSKHGCIILQPYDMEVGAGTFHPATTLRSLGPKPWKAAYVQPSRRPTDGRYGDNPNRLQHYYQFQVIIKPSPIKYKKTFI

SEQ ID NO: 186110 - protein, 326 aa, Unknown
  Bacterial polypetide isolated from the Sargasso Sea
DELVSLCKRRGFIFQSGEIYGGLQGIYDYGPMGVELKKNIKDSWWSSMVYKRDDIEGLDASILTNPKVLKYSGHEDTFSDPLVDCKDCNGRFRSDHLDDSKCPLCDSTNLTAPRPFNLMFKTTVGPVDDGKNFAYLRPETAQHIFTNFKNVLDSNPKNLPFGIAQIGKAFRNEITPRNFIFRVREFEQMELEFFVKNGDDEKWHEYWLEERLSWWEDQGVPRSSLEILDVPEDDLSHYSKKTYDLMYKFPHGVEELEGIANRTDFDLGSHSKNQNEFEITAKVTNNKESNSKLAVHNLDKKKWEIPYVIEPSAGVDRAFLAILNEA

SEQ ID NO: 186111 - protein, 264 aa, Unknown
  Bacterial polypetide isolated from the Sargasso Sea
VREFEQMELEFFVKPGSDDEWHKYWVDKRIEWWETQGISKKNLHPMEVEQSELSHYSKATVDIMYEFPHGKEELEGIANRTDFDLGSHTKNQKDYNINSDVKKNEHSTTKLGVQNLEEKTSYIPYVIEPSAGVDRGLLAILNEAYTIETLDDDNTRTVLKLKPHLSPIKAAVIPLKKNNEQIVSKAKAIKNELQNLGMGRVILENSGNIGKNYRRHDEIGTPICITVDFETLDDDSVTVRDRDSMSQERVASKDLNQFYQKYFH

SEQ ID NO: 186112 - protein, 238 aa, Unknown
  Bacterial polypetide isolated from the Sargasso Sea
TKPWKAAYVQPSRRPTDGRYGKNPNRLQHYYQYQVIIKPSPENIKQIYLKSLSTIGIQSKDHDIRFVEDDWESPTLGAAGLGWEVWCDGMEITQFTYFQKMTGIDCKPISVELTYGLERICMFVQQKKNVFDIDWNNDGVKYGDVYLQSEKEFSAYNFEHANTDSLLKNFEIAETECKSLLEKKLSLPAYDQCLKASHIFNLLDSRGVIAVAERTGYINRIRDLAKGSGSIWLENQEK

SEQ ID NO: 186113 - protein, 255 aa, Unknown
  Bacterial polypetide isolated from the Sargasso Sea
MEVGAGTFHPATTLRSLGTKPWKAAYVQPSRRPTDGRYGDNPNRLQHYYQFQVLIKPSPENIKKLYLNSLSNIGIDHNDHDIRFVEDDWESPTLGAAGLGWEVWCDGMEITQFTYFQQMAGFDCKPVSVEITYGLERICMFTQKEKNVYDLLWNDEGVKYHEVFHQAEKEFSAYNFEHANVETLLKMFEMHESEAKDLVEKKISLPAYDQCLKASHVFNILDARGAISVAQRAGYIARIRDITKSAAGVWLDSQK

SEQ ID NO: 186114 - protein, 298 aa, Unknown
  Bacterial polypetide isolated from the Sargasso Sea
MVSKKKNKKQKFQTFQDTILNLQKFWSKHGCIVLQPYDMEVGAGTFHPATTLRSLGPKPWKAAYVQPSRRPTDGRYGDNPNRLQHYYQFQVIIKPSPLNIKKLYLNSLSVIGINPKYHDIRFVEDDWESPTLGAAGLGWEVWCDGMEITQFTYFQQMAGFECKPISVEITYGLERICMFTQQKKNVYDLIWNEEGVEYREVFFQAEKEFSAYNFDFANTKNLFKIFDMLENEAKSLVEKKISLPAYDQCLKASHVFNILDARGAISVAQRAEYIGRIREITKLVATIWVDTQRIKCQN

SEQ ID NO: 186115 - protein, 253 aa, Unknown
  Bacterial polypetide isolated from the Sargasso Sea
GRGYISSGNTLRSLGPKSWKAAYVQPSRRPTDGRYGKNPNRLQHYYQYQVIIKPSPKNIKQIYLKSLEAIGIKSKDHDVRFVEDDWESPTLGAAGLGWEVWCDGMEITQFTYFQKMTGIECKPISVELTYGLERICMFVQGKKNVFDIDWNNNGIKYRDVYFQSEKEFSAYNFDHANTDFLLKNFEIAEKECKSLLEKKLPLPAYDHCLKASHIFNLLDSRGVISVAERTGYINRIRDLAKGSGSVWLENQEK

SEQ ID NO: 186116 - protein, 325 aa, Unknown
  Bacterial polypetide isolated from the Sargasso Sea
TNWTDVKQFNLMFNTKVGASAESATELFLRPETAQGIFLNYLNVQKTGRMKIPFGIAQIGKAFRNEIIARQFIFRMREFEQMEMQFFVKPGTQKEWYEKWKKNRMEWHLSIGINKNNYRFHDHDKLAHYADAACDIEFNFPFGFKELEGIHSRTDFDLANHEKFSSKQIKYFDPEDESKYIPYVVETSIGLDRMFLAVFSNSLSFESLEDGSQRTVLKIPKILAPNQCAILPLVKKDGLADFAKELKNQLKVKFKLIYDEKDAIGRRYRRQDALGTPFCITVDHQTLDDKTITIRDRDSMKQKRIKVDELENFLFKSFEISNWLR

SEQ ID NO: 186117 - protein, 250 aa, Unknown
  Bacterial polypetide isolated from the Sargasso Sea
MVSKKKESKKKLQSFQETIFNLQKFWSKKGCIVLQPYDMEVGAGTFHPATTLRSIGPKPWKVAYVQPSRRPTDGRYGDNPNRLQHYYQFQVLIKPSPDNIKKLYLNSLSTIGIDHNEHDIRFVEDDWESPTLGAAGLGWEVWCDGMEITQFTYFQQMAGYECKPVSVEITYGLERICMFIQQEKNVYDLLWNDEGVKYKDVFHQAEKEFSAYNFEHANIDSLFKMFDMHETEAKSLVEKKISLPAYDQCL

SEQ ID NO: 186118 - protein, 92 aa, Unknown
  Bacterial polypetide isolated from the Sargasso Sea
MPKNIQSTRDPKNSFQDLILMLQDFWSSNGCVILQPYDMEVGAGTFHPGTILRALGEDTWNAAYVQPSRRPTDGRFGENPNRLQHYYQFQVV

SEQ ID NO: 186119 - protein, 88 aa, Unknown
  Bacterial polypetide isolated from the Sargasso Sea
GFEQYEKEAQNLLALEKPLPLPAYERILKAAHSFNLLDARKAISVTERQRYILRIRTLTKAVAEAYYASREALGFPMCQRGSNENKQG

SEQ ID NO: 186120 - protein, 300 aa, Unknown
  Bacterial polypetide isolated from the Sargasso Sea
MTHNSNIVGLDSSIMVHPDVWEASGHVANFNDPMTDNKDNKKRYRVDDLLLQQKNKVIDALCEMMSIENNNDNDTIDKISSTLLNDANKYNNALESAGVIDPFSGNVGKWTQATQFNLMFKTNAGPSEKTGKSIYLRPETAQGIYINYLLVQNSMRLKVPFGIAQTGKAFRNEIIARNFIFRTREFEQMEMQYFVHPSEDESSMNFWKKQRMDFYSSELGISNENLKFHQHSKDALAHYAKDAFDIEYNFPFGWGEVEGIHNRTDFDLKEHEKLSGKNMMYFDAIKNEKYHPYIIETSTG

SEQ ID NO: 186121 - protein, 147 aa, Unknown
  Bacterial polypetide isolated from the Sargasso Sea
MASKKIKKKPKFQTFQDTIINLQKFWSKNGCVILQPYDMEVGAGTFHPATTLRSLGPKPWKAAYVQPSRRPTDGRYGDNPNRLQHYYQFQVIIKPSPINIKKLYLNSLSVIGINHKEHDIRFVEDDWESPTLGAAGLGWEVGVMEWK

SEQ ID NO: 186122 - protein, 191 aa, Unknown
  Bacterial polypetide isolated from the Sargasso Sea
MGLNSMPATSMDQLVALCKRRGFIFPGSEIYGGLQGTYDYGPLGVELKNNLKAAWWRAMIYERDDIEGLDASILGHRMVFQHSGHEATFSDPMVDCRACKSRFRADHLKNNQCEHCGSTDLTDPRPFNMMFKTQVGPMEDSASIAYLRPETAQDIFINFKNVLDSSPHHLPFGIAQIGKAFRNEITPRNFI

SEQ ID NO: 186123 - protein, 146 aa, Unknown
  Bacterial polypetide isolated from the Sargasso Sea
RITYGLERLAMYIQGVDSIYDLVWTDGPLGRVTYGDVFHQNEVEQSTYNFEHADVPALFAYFDQCEKESQYLIEQGLALPAYEKVMKASHAFNLLDARHAISVTERQRYILRVRTLAKACAEAYYATREKLGFPLCKNNNSAKQEA

SEQ ID NO: 186124 - protein, 217 aa, Unknown
  Bacterial polypetide isolated from the Sargasso Sea
MAELVALCKRRGFIFQSSEVYGGFGGCWDYGPLGVELKLNIKNSWWRSMTFREDIVGLDSTILMHPDIWKASGHVDGFSDPLVDCKQCKERFREDQIDLNAPCPKCGAKDSFTESRDFNLMFKTQVGPVEDSSSVAYLRPETAQGIFVNFINVQSTMRKKLPFGIAQIGKAFRNEITPGNFIFRMREFEQMEMQYFLTPGNQMEAMEEWKEYRWQWH

SEQ ID NO: 186125 - protein, 193 aa, Unknown
  Bacterial polypetide isolated from the Sargasso Sea
MQKFDVKTFQGLILQLQDYWSRQGCTIIQPLDMEVGAGTSHPMTCLRALGPEPIACAYVQPSRRPTDGRYGENPNRLQHYYQFQVIIKPSPDNIQELYLGSLKELGMDPGIHDIRFVEDNWENPTLGAWGLGWEVWLNGMEVTQFTYFQQVGGLECKPVTGEITYGLERLAMYIQGVDSVYDLVWSDGPLARP

SEQ ID NO: 186126 - protein, 145 aa, Unknown
  Bacterial polypetide isolated from the Sargasso Sea
MNFENLLIELGTEELPPKALRKLAESFLANFTEELIKADLAFKSAVWYAAPRRLAINVTELAIAQADKIVEKRGPAVSSAFDAEGKPTKAAEGWARGNGITVDQAERLVTDKGEWLVYNAKVEGVETKSLIAAMAQRALDKLPIP

SEQ ID NO: 186127 - protein, 135 aa, Unknown
  Bacterial polypetide isolated from the Sargasso Sea
GLERLAMYIQGVDSVYDLVWTDGPMGRITYGDVFHQNEVEQSTYNFEHADVDFMFALFDQCEKMCQHLLSLEKPLPLPAYEQVMKASHAFNLLDARHAISVTERQRYILRVRTMAKAVAESYYQAREALGFPMCK

SEQ ID NO: 186128 - protein, 121 aa, Unknown
  Bacterial polypetide isolated from the Sargasso Sea
MASKKIKKKPKFQTFQDTIINLQKFWSKNGCVILQPYDMEVGAGTFHPATTLRSLGPKPWKAAYVQPSRRPTDGRYGDNPNRLQHYYQFQVIIKPSPINIKKLYLNSLSVIGINHKEHDIR

SEQ ID NO: 186129 - protein, 229 aa, Unknown
  Bacterial polypetide isolated from the Sargasso Sea
QPSRRPTDGRYGKNPNRLQHYYQYQVIVKPSPLNIKQVYLKSLAAIGIQSKDHDIRFVEDDWESPTLGAAGLGWEVWCDGMEITQFTYFQKMTGIDCKPISVELTYGLERICMFVQGKKNVFDIDWNSDGVKYGDVYLQSEKEFSSYNFDYANTDFLMKSFEIAEKECQSLLEKKLPLPAYDQCLKASHIFNLLDSRGVIGVAERTGYINRIRDLAKGAGSAWLEKQEK

SEQ ID NO: 186130 - protein, 233 aa, Unknown
  Bacterial polypetide isolated from the Sargasso Sea
DGRYGENPNRLQHYYQFQVILKPSPNETQALYLGSLKAIGLNPDLHDIRFVEDDWESPTLGAWGLGWEVWCDGMEVSQFTYFQQVGGIECNPVPLELTYGLERLAMYIQGVENVYDLDWDGVPESEGGKNYGDIFKRAEVEFSGWNFEKADTEMLFGHFRDAEAECGRLLALDTPLALPAYDQCMKASHLFNLLDSRGVISVTERAAYIGRVRALAISCCKAWVGSRESATNG

SEQ ID NO: 186131 - protein, 275 aa, Unknown
  Bacterial polypetide isolated from the Sargasso Sea
DTFTDPLVDCFSCKSRWRADQLLENNKCPNCKSEDLTDPRPFNLMFKTAIGPVDDGSSFAYLRPETCQQIFTNFKNILDSTSRTVPFGIAQMGKAFRNEITPRNFIFRVREFEQMELEFFVEPGTDDKWHEYWINKRINWWIDQGVRKENLKTIEVEKNELAHYSKRTVDINYLFPHGEEELEGIANRTDFDLGSHTKNQNDFNIDSKVMKNSSSTTKLAVQNLEEKNWYIPYVIEPSAGVDRGVLALLNEAYQEENIDKENKRILLSLKPHLSP

SEQ ID NO: 186132 - protein, 301 aa, Unknown
  Bacterial polypetide isolated from the Sargasso Sea
KNNLKQAWWKSMVYERDDIEGLDASILSAPVVLQQSGHEDTFSDPLVDCRKCKARFRSDQIENNECPDCKSKDLTEPRPFNLMFKTAIGPVDDGSSFAYLRPETCQQIFTNFKNITDSTSRVVPFGIAQIGKAFRNEITPRNFIFRVREFEQMELEFFVKPGSDDEWHKFWVDKRIEWWETQGISKKNLHPMEVEQSELSHYSKATVDIMYEFPHGKEELEGIANRTDFDLGSHTKNQKDYNISSDVKKNEHSTTKLGVQNLEEKTSYIPYVIEPSAGVDRGLLAILNEAYTIETLDDDNT

SEQ ID NO: 186133 - protein, 242 aa, Unknown
  Bacterial polypetide isolated from the Sargasso Sea
LRSLGIQPWKTAYVQPSRRPTDGRYGENPNRLQHYYQFQVLIKPSPENIKRLYLNSLTTIGIHHNDHDIRFVEDDWESPTLGAAGLGWEVWCDGMEITQFTYFQQMAGYECKPVSVEITYGLERICMFTQQQKNVYDLLWNDEDIKYREVFHQAEKEFSAYNFEHANVEQLFKMFDMHESEAKSLVEKKVSLPAYDQCLKASHVFNILDARGAIGVAQRAGYIGRIRDITKSAAGIWIDSQN

SEQ ID NO: 186134 - protein, 110 aa, Unknown
  Bacterial polypetide isolated from the Sargasso Sea
MLKKKKKDNSKGQTFQDIIISLQKFWVKYGCVLLQPYDLEVGAGTFHPATTLRSLGPNPWKAAYVQPSRRPTDGRYGENPNRLQHYYQFQVIIKPSPKNIKNIYLKSLSA

SEQ ID NO: 186135 - protein, 209 aa, Unknown
  Bacterial polypetide isolated from the Sargasso Sea
MPKIIKDKKKTPITFQNLIFNLQKFWGKYGCIILQPYDLEVGAGTFHPATTLRSLGPKPWKAAYVQPSRRPSDGRYGKNPNRLQHYYQYQVIIKPSPKNIKQVYLKSLSAIGIQSKDHDIRFVEDDWESPTLGAAGLGWEVWCDGMEITQFTYFQKMTGIDCKPISVELTYGLERICMFVQGKKNVFDIDWNNNGVKYRDVFLQSEKEF

SEQ ID NO: 186136 - protein, 172 aa, Unknown
  Bacterial polypetide isolated from the Sargasso Sea
MPEEIFDKVVNIAQSRGFVFNASSIYGGLRSSYDYGPLGVLLKKNIENMWWKSISNLEVEIYPVDTAIIQSSDVWKASGHVGEFTDPMVDHKPTGERFRADQIPDHIKKEDLTEPRQFNLMFQTNIGPVENENSTVYLRPETAQGIFVNFENVLRTMRAKIPFGIGNIGKSF

SEQ ID NO: 186137 - protein, 143 aa, Unknown
  Bacterial polypetide isolated from the Sargasso Sea
MASKKIKKKPKFQTFQDTIINLQKFWSKNGCVILQPYDMEVGAGTFHPATTLRSLGPKPWKAAYVQPSRRPTDGRYGDNPNRLQHYYQFQVIIKPSPINIKKLYLNSLSVIGINHKEHDIRFVEDDWESPTLGAAGLGWEVWC

SEQ ID NO: 186138 - protein, 263 aa, Unknown
  Bacterial polypetide isolated from the Sargasso Sea
FWSDEGCLIMQPYDTEKGAGTMNPHTFLRAIGPEPWSVAYAEPCRRPTDGRFGDNPNRAQHYFQYQVIIKPSPEGIQEKYLTSLESLGINPRNHDIRFVEDNWESPTLGAWGVGWEVWLDGMEVTQFTYFQQCGGLDCNPIPIEITYGLERIAMFLQDKESIWDLNWNKSLNYSDIWLQFEKSQCSFNFTESSPDNLRKLFEIYQDEANSLIEKKLTYPALDFVLKCSHTFNLLDARGVISVTDRAQYIEKIRKLAREVASSW

SEQ ID NO: 186139 - protein, 195 aa, Unknown
  Bacterial polypetide isolated from the Sargasso Sea
EWPVPLVCSFEERFLEVPQEALISTMQDNQKYFCLLDANGRLLPRFITVSNLESKDPAQIVEGNEKVVRPRLTDAEFFFKQDKKQPLETRNERLANVVFQADLGSVFEKAQRVSSLAGVIAAKIGGDAERAARAGILSKCDLATEMVGEFPELQGIAGYYYAKHDGEADDVALALNEQYMPRGAGAELPSTLTGA

SEQ ID NO: 186140 - protein, 226 aa, Unknown
  Bacterial polypetide isolated from the Sargasso Sea
MVIIQIGAQHYFQYQVIIKPSPEGIQEKYLTSLESIGINPRNHDIRFVEDNWESPTLGAWGVGWEVWLDGMEVTQFTYFQQCGGIDCNPIPIEITYGLERIAMFLQDKESIWDLNWNKNLKYSDIWLQFEKSQCSYNFTESSADNLRKLFEIYQAEAISLTEKKLTYPALDFVLKCSHTFNLLDARGVISVTDRAQYIEKIRKLAREVASSWMDERNTLNFPLLKK

SEQ ID NO: 186141 - protein, 97 aa, Unknown
  Bacterial polypetide isolated from the Sargasso Sea
MVSKKKNKKYKFQTFQDTILNLQKYWSKHGCVILQPYDLEVGAGTFHPATTLRSLGSKPWKTAYVQPSRRPTDGRYGENPNRLQHYYQFQVLIKPSP

SEQ ID NO: 186142 - protein, 259 aa, Unknown
  Bacterial polypetide isolated from the Sargasso Sea
YDLEVGAGTFHPATTLRSLGPKPWKAAYVQPSRRPTDGRYGKNPNRLQHYYQFQVIIKPSPKNIKQIYLKSLSSIGIIAKDHDIRFVEDDWESPTLGAAGLGWEVWCDGMEITQFTYFQKMTGIECKPISVELTYGLERICMFVQQKKNIFDIDWNSEGVKYKDVYFQSEKEFSAYNFDHANTDFLLKNFEMAESECKSLLEKKLSLPAYDQCLKASHIFNLLDSRGVISVAERTGYINRIRELAKGSGSIWLDNQIEK

SEQ ID NO: 186143 - protein, 293 aa, Unknown
  Bacterial polypetide isolated from the Sargasso Sea
MVYENDNIEGLDASILTNPLVLKYSGHEETFSDPMVDCKSCNLRFRADQVPEKCKKDDLTEPRQFNLMFKTNVGPIEDDSSYGYLRPETAQSIFSNFKNVIDSSSKSLPFGIAQIGKAFRNEITPRNFIFRVREFEQMELEYFVKPGNDESAHDDWVNKRLDWWENQGISRKSIELYEVPPNELAHYSKKTIDLMYKFPHGLEELEGIANRTDFDLGSHSKNQECLNLTASVAENKHSNSKLAIQDDSGEWFVPYVIEPSAGVERGFLAILNESYTIEDLGNGKKRTILKLMP

SEQ ID NO: 186144 - protein, 213 aa, Unknown
  Bacterial polypetide isolated from the Sargasso Sea
NRLQHYYQFQVIIKPSPNNIKSLYLKSLSSIGIDVKNHDIRFVEDDWESPTLGAAGLGWEVWCDGMEITQFTYFQQMTGIECKPVPVEITYGLERLCMFIQGKKNVFDLDWNNEGVKYKEVFFQAEKEFSAYNFEFANTESLLKSFEETEKECKSLLDKNLSLPAYDQCLKASHIFNLLDARGVIGVAERTGYIARIRELAKGCGSLWLSSQE

SEQ ID NO: 186145 - protein, 306 aa, Unknown
  Bacterial polypetide isolated from the Sargasso Sea
ARYRADELTNDIENEVWQELKCPTCGTTGMMTPPRQFNLMFKTQVGPLEETGSVAYLRPETAQGIYVNYQLVQGSTRMKIPFGIAQIGKAFRNEIIARNFIFRTREFEQMEMQYFTKPGQDDETMNVWKEKRMNFYTDSLGISSENLRFHEHGDNELAHYAKEACDIEYNFPFGWSEVEGIHNRTDYDLKNHEQFSGKNLKYFDQENNERYLPFIIETSAGLNRMLLTVLSDSYWEDTENNRKVMKFDPKIAPIKAVICPLVKKDGLPEKARAIIEILKPHFNVLYDQQGSIGKRYYRQDEAGTPL

SEQ ID NO: 186146 - protein, 262 aa, Unknown
  Bacterial polypetide isolated from the Sargasso Sea
IDDGSSFAYLRPETAQQIFTNFKNVIDSTSKQIPFGIAQIGKAFRNEITPRNFIFRVREFEQMELEYFVEPGNDEQALDEWVQKRLNWWRDQGVPIEKIELYNVPTDELAHYSKKTVDLMYMFPHGLEELEGIANRTDFDLASHSKKQDELNITSNVEKNKHSNSKMAVQDKKGDWIVPYVIEPSAGVERGILAVLNEAFVEEDLGDGKTRVVLKLKPHLSPIKAAILPLKKNNEEIVTLSKKVKNSLQKLGLGRVILENTG

SEQ ID NO: 186147 - protein, 192 aa, Unknown
  Bacterial polypetide isolated from the Sargasso Sea
MVSKKKIKKEPLTFQETILALQKYWSKQGCVILQPYDLEVGAGTFHPATTLRSLGDKPWKTAYVQPSRRPTDGRYGDNPNRLQHYYQFQVLIKPSPSNIKKLYLNSIAAIGVNVEEHDIRFVEDDWESPTLGAAGLGWEVWCNGMEITQFTYFQQMAGIECKPISVEITYGLERLCMFIQNKKNVFDLKWND

SEQ ID NO: 186148 - protein, 224 aa, Unknown
  Bacterial polypetide isolated from the Sargasso Sea
RPPDGRYGNILIDFTILISFKFNLTFTQKNIKNFYLNSLSSIGMITNFHDIRFVEDDWESPTLGAAGLGWEVWCDGMEITQFTYFQQMAGYECKPVSVEITYGLERICMFTQQQKNVYDLLWNEEGIKYKDVYYQAEKEFSAYNFEHANIDNLFKMFDMHELEAKSLVEKKISLPAYDQCLKASHIFNILDARGAISVAQRAGYIGRIRDITKAAAGIWLDSQK

SEQ ID NO: 186149 - protein, 224 aa, Unknown
  Bacterial polypetide isolated from the Sargasso Sea
MSVQDFFVEIGTEELPPKALKTLATAFSDNIVEELAKQNLSHGEVSWYAAPRRLAVRVNQLVLQQQDKVVEKRGPALAAAFDADGKPTKAAAAWAASNGITADQAERLETDKGAWLIHKALIKGESTASLLPAVISTALAKLPIAKPMRWGNSTAEFIRPVHTVTLLLGDEVVPATILGKESGRVSYGHRFHAPALVEIKNADSYLSTLEQCYVIADFAKRKAI

SEQ ID NO: 186150 - protein, 94 aa, Unknown
  Bacterial polypetide isolated from the Sargasso Sea
QRCSRTSTQCEAESQKLIEAGLALPAYEKVMKASHAFNLLDARHAISVTERQRYILRVRTLAKACAEAYFAAREKLGFPLCSDSKRRNQSTQEA

SEQ ID NO: 186151 - protein, 232 aa, Unknown
  Bacterial polypetide isolated from the Sargasso Sea
MVSKKKKTKKTKKTKFHTFQDTILNLQKYWDKKGCVILQPYDMEVGAGTFHPATTLKSLGPKPWKVAYVQPSRRPSDGRYGKNPNRLQHYYQFQVLIKPSPNNIKKLYLNSLASIGIKHQDHDIRFVEDDWESPTLGAAGLGWEVWCDGMEITQFTYFQQMAGVECNPISVELTYGLERLCMFTQEKKNVFELVWNNEGILYKDVFHQAEKEFSKYNFELANTENLFKNFDM

SEQ ID NO: 186152 - protein, 267 aa, Unknown
  Bacterial polypetide isolated from the Sargasso Sea
MPKKIKNKRNLITFQDLIFNLQKFWSKNGCVILQPYDLEVGAGTFHPATTLRSLGTKPWKAAYVQPSRRPTDGRYGKNPNRLQHYYQYQVIIKPSPQNIKQIYLKSLAAIGIQSKDHDIRFVEDDWESPTLGAAGLGWEVWCDGMEITQFTYFQKMTGIDCKPVSVELTYGLERISMFVQGKKNVFDIDWNNEGVKYRDVYFQSEKEFSAYNFDYANTEALLNNFEIAEKECKSLLEKKLSLPAYDQCLKASHIFNLLDARGVIGVA

SEQ ID NO: 186153 - protein, 249 aa, Unknown
  Bacterial polypetide isolated from the Sargasso Sea
TFHPATTLRSLGEKPWKAAYVQPSRRPTDGRYGDNPNRLQHYYQFQVLIKPSPNNIKKLYLNSIASIGINHKENDIRFVEDDWESPTLGAAGLGWEVWCNGMEITQFTYFQQMAGLECKPISVEITYGLERLCMFIQNKKNVFDLVWNNDGVSYKDVFHQSEKEFSAYNFEHADTNNLFKIFDMHEKEAMSLLEKNISLPAYDQCLKASHVFNLLDARGVISVAQRAEYIARIRDLTKQIGKVWLESQN

SEQ ID NO: 186154 - protein, 286 aa, Unknown
  Bacterial polypetide isolated from the Sargasso Sea
KKQNSTSSSGLSFQELIFELQKYWANQECVVVQPYDIEMGAGTFHPATFLRAIGPEPWRTAYVQASRRPTDGRFGDNPNRLQHYYQFQVILKPSPDNIQDLYLTSLESIGIDTKTHDIRFVEDNWESPTLGAWGLGWEVWLDGMEISQFTYFQQIGGLDCKPITGELTYGLERIAMCLQNCSNLFDLTWAITKDNKVSYGDIYHQNEVEMSRYNFDLADTDSLFSWFDICEKESVKLIQENLPIPAYEMTMKASHTFNLLDARGAISVTERQNYILRIRTLARSVQ

SEQ ID NO: 186155 - protein, 246 aa, Unknown
  Bacterial polypetide isolated from the Sargasso Sea
MPKKIKKIKKKNKKPKFKSFQDTILNLQQYWSKNGCVILQPYDTEVGAGTFHPATTLKSLGPKPWKAAYVQPSRRPTDGRYGKNPNRLQHYYQFQVIIKPSPKDIKKLYLNSLATIGINHKEHDIRFVEDDWESPTLGAAGLGWEVWCDGMEISQFTYFQQMAGLECKPVSVELTYGLERICMFTQQKRNVFDLIWNNEGIKYREVFHQAEQEFSAYNFEYANTENLFKIFEMIETRGKISNKKKK

SEQ ID NO: 186156 - protein, 232 aa, Unknown
  Bacterial polypetide isolated from the Sargasso Sea
DCICTPSRRPTDGRYGDNPNRLQHYYQFQVLIKPSPNNIKKLYLKSIATIGIDHNEHDIRFVEDDWESPTLGAAGLGWEVWCNGMEITQFTYFQQMAGIECKPVSVEITYGLERLCMFTQNKKNVFDLNWNNEGISYRDVFYQSEKEFSAYNFEHAYTDNLFKIFDMIEEEAKSLIEKKISLPAYDQCLKASHIFNILDARGVISVAQRAEYISKIRDLTKAVGKVWLESQN

SEQ ID NO: 186157 - protein, 159 aa, Unknown
  Bacterial polypetide isolated from the Sargasso Sea
MRNDNLISFQDIIARLNQFWSNQGCLILQPYDTEKGAGTMSPHTFIRVLGDLSWNCAYVEPSRRPTDGRYAQNPNRLQHYFQYQVILKPSPADIQELYIQSLESIGILRENHDIRFVEDNWESPTLGAWGVGWEVWLDGMEVTQFTYFQQCGGYDCFSI

SEQ ID NO: 186158 - protein, 199 aa, Unknown
  Bacterial polypetide isolated from the Sargasso Sea
MASKKNKKTPKFQTFQDTILNLQKFWSKHGCVILQPYDMEVGAGTFHPATTLRSLGPKPWKAAYVQPSRRPTDGRYGDNPNRLQHYYQFQVIIKPSLSKIKKLYLNSLSVIGINHKDHDIRFVEDDWESPTLGAAGLGWEVWCDGMEITQFTYFQQMAGFECKPVSVEITYGLERICMFTQQKKNVYDLIWNNQGWSIE

SEQ ID NO: 186159 - protein, 218 aa, Unknown
  Bacterial polypetide isolated from the Sargasso Sea
VSKNKNKKKQKPKFQTFQETILNLQKFWSKQGCIILQPYDMEVGAGTFHPATTLRSLGIQPWKTAYVQPSRRPTDGRYGENPNRLQHYYQFQVLIKPSPENIKRLYLNSLTTIGIHHNDHDIRFVEDDWESPTLGAAGLGWEVWCDGMEITQFTYFQQMAGYECKPVSVEITYGLERICMFTQQQKNVYDLLWNDEDIKYREVFHQAEKEFSAYNFEH

SEQ ID NO: 186160 - protein, 320 aa, Unknown
  Bacterial polypetide isolated from the Sargasso Sea
NNAPNCKSEDLTEPRPFNLMFKTAIGPVDDGSSFAYLRPETCQQIFTNFKNILDSTSRTVPFGIAQMGKAFRNEITPRNFIFRVREFEQMELEFFVKPGTDDEWHEYWINKRIEWWVNQGIKKENLKKIEVEKNELAHYSKRTVDINYVFPHGEEELEGVANRTDFDLGSHTKNQNDFKISSEVMKNSSSTTKLAVQDLEEKKWYIPYVIEPSAGVDRGVLALLNEAYREENIDKDNKRILLSLKPHLSPIKAAVIPLKKNNEELVNLSKEIKSNLQKLGLGRVVLENSGNIGKNYRRHDEIGTPICLTVDFETLEDKSV

SEQ ID NO: 186161 - protein, 272 aa, Unknown
  Bacterial polypetide isolated from the Sargasso Sea
MPVKKKVNKKNNSLSFQDIIMNLQKFWGRNGCVILQPYDLEVGAGTFHPATTLRSLGPKPWKAAYVQPSRRPTDGRYAENPNRLQHYYQYQVIIKPSPSNIKQTYLKSLEAIGIDVKNHDIRFVEDDWESPTLGAAGLGWEVWCDGMEITQFTYFQQMTGIECKPVPVEITYGLERLCMFVQEKNNVFDLDWNNNGVKYKEVFFQAEKEFSAYNFEFANTDALLQSFENTENECKSLLQKNLSLPAYDQCLKASHIFNLLDARGVIGVAERT

SEQ ID NO: 186162 - protein, 280 aa, Unknown
  Bacterial polypetide isolated from the Sargasso Sea
MQGVYDYGPLGVELKNNLKQAWWSSMVYERDDIEGLDSSILTHPNVLRYSGHEETFTDPLVDCKDCKSRFRADHIDNNKCPSCGSENLTDPRPFNLMFKTTIGPVDDGSSFAYLRPETAQQIFTNFKNVVDSTSRTLPFGIAQIGKAFRNEITPRNFIFRVREFEQMELEFFVEPGSDEEWHQKWVDERVSWWERQGVDKSKLEIIDVDKEDLSHYSKKTVDIMYEFPHGLEELEGIANRTDFDIGSHTKNQKDFEINADVIKNDDSVTKLAIQDKINNI

SEQ ID NO: 186163 - protein, 264 aa, Unknown
  Bacterial polypetide isolated from the Sargasso Sea
TNFKNVVDSTSKSIPFGIAQIGKAFRNEITPRNFVFRVREFEQMELEFFVKKGEDEDWHKYWIEERINWWVQQGINKEKIEILNVPQEELSHYSKATIDLMYEFPHGVEELEGIANRTDFDLGSHSKNQEELDIEADVLKNKDSNARLAIQNIDSKEWEVPYVIEPSAGVDRGVLAILNESYKEETLENGKNRVVLALKPHLSPIKAAVIPIKKNDSTIVDFSKQIKDNLQKLSLGRVVLENTGNIGKSYRKHDEIGTPICITI

SEQ ID NO: 186164 - protein, 136 aa, Unknown
  Bacterial polypetide isolated from the Sargasso Sea
MPKKKTKKNNFLSFQDIVMSFQKFWSKNDCIILQPYDIEVGAGTFHPATTLRSLGPKPWRAAYVQPSRRPTDGRYGENPNRLQHYYQFQVIIKPSPENIKQIYLKSLSAIGIDIKKHDIRFVEDDWESPTLGAAGL

SEQ ID NO: 186165 - protein, 197 aa, Unknown
  Bacterial polypetide isolated from the Sargasso Sea
NNIKQTYLKSLSSIGINSKDHDIRFVEDDWESPTLGAAGLGWEVWCDGMEITQFTYFQKMTGIDCKPISVELTYGLERICMFVQGKKNVFDIDWNKDGIKYKDIYLQSEKEFSAYNFDHANTDFLLKTFDVAEEECKSLLEKKLPLPAYDQCLKASHIFNLLDSRGVISVAERTGYINRIRELAKGSGSAWLETQDN

SEQ ID NO: 186166 - protein, 261 aa, Unknown
  Bacterial polypetide isolated from the Sargasso Sea
KNGCVILQPYDMEVGAGTFHPATTLRSLGPKPWKAAYVQPSRRPTDGRYGDNPNRLQHYYQFQVIIKPSPLNIKKLYLNSLSAIGINHKDHDIRFVEDDWESPTLGAAGLGWEVWCDGMEISQFTYFQQMAGFECKPVSVEITYGLERICMFTQQKKNVYDLVWNDEGIDYREVFHQSEKEFSAYNFEHANTENLFKIFDMHESEAKSLVEKNISLPAYDQCLKASHIFNVLDARGAISVAQRAEYIGRIREITKQAATIW

SEQ ID NO: 186167 - protein, 315 aa, Unknown
  Bacterial polypetide isolated from the Sargasso Sea
MKTTRGTLLTAKNMDELVSLCKRRGFVFQSGEVYGGLQGVYDYGPLGVELKNNLKNSWWSAMVFERDDVEGLDASILSKQELFKYSGHEETFSDPLVDCKSCKSRWREDLVIDGKCPGCGSTELTEPRPFNLMFKTAVGPVQNDENFAYLRPETAQHIFSSFKNVQDSTSRQIPFGIAQIGKAFRNEITPRNFIFRLREFEQMELEYFVKPGEDEAALEYWQKERLDWWELQGIDPSNIEIYDVPKKELAHYSKKTIDIMYRFPHGLEELEGIANRTDFDLGSHTKNQKDLSLSSSVAQNEESTMRLAVHDLMPK

SEQ ID NO: 186168 - protein, 129 aa, Unknown
  Bacterial polypetide isolated from the Sargasso Sea
MASKKSKEKLKFQTFQDTILNLQKYWSKHGCIILQPYDMEVGAGTFHPATTLRSLGPKPWKAAYVQPSRRPTDGRYGDNPNRLQHYYQFQVIIKPSPSNIKKLYLNSLSTIGIDHKNHDIRFVEDDWES

SEQ ID NO: 186169 - protein, 191 aa, Unknown
  Bacterial polypetide isolated from the Sargasso Sea
MASKIKTKKPRFQSFQDTILNLQKYWSKQGCVVLQPYDIEVGAGTFHPATTLRSLGAKPWKAAYVQPSRRPTDGRYGNNPNRLQHYYQFQVLIKPSPKNIKKLYLNSLATIGINHKDHDIRFVEDDWESPTLGAAGLGWEVWCDGMEITQFTYFQQMAGFECKPVSVELTYGLERICMFTQQKKNVFDLSW

SEQ ID NO: 186170 - protein, 306 aa, Unknown
  Bacterial polypetide isolated from the Sargasso Sea
PIDDGSSFAYLRPETAQQIFINFKNVIDSSSKTLPFGIAQIGKAFRNEITPRNFIFRVREFEQMELEFFVKPGTDEDWHERWVKKRLVWWEKQGVPEENIELYDVPEDELAHYSKGTIDIMYKFPHGLEELEGIANRTDFDLGSHTKNQDELNISAKVMPNNNSNTRLAIQDIESKKWVVPYVIEPSAGVERGILAIMNEAYNVEDLGEGKERIVLKLKPHLSPVKAAVIPLKKNNDDLVNKASDLKKSLQSLNIGRIVLENTGNIGKGYRRHDEIGTPLCITIDFESLEDNTATVRDRDTMKQER

SEQ ID NO: 186171 - protein, 266 aa, Unknown
  Bacterial polypetide isolated from the Sargasso Sea
NYGCVILQPYDMEVGAGTFHPATTLRSLGTKSWKAAYVQPSRRPTDGRYGKNPNRLQHYYQFQVIIKPSPDEIKSFFLKSLSTIGINHKEHDIRFVEDDWESPTLGAAGRGWEVWCDGMEITQFTYFQQMAGIECKPVSVELTYGLERICMFTQGKKNVFDLVWNNDGVKYKDVFHQAEKEYSAYNFEFANTENLLKNFEIAENECKSLLDKNLPLPAYDQCLKASHIFNLLDARGVIGVAQRTEYISRIRELAKGSGKSWLESQK

SEQ ID NO: 186172 - protein, 290 aa, Unknown
  Bacterial polypetide isolated from the Sargasso Sea
AVYDYGPLGVELKNNISKFWWKEMTQIHENIVGLDSGILMHPSIWEASGHVGAFNDPLVDCKKCKARYRADEFSHDFSSIDWNKIKCPNCGTIGDMTEPRQFNLMFKTHVGPVRETGTEAYLRPETAQGIYVNYQLIQGAMRMKIPFGIAQIGKAFRNEIIARNFIFRTREFEQMEMQYFVKPGTDDATLKDWKEKRFIFYSKYLGIDKSKLRFHKHDDNELAHYAKEAWDIEYHFPFGWSEIEGIHNRTNYDLSQHEKFSGKNLSYFDQPNNERFLPYIIETSAGLNRM

SEQ ID NO: 186173 - protein, 281 aa, Unknown
  Bacterial polypetide isolated from the Sargasso Sea
VDCKSCGLRFRADQVPKECKKEDLTEPRQFNLMFKTNVGPIDDGSNFAYLRPETAQQIFTNFKNVIDSTSKPVPFGIAQIGKAFRNEITPRNFIFRVREFEQMELEYFVMPGEDETSHDIWVQKRLEWWKKQGVPTESIELYDVPTEELAHYSKKTIDLMYKFPHGLEELEGIANRTDFDLGSHSKKQNELNIGSSVKENKHSNSKMAVQDDSGKWVVPFVIEPSAGVERGFLAILNEAYFVEELENDKTRVVLRLKPHLSPIKAAVIPLKKNNTELVEAA

SEQ ID NO: 186174 - protein, 235 aa, Unknown
  Bacterial polypetide isolated from the Sargasso Sea
QPYDTEKGAGTMSPHTFLKALGPQPCSIAYIEPCRRPTDGRYANNPNRLQHYFQYQVLIKPSPDNIQNLFIDSLKHIGIDPHQHDIRFVEDNWESPTLGAWGLGWEVWLDGMEITQFTYFQQCGGFACDPVSVEITYGLERLACFIQQKESVFDIIWQRSNNTEISYADIYKKSEIEHCTYNFETASIARLFKLFNLYEEEALHCLENNLCYPAYDACLKCSHLFNLLDARCAIS

SEQ ID NO: 186175 - protein, 138 aa, Unknown
  Bacterial polypetide isolated from the Sargasso Sea
KIIPTVIEPAGGLTRTLFALLCSCYDEDEVNDTTRTFFRFDFNIAPIQIGILPLSKKDELVEVSNDIKTLLQESYRTEIDVTQSIGKRYRRQDEIGTPYCITVDFDSLHDNTVTIRNRDSMEQERVAITDLPGFFSDI

SEQ ID NO: 186176 - protein, 300 aa, Unknown
  Bacterial polypetide isolated from the Sargasso Sea
VSLCKRRGFLFQSNDIYGGIKGLYDYGPMGVEFKNNLKQAWWKSMVYERDDTEGLDASILSSPVVLKHSGHEDTFTDPLVDCRACKSRWRADQLLENNKCPNCKSEDLTEPRPFNLMFKTAIGPVDDGSSFAYLRPETCQQIFTNFKNILDSTSRTVPFGIAQMGKAFRNEITPRNFIFRVREFEQMELEFFVKPGTDDEWHEYWINKRIEWWVNQGIKKENLKKIEVEKGELAHYSKRTVDINYVFPHGEEELEGVANRTDFDLGSHTKNQNDFKIKSEVMKNSSSTTKLAVQDLEENK

SEQ ID NO: 186177 - protein, 169 aa, Unknown
  Bacterial polypetide isolated from the Sargasso Sea
FTYFQQVGGVECYPVTGEITYGLERLAMYLQGVDSVYDLVYSDGPFGKVSYGDVFHQNEVEQSTYNFEHANVDKLFELFDFYEGEANRLMELELPLPAYEMVIKASHTFNLLDARRAISVTERQRYILRVRTLSRAIAQSYLLARARLGFPMATPELRDEVLAKLKEAE

SEQ ID NO: 186178 - protein, 270 aa, Unknown
  Bacterial polypetide isolated from the Sargasso Sea
MSSKNIKTDFQSIILNLQHYWSENGCVILQPYDKEVGAGTFHPATSLRSLGPEENWNVAYVQPSRRPTDGRYGDSSNRAQHYYQFQTIMKPSPVNSQALYLGSLEAIGLNLNDHDIRFVEDDWESPTLGAWGLGWEVWCDGMEISQFTYFQQMGGIECSPIPLELTYGLERLAMFIQNVENIFDISWLKSSTRQVFYKDIYLKNEIEFSYYNFEKADVSILYKQFEMAQEECKNLLNNDKPLSLPAYDQCLKSSHIFNLLDARRGISVSQ

SEQ ID NO: 186179 - protein, 183 aa, Unknown
  Bacterial polypetide isolated from the Sargasso Sea
LCKRRGFIFQTNEIYGGLQGVYDYGPLGVELKENLKRSWWAAMVYSRDDVEGLDASILTNKKVLKYSGHEDTFTDPLVDCKDCNNRMRADHLKDSKCLHCGSTNLTEPRPFNLMFKTNIGPVADDESYAYLRPETAQQIFTNFKNVVDSTSKSIPFGIAQIGKAFRNEITPRNFIFRVRELNR

SEQ ID NO: 186180 - protein, 263 aa, Unknown
  Bacterial polypetide isolated from the Sargasso Sea
SFRNEITPGNFTFRTREFEQMEMEFFCSPDEDEKWHEYWIDFSMEWFKKFGIREENLMIRKHGKEELPHYSKASSDIEYLFPWSWGELETISNRTDYDLKAHSELSGKDLSYFDQENNKRYTPYVIEPAMGADRSVLAFLCDAYCEEETEKETRTLLKLHPEISPIQIAVLPLSRNEKLSEYSRKIFENINKKFTAQYDDTQSIGRRYRRQDEIGTPLCVTIDFESVEEDDSVTIRHRDTMKQIRVSSDKLLDAINDQINSFS

SEQ ID NO: 186181 - protein, 262 aa, Unknown
  Bacterial polypetide isolated from the Sargasso Sea
MSAKNMEELVSLCKRRGFIFQTNDIYGGIKGLYDFGPMGVELKNNLKQSWWKSMIYERDDIEGIDASILTSPIVFKQSGHEETFTDPLVDCRSCKSRWRSDQLNENKCPQCGSNDLTDPRPFNLMFKTSIGPVDDGSTFAYLRPETCQQIFTNFKNILDSTSRNIPFGIAQIGKAFRNEITPRNFIFRVREFEQMELEFFVEPGQDDKWHQYWVDKRFEWWIEQGIKKNKIKKSTVEKKDLSHYSKSTVDIMYDFPHGGRGT

SEQ ID NO: 186182 - protein, 226 aa, Unknown
  Bacterial polypetide isolated from the Sargasso Sea
MVSKVKKEKKKIQTFQEIILNLQKFWSKKGCIILQPYDMEVGAGTFHPATTLRSLGNKPWKAAYVQPSRRPTDGRYGDNPNRLQHYYQFQVLIKPSPENIKKLYLNSLSTIGIDHNDHDIRFVEDDWESPTLGAAGLGWEVWCDGMEITQFTYFQQMAGFDCKPVSVEITYGLERICMFTQKEKNVYDLLWNDEGVKYHEVFHQAEKEFSAYNFEHANVETLFENV

SEQ ID NO: 186183 - protein, 219 aa, Unknown
  Bacterial polypetide isolated from the Sargasso Sea
MPAKSMDELVALCKRRGFIFQSSDIYGGLQGVYDYGPLGVELKNNLKATWWSSMVYERDDIEGLDAAILTNPVTLKYSGHVDTFTDPLVDCKDCKARHRADHISDATCPNCGSTNLTEPRAFNLMFKTNVGPIDDGSSYAFLRPETAQSIFTNFKNVVDSTSRKLPFGIAQIGKSFRNEITPRNFIFRVREFEQMELEYFVRPGVDEEAHESWVKSQSK

SEQ ID NO: 186184 - protein, 271 aa, Unknown
  Bacterial polypetide isolated from the Sargasso Sea
QKFWGNYGCVILQPYDMEVGAGTFHPATTLRSLGEKPWKAAYVQPSRRPTDGRYGKNPNRLQHYYQFQVIIKPSPSEIKKIFLKSLSTIGINHKEHDIRFVEDDWESPTLGAAGRGWEVWCDGMEITQFTYFQQMTGIECRPVSVELTYGLERICMFTQGKNNVYELIWNNEGVKYRDIFHQAEKEYSAYNFEFANTENLLKNFNIAESECKALLEKKLPLPAYDQCLKASHIFNLLDARGVIGVAQRTEYISRIRELAKGSGQSWLESQK

SEQ ID NO: 186185 - protein, 228 aa, Unknown
  Bacterial polypetide isolated from the Sargasso Sea
MASKKNLKIQTFQDTILNLQKFWAKNGCVILQPYDIEVGAGTFHPATTLRSLGPKPWRSAYVQPSRRPTDGRYGENPNRLQHYYQFQVIIKPSPKNIKRLYLSSLNAIGIKHNDHDIRFVEDDWESPTLGAAGLGWEVWCDGMEITQFTYFQKMAGMDCKPISVELTYGLERLCMFTQKKKNVFDLVWNDEGILYKDVFLQAEKEFSSYNFDFANVENLFKFFEMLEH

SEQ ID NO: 186186 - protein, 124 aa, Unknown
  Bacterial polypetide isolated from the Sargasso Sea
EYGKNPNRLQHYYQFQVIIKPSPKNIKQIYLKSLSAIGIVAKDHDIRFVEDDWESPTLGAAGLGWEVWCDGMEITQFTYFQKMTGIECKPISVELTYGLERICMFIQQKKNIFDIEWNNEGCKI

SEQ ID NO: 186187 - protein, 186 aa, Unknown
  Bacterial polypetide isolated from the Sargasso Sea
MSIKTNFDTPKSFQDIIFKLQEYWSEMGCAIIQAYDVELGAGTFHPATTLRALGSKPWSVAYAQACRRPTDGRYGANPNRLQHYYQFQVIIKPSPKNFQDLYLGSLKRIGIDPSSHDIRFVEDDWESPTLGAWGLGWEVWCDGMEVSQFTYFQQMCGFDCKPVSGELTYGLERLAMYILGKDHVMD

SEQ ID NO: 186188 - protein, 160 aa, Unknown
  Bacterial polypetide isolated from the Sargasso Sea
MVSKKKNILSFQDTILNLQKYWSKEGCIILQPYDLEVGAGTFHPATTLRSLGTKPWRTAYVQPSRRPSDGRYGDNPNRLQHYYQFQVLIKPSPDNIKKLYLNSLSSLGIKHEEHDIRFIEDDWESPTLGAAGLGWEVWCDGMEITQFTYFQQMGRNRMQS

SEQ ID NO: 186189 - protein, 242 aa, Unknown
  Bacterial polypetide isolated from the Sargasso Sea
MVSKKKIKKKIFQSFQDTIQSLQKYWSKQGCVILQPYDMEVGAGTFHPATTLRSLGPKPWRAAYVQPSRRPTDGRYGENPNRLQHYYQFQVLIKPSPDNIKKLYLNSLASVGIKHQDHDIRFVEDDWESPTLGAAGLGWEVWCDGMEITQFTYFQQMAGVECKPISVELTYGLERLCMFTQGKKNVFDLIWNDEGILYRDVYYQSEKEFSKYNFELANTENLFKMFDMLEKEVNSLIENKIS

SEQ ID NO: 186190 - protein, 189 aa, Unknown
  Bacterial polypetide isolated from the Sargasso Sea
MVSKKKTKNLKSFISFQDTILNLQKYWSKKGCVILQPYDLEVGAGTFHPATTLRSLGPKPWKTAYVQPSRRPTDGRYGENPNRLQHYYQFQVLIKPSPKDIKKMYLNSLSSVGIKYEEHDIRFVEDDWESPTLGAAGLGWEVWCDGMEVTQFTYFQQMAGMECNPISVEITYGLERLCMFIQGKKKMFL

SEQ ID NO: 186191 - protein, 217 aa, Unknown
  Bacterial polypetide isolated from the Sargasso Sea
PNRLQHYYQFQVIIKPSPDNIKRIFLNSLSKIGINHKEHDIRFVEDDWESPTLGAAGRGWEVWCDGMEITQFTYFQQMAGIECKPVSVELTYGLERICMFTQGKNNVFELIWNNDGIKYKDVFHQAEKEYSAYNFEFANTEHLLKNFEIAETECKSLLEKKLSLPAYDQCLKASHIFNLLDARGVIGVAQRTEFISRIRELAKGSGQTWLESQKENG

SEQ ID NO: 186192 - protein, 247 aa, Unknown
  Bacterial polypetide isolated from the Sargasso Sea
MVSKKKNKKSKFQSFQDTILNLQKYWSKHGCVILQPYDLEVGAGTFHPATTLRSLGSKPWRTAYVQPSRRPTDGRYGENPNRLQHYYQFQVLIKPSPKNIKKLYLNSLSAIGIKHKEHDIRFVEDDWESPTLGAAGLGWEVWCDGMEVTQFTYFQQMAGIECDPISVELTYGLERLCMFTQEKKNVFDLEWNNDGVLYRDVFHQSEKEFSKYNFELANADNLFKIFDMIEKESKSLIENKLSLPAYD

SEQ ID NO: 186193 - protein, 167 aa, Unknown
  Bacterial polypetide isolated from the Sargasso Sea
MVTNAPQSFQEIILRLQNYWVAQGCALMQPYDMEVGAGTFHPATTLRSLGPKPWSVAYVQPSRRPTDGRYGENPNRLQHYYQFQVLMKPSPPDFQNLYLGSLDAIGIDHQLHDLRFVEDDWESPTLGAWGLGWEVWCDGMEVSQFTYFQQVGGHECNPVSGDLTYGL

SEQ ID NO: 186194 - protein, 147 aa, Unknown
  Bacterial polypetide isolated from the Sargasso Sea
MLKKNKLNKKKSKPTPVNFQETILNLQKFWGNYGCVILQPYDIEVGAGTFHPATTLRSLGPKPWKAAYVQPSRRPTDGRYGKNPNRLQHYYQFQVIIKPSPEDIKKVFLKSLSVIGINHKEHDIRFVEDDWESPTLGAAGRGWEVWC

SEQ ID NO: 186195 - protein, 279 aa, Unknown
  Bacterial polypetide isolated from the Sargasso Sea
FVFPNSEIYGGLKASYDYGPLGVELKKAISEKWWKAMTNNSNIVGLDSSIMVHPDVWEASGHIANFNDPMTDNKDSKKRYRIDDLLSQQKSKVIDALCEMLSIENKNDSDTLDKISHTLLQESDRYSNALESAEVIDPFSGNIGKWTQATQFNLMFQTNSGPSEKSGKSIYLRPETAQGIYINYLLVQNSMRLKVPFGIAQIGKAFRNEIIARNFIFRTREFEQMEMQYFVHPSEDESSMELWKNKRISFYSEELGISKDNLKFHQHSEDALAHYAKEL

SEQ ID NO: 186196 - protein, 215 aa, Unknown
  Bacterial polypetide isolated from the Sargasso Sea
NPNRLQHYYQFQVLIKPSPENIKKLYLNSLSTIGIDHNDHDIRFVEDDWESPTLGAAGLGWEVWCDGMEITQFTYFQQMAGFDCKPVSVEITYGLERICMFTQKEKNVYDLLWNEEGVKYSEVFYQSEKEFSAYNFEHANVETLLKMFEMHETEAKALVEKKISLPAYDQCLKASHVFNILDARGAISVAQRAGYIARIRDITKSAAGVWLDSQK

SEQ ID NO: 186197 - protein, 197 aa, Unknown
  Bacterial polypetide isolated from the Sargasso Sea
MVSKKNKNNIITFQDTLMSLQKYWAKHGCVILQPYDLEVGAGTFHPATALRSLGEKPWKTAYVQPSRRPTDGRYGENPNRLQHYYQFQVLIKPSPDNIKKLYLNSISSIGIDYQEHDIRFIEDDWESPTLGAAGLGWEVWCDGMEITQFTYFQQMAGLECKPISVEITYGLERLCMFIQNKKNVFDLEWNSEGVLYK

SEQ ID NO: 186198 - protein, 243 aa, Unknown
  Bacterial polypetide isolated from the Sargasso Sea
PPDGRYGENPNRWQHYYQYQVLIKPSPPNLQELYLGSLEAIGIDIALHDIRFVEDDWESPTLGAWGLGWEVWCDGMEVSQFTYFQQVGGHDCHPVSGELTYGLERLAMYVLGIDHVMDMPFNDPDAPIALSYGDVFRQTEQEYSRWNFDVANTDVLFKQFEEAEAECEAILSHEHEDPKTGKRIVMAHPAYDQCIKASHLFNLLDARGVISVTERQAYIGRVRALAKKCADAFVQTEAGGHAA

SEQ ID NO: 186199 - protein, 223 aa, Unknown
  Bacterial polypetide isolated from the Sargasso Sea
PNRLQHYYQFQVIIQPSPEDIQNLYLESLKFIGLNPKDHDIRFVEDDWESPTLGASGLGWEIWCDGMEISQFTYFQQVGGIEVKPVASEITYGLERLAMFIQKIENVYDLDWDGIDKKKGGKTYGDIFLQQEKEFSKYNFEKSQTSSLFKQFNDAETECKNLLDDKKNLLALPAYHQCIKASHIFNLLDARGVISVSERQSYILRVRNMARSSCLAWMGKLNE

SEQ ID NO: 186200 - protein, 218 aa, Unknown
  Bacterial polypetide isolated from the Sargasso Sea
EVEKNELAHYSKRTVDINYVFPHGEEELEGVANRTDFDLGSHTKNQNDFKITSEVMKNSSSTTKLAVQDLEEKKWYIPYVIEPSAGVDRGVLALLNEAYREENVDKDNKRILLSLKPHLSPIKAAVIPLKKNNEELVNLSKEIKSNLQKLGLGRVVLENSGNIGKNYRRHDEIGTPICLTVDFETLEDKSVTVRDRDTMKQERVSIENLSEYYKKYFN

SEQ ID NO: 186201 - protein, 299 aa, Unknown
  Bacterial polypetide isolated from the Sargasso Sea
KSCPHCKSQDLTEPRPFNLMFKTSIGPVDDGNSFAYLRPETAQQIFTNFKNILDSTSRVIPFGIAQIGKAFRNEITPRNFIFRVREFEQMELEFFVEPDSDEKWHKYWINSRYNWWIEQGIDKDRLKLQNVENNELSHYSKATVDIMYKFPHGNEELEGIANRTDFDLGSHTKNQKEFNISSKINKNEDSTTKLAVQNLEKKNWFIPYVIEPSAGVDRGFLALLNEAYKEEKIDDNNTRILLALKPHLSPIKAAVIPLKRNNEQLVSQAKNIKSNLQKIGLGRVILENSGNIGKNYRRH

SEQ ID NO: 186202 - protein, 307 aa, Unknown
  Bacterial polypetide isolated from the Sargasso Sea
MSCGSTDLTDARAFNLMFKTPVGPTENEGSFAYLRPETAQHIFTSFKNVQDSTSRQIPFGIAQIGKAFRNEINPRNFIFRLREFEQMELEYFVRPGDDEAALDYWRDQRLKWWKNQGIESSSLEIYDVPRDELAHYSKRTIDIMYRFPHGLEELEGIANRSDFDLGSHTKNQNDLSLSSKTKGNDESTMRLAAQDLEAKKWYVPFVIEPSAGVDRGFLAILNEAYTVDNLGEGKERVVLKLKPHLSPIKAAVMPLKKNNESLVALSKEIKTGLQSLGKGRVFLENTGNIGKAYRRHDEVGTPYMHYG

SEQ ID NO: 186203 - protein, 259 aa, Unknown
  Bacterial polypetide isolated from the Sargasso Sea
MSFQDSILILQKYWSKQGCVILQPYDLEVGAGTFHPATTLRSLGPKPWRTAYVQPSRRPTDGRYGDNPNRLQHYYQFQVLIKPSPDNIKKLFLNSLSSLGIKCEEHDIRFVEDDWESPTLGAAGLGWEVWCDGMEITQFTYFQQMAGTECNPVSVEITYGLERLCMFIQNKKNVFELNWNDKGILYKDVFHQSEKEFSAYNFEYANTDNLFEIFDMLEDEAKNLTEKRLSLPAYDQCLKASHVFNILDSRGVISVAQRA

SEQ ID NO: 186204 - protein, 248 aa, Unknown
  Bacterial polypetide isolated from the Sargasso Sea
MKNTSMEDLVSLCKRRGFIFQSNEIYGGLQGLYDYGPLGVELKNNLKKSWWKSMIYERDDVEGIDSSILTNPLVLKYSGHENTFTDPLVDCKSCGERFRADQVPDYCKKEDLTEPRQFNLMFKTNVGPIEDGNSFAYLRPETAQNIFTNFKNVLDSNPHPLPFGIAQMGKAFRNEITPRNFIFRVREFEQMELEFFVKPGEDEEWHKKWTDLRMQWWEDQGVSKESLELYHVPSDELAHYSKATVDIM

SEQ ID NO: 186205 - protein, 230 aa, Unknown
  Bacterial polypetide isolated from the Sargasso Sea
QPSRRPTDGRYGKNPNRLQHYYQFQVIIKPSPKNIKQIYLKSLSAIGIVAKDHDIRFVEDDWESPTLGAAGLGWEVWCDGMEITQFTYFQKMTGIECKPISVELTYGLERICMFIQQKKNIFDIEWNNEGVKYKDVYFQSEKEFSSYNFDHANTEFLLKNFEIAESECKSLLEKKLSLPAYDQCLKASHIFNLLDSRGVISVAERTGYINRIRELAKGSGSIWLRSQIEK

SEQ ID NO: 186206 - protein, 120 aa, Unknown
  Bacterial polypetide isolated from the Sargasso Sea
MVSKKKKKQPKFQTFQDTILNLQKYWSKQGCIILQPYDMEVGAGTFHPATTLRSLGPQPWKAAYVQPSRRPTDGRYGDNPNRLQHYYQFQVIIKPSPKNIKKLYLNSLNTIGINHNEHDI

SEQ ID NO: 186207 - protein, 189 aa, Unknown
  Bacterial polypetide isolated from the Sargasso Sea
LKSLSKIGINHKEHDLRFVEDDWESPTLGAAGLGWEVWCDGMEITQFTYFQQMAGVECKPVSVELTYGLERICMFTQEKNNVYDLEWNKDGIKYRDVFHQAEKEFSAYNFEFANTEFLLKNFEIAESECKSLLEKKLPLPAYDQCLKASHIFNLLDARGVIGVAQRTEYISRIRELAKGSGQRWLESQK

SEQ ID NO: 186208 - protein, 265 aa, Unknown
  Bacterial polypetide isolated from the Sargasso Sea
FETSIGPVQNENSNVYLRPETAQGIFVNFENVLRTMRAKIPFGIANIGKSFRNEITPGQFIFRTREFEQMEIEFFCKEEEENKWFDFWVNKRMDWYKSIGIPEDNLRLREHSDNELAHYASKTVDIEFLYPWGWGELEGVANRGTFDLSSHEKASGKDLSYFDPESNEKIVPTVIEPAGGLTRTLFALLCSSYVEDEVNDATRTLFRFEFDIAPIQIGILPLSKKDELIEVSNDIKNLLQESYRTEINVTQSIGKRYRRQDEIGT

SEQ ID NO: 186209 - protein, 249 aa, Unknown
  Bacterial polypetide isolated from the Sargasso Sea
MPAKSMDELVALCKRRGFIFQSSDIYGGLQGVYDYGPLGVELKNNLKATWWSSMVYERDDIEGLDAAILTNPVTLKYSGHVDTFTDPLVDCKDCKARHRADHISDATCPNCGSTNLTAPRAFNLMFKTNVGPIDDGSSYAFLRPETAQSIFTNFKNVVDSTSRKLPFGIAQIGKSFRNEITPRNFIFRVREFEQMELEYFVRPGVDEESHESWVQSRVNWWIEQGINSNNLELYKVPQEELAHYSKATV

SEQ ID NO: 186210 - protein, 147 aa, Unknown
  Bacterial polypetide isolated from the Sargasso Sea
KDLTDPRPFNLMFKTAIGPVDDGSSFAYLRPETAQQIFVNFKNIVDSTSRVPPFGIAQIGKAFRNEITPRNFIFRVREFEQMELEYFVKPGSDENWHKYWVDKRLNWWADQCVKSEKLKLLEVEKKDLSHYSKATFDIMYEFPHGLE

SEQ ID NO: 186211 - protein, 215 aa, Unknown
  Bacterial polypetide isolated from the Sargasso Sea
NPNRLQHYYQYQVIIKPSPKNIKQLYLKSLAAIGIDVKNHDIRFIEDDWESPTLGAAGLGWEVWCDGMEITQFTYFQQMTGIECKPVPVEITYGLERLCMFVQGKNNVFDLDWNNDGVKYKEVFFQSEKEFSAYNFEFADTDTLLKSFENTEKECKSLLEKKLSMPAYDQCLKASHIFNLLDARGVVGVAERTGYITRIRELAKGCGALWLSSQS

SEQ ID NO: 186212 - protein, 300 aa, Unknown
  Bacterial polypetide isolated from the Sargasso Sea
MTAKTMEELVALCKRRGFIFQSNEIYGGLQGLYDYGPLGVELKNNLKQSWWREMVFDRDDVEGLDASILTKPNVLKFSGHETTFSDPMVDCKSCNQRFRADQVPDHCKKEDLTEPRQFNLMFKTAVGPVEDKNSFAYLRPETAQNIFTNFKNVVDSTSRKVPFGIAQIGKAFRNEITPRNFIFRVREFEQMELEFFVVPGTDDEWHQAWVDARLEWWEEQGVSRDSIELYDVPKDELAHYSKATVDIMYKFPHGLEELEGIANRTDFDLGSHSKNQEELNIQAAVIENSESNARLATQNL

SEQ ID NO: 186213 - protein, 281 aa, Unknown
  Bacterial polypetide isolated from the Sargasso Sea
PPAVWEASGHLENFTDPLVDCKECNGRFREDQLEDPSTCPACGATNSFTEARAFNLMFKTHAGPVEGAGHAVYLRPETAQGMFTNFKLVLETSRKKPPFGIAQVGKSFRNEITPGNFVFRTREFEQMEMEYFVPPDQADMWYEYWCEERMNWYIDLGIPKDQLRLRPHDQDELSHYSSGTSDVEFLFPWGWGELEGVANRGDYDLRQHSEHSGEKLTYFDPELGEHYIPHVIEPAAGATRSMMAFLIAAYDEETVNDDLRTVLRFDPRIAPYKIAVLPLSK

SEQ ID NO: 186214 - protein, 148 aa, Unknown
  Bacterial polypetide isolated from the Sargasso Sea
MPAKKKVKKKITTLSFQDIIMNLQKFWGKNGCIILQPYDLEVGAGTFHPATTLRSLGPQSWKAAYVQPSRRPTDGRYGENPNRLQHYYQYQVIIKPSPKNIKQTYLKSLAAIGIDVKNHDIRFVEDDWESPTLGAAGLGWEVWCDGME

SEQ ID NO: 186215 - protein, 270 aa, Unknown
  Bacterial polypetide isolated from the Sargasso Sea
EITPRNFIFRVREFEQMEMEFFVDPGSDEDWHKYWVESRLEWWIKQGVDKKRLKLEKVSKDELSHYSKATVDIMYKFPHGDEELEGIANRTDFDLGSHTKNQKEFKISSKVLDNKNSTTKLAIQDMETKKWVVPYVIEPSAGVDRGVLALLNEAYQFDEKNSRIVLALKPHLSPIKAAVIPLKRNNEDLVKAAKNIKKSLQKIGLGRVILENSGNIGKNYRRHDEIGTPLCITVDFETLENKSVTIRDRDSMEQKRITPENLKDYYINYF

SEQ ID NO: 186216 - protein, 154 aa, Unknown
  Bacterial polypetide isolated from the Sargasso Sea
SYSNIDSKEWEVPYVIEPSAGVDRGVLAILNESYKEETLENGKSRVVLALKPHLSPIKAAVIPIKKNDSTIVDFSKQIKDNLQKLGLGRVVLENTGNIGKSYRKHDEIGTPICITIDFETLENRTVTVRDRDSMEQKRVKVENLDDLLKNLLVK

SEQ ID NO: 186217 - protein, 184 aa, Unknown
  Bacterial polypetide isolated from the Sargasso Sea
MVFNLQKFWSKYGCIILQPYDLEVGAGTFHPATTLRSLGPRPWKAAYVQPSRRPTDGRYGKNPNRLQHYYQYQVIIKPSPQNIKQVYLRSLAAIGIQAKDHDIRFVEDDWESPTLGAAGLGWEVWCDGMEITQFTYFQKMTGIDCKPVSVELTYGLERICMFVQSKKNVFDIDWNSEGIKYSDV

SEQ ID NO: 186218 - protein, 227 aa, Unknown
  Bacterial polypetide isolated from the Sargasso Sea
SKEGCLIMQPYDTEKGAGTMSPHTFLRAIGPEPWSVAYAEPCRRPTDGRFGDNPNRAQHYFQYQVIIKPSPDGIQEKYLKSLESLGIEAKNHDIRFVEDNWESPTLGAWGVGWEVWLDGMEVTQFTYFQQCGGVDCQPIPIEITYGLERIAMFLQDKESIWDLNWNEDLKYSDIWLEFEKGQCSYNFSESNPENLRKLFEIYQDEANSLIEKKLTYPALDYVLKCSH

SEQ ID NO: 186219 - protein, 324 aa, Unknown
  Bacterial polypetide isolated from the Sargasso Sea
MGPVESENSTAYLRPETAQGIFVNFKFITDTQSPKLPFGIAQMGKAFRNEITPRHFIFRVREFEQMEIEFFVHPKESDSWHEYWVQERYNWWVAQGLSKENLKLEAQTGDELAHYAKATTDLLYKFPHGYEELEGIANRTDYDLASHSKNQEELSPSAKVKKNTDSTARLAMQDSETKEWFIPYVIEPSAGVDRGVLAILSEAYCEETIDNDKSRTVLKLPAHLAPVKIAVIPLAKNKPELVSYAKEIQQELQSIIKGLVLLENSGNIGKNYRRHDEIGTPVCVTVDFDTLKETTSDKALIDTVTLRDRDTLTQERIHRKDLIS

SEQ ID NO: 186220 - protein, 225 aa, Unknown
  Bacterial polypetide isolated from the Sargasso Sea
MKTTRGTLLTAKNMDELVSLCKRRGFVFQSGEVYGGLQGVYDYGPLGVELKNNLKNSWWSAMVFERDDVEGLDASILSKQELFKYSGHEETFSDPLVDCKSCKSRWREDLVVDGKCPGCGSTELTEPRPFNLMFKTAVGPVQNDENFAYLRPETAQHIFSSFKNVQDSTSRQIPFGIAQIGKAFRNEITPRNFIFRLREFEQMELEYFVKPGEDEAALEYGKKKG

SEQ ID NO: 186221 - protein, 201 aa, Unknown
  Bacterial polypetide isolated from the Sargasso Sea
MSESSLDKIISLCKRRGFIFQSSEIYGGFGAVYDYGPLGVELKNNISQTWWKFMTHNHENILGLDSGILMHPKIWEASGHVDAFNDPLVDCKHCKARYRADELVKGDFVNTKWDEIQCPKCGTTGNLTDPRQFNLMFKTNIGPIESDSDIAYLRPETAQGIYVNYLLVQGTMRQKVPFGIAQIGKAFRNEIIARNFIFRTR

SEQ ID NO: 186222 - protein, 230 aa, Unknown
  Bacterial polypetide isolated from the Sargasso Sea
MVSKSKDKILTFQDTILNLQKFWSKKGCVVLQPYDMEVGAGTFHPATTLRSLGTKPWKTAYVQPSRRPTDGRYGDNPNRLQHYYQFQVLIKPSPENIKKLYLNSLSSIGIDHSDHDIRFVEDDWESPTLGAAGLGWEVWCDGMEITQFTYFQQMAGFECKPVSVEITYGLERICMFIQQQKNVYDLLWNDDGVKYKEVFHQAEREFSAYNFEHANVESIFKMFDMHESEA

SEQ ID NO: 186223 - protein, 139 aa, Unknown
  Bacterial polypetide isolated from the Sargasso Sea
EKITPTVIEPAGGLTRTLFALLCSCYDEDEVNDTTRTLFRFDFNIAPIQIGILPLSKKDELIEISYNIKKILQENFRTEIDVTQSIGKRYRRQDEIGTPYCITVDFDSLDDNSVTIRNRDSMEQHRIPITDLLGFFSKL

SEQ ID NO: 186224 - protein, 132 aa, Unknown
  Bacterial polypetide isolated from the Sargasso Sea
MASKKNKKKPKFQTFQNTIINLQKFWSKHGCVVLQPYDMEVGAGTFHPATTLRSLGPKPWKAAYVQPSRRPSDGRYGDNPNRLQHYYQFQVIIKPSPLNIKKLYLNSLSAIGINHKDHDIRFVEDDWESPTL

SEQ ID NO: 186225 - protein, 237 aa, Unknown
  Bacterial polypetide isolated from the Sargasso Sea
MVSKTKKKTLSFQDTIFNLQKYWSKKGCVILQPYDLEVGAGTFHPATTLRSLGPKPWKTAYVQPSRRPTDGRYGDNPNRLQHYYQFQVLIKPSPKEIKKMYLNSLSSIGINHEEHDIRFVEDDWESPTLGAAGLGWEVWCDGMEVTQFTYFQQIAGVECKPVSVEITYGLERLCMFIQNKKSVFDLIWNDEGITYKDVFYQSEKEFSAYNFEYANTDNLFKIFEMLEEETKLLVEKK

SEQ ID NO: 186226 - protein, 155 aa, Unknown
  Bacterial polypetide isolated from the Sargasso Sea
MASKNKKRIKKNNFQTFQDTILNLQKYWSKQGCVILQPYDMEVGAGTFHPATTLRSLGPRPWKTAYVQPSRRPTDGRYGENPNRLQHYYQFQVLIKPSPKNIKKLYLNSLRSIGINHLDHDIRFVEDDWESPTLGASGLGWEVWCDGMEITQFTY

SEQ ID NO: 186227 - protein, 174 aa, Unknown
  Bacterial polypetide isolated from the Sargasso Sea
MVSKKKTKNPKTFISFQDTILNLQKYWSKKGCVILQPYDLEVGAGTFHPATTLRSLGSKPWKTAYVQPSRRPTDGRYGENPNRLQHYYQFQVLIKPSPKDIKKMYLNSLSSVGIKYEDHDIRFVEDDWESPTLGAAGLGWEVWCDGMEVTQFTYFQQMAGMECNPISVEITYGL

SEQ ID NO: 186228 - protein, 284 aa, Unknown
  Bacterial polypetide isolated from the Sargasso Sea
MGVELKNNLKNSWWSSMVYERDDIEGLDASILSKQELFKYSGHEETFSDPLVDCRSCKSRWREDLVKDGKCLSCGSTDLTEARAFNLMFRTPMGPVENEEGFAYLRPETAQHIFTSFKNVQDSTSRQIPFGIAQIGKAFRNEINPRNFIFRLREFEQMELEYFVRPGDDEAALDYWRDQRLRWWEDQGIEPSSLEIYDVPESDLAHYSKRTLDIMYRFPHGLEELEGIANRTDFDLGSHTKNQQDLDLVSETKKNDESTMRLAVQDIEAKKWYVPYVIEPSAGV

SEQ ID NO: 186229 - protein, 296 aa, Unknown
  Bacterial polypetide isolated from the Sargasso Sea
SFVYLRPETCQQIFTNFKNILDSTSRTIPFGVAQIGKAFRNEITPRNFIFRVREFEQMELEFFVEPGKDEKWHEYWVNQRLKWWIDQGISKDKLKKYDVGLKELSHYSKNTVDIMYDFPHGEEELEGIANRTDFDLGSHTKNQQDFNIYSKVNKNEHSTTKLAIQNLEKKTWFIPYVIEPSAGVDRGILAVLNEAYKEEKIDENNTRIVLSLKPHLAPIKAAVIPLKKNNEKIVDFAKKIKNNLQKLGLGRVMLENSGNIGKNYRRHDEIGTPICITVDFETLDHNTVTVRDRDSM

SEQ ID NO: 186230 - protein, 158 aa, Unknown
  Bacterial polypetide isolated from the Sargasso Sea
MPTKKKIKKKNNSLSFQDIIINLQKFWGRNGCVILQPYDLEVGAGTFHPATTLRSLGPKPWKAAYVQPSRRPTDGRYGENPNRLQHYYQYQVIIKPSPKNIKQLYLKSLSSIGIDIKNHDIRFVEDDWESPTLGAAGLGWEVWCDGMEITQFTYFQQM

SEQ ID NO: 186231 - protein, 242 aa, Unknown
  Bacterial polypetide isolated from the Sargasso Sea
LRSLGPNSWKAAYVQSSRRPTDGRYGENPNRLQHYYQYQVIIKPSPENIKQIYLKSLSAIGIDVKNHDIRFVEDDWESPTLGAVGLGWEVWCDGMEITQFTYFQQMTGIECKPVPVELTYGLERLCMFVQGKKNVFDLDWNNEGVKYREVFLQAEKEFSAYNFEFANTETLLKNFEACETECKSLLDKKLSLPAYDQCLKASHLFNLLDARGVIGVAERTGYINRIRELSKGCGALWLSTQI

SEQ ID NO: 186232 - protein, 93 aa, Unknown
  Bacterial polypetide isolated from the Sargasso Sea
MVSKNKNKNKKKQKLKFQTFQEIILNLQKFWSKQGCIILQPYDMEVGAGTFHPATTLRSLGTRPWKAAYVQPSRRPTDGRYGENPNRLQHYYQ

SEQ ID NO: 186233 - protein, 282 aa, Unknown
  Bacterial polypetide isolated from the Sargasso Sea
MKKIRGFFLAAKNMEELVSLCKRRGFVFQSGEAYGGLQGVYDYGPLGVELKNNLKNSWWSSMVYERDDIEGLDASILSKQELFKYSGHEETFSDPLVDCRSCKSRWREDLVKDGKCLSCGSTDLTEARAFNLMFRTPMGPVENEESFAYLRPETAQHIFTSFKNVQDSTSRQIPFGIAQIGKAFRNEINPRNFIFRLREFEQMELEYFVRPGEDEAALDYWRDQRLRWWEDQGIEPSNLEIYDVPESDLAHYSKRTLDIMYRFPHGLEELEGIANRTDFDLG

SEQ ID NO: 186234 - protein, 289 aa, Unknown
  Bacterial polypetide isolated from the Sargasso Sea
GSENLTDPRPFNLMFKTTIGPVDDGSSFAYLRPETAQQIFTNFKNVVDSTSRTLPFGIAQIGKAFRNEITPRNFIFRVREFEQMELEFFVEPGSDEEWHQKWVDERVSWWERQGVDKSKLEIIDVDKEDLSHYSKKTVDIMYEFPHGLEELEGIANRTDFDIGSHTKNQKDFEINADVIKNDDSVTKLAIQDKINNTWTIPYVIEPSAGVDRGFLAVLNEAYKIEKLENGKERTVLSLKSHLSPIKAAVIPLKRNNQDLVNKAVELKKQLQSIGLGRVVLDNAGNIGKS

SEQ ID NO: 186235 - protein, 271 aa, Unknown
  Bacterial polypetide isolated from the Sargasso Sea
ENIVGVDAAIFMHPKTWKASGHVDAFNDPLIDNKDSKKRYRADVLLEDYIEKIRIKIEKEVLKGRKRFGDDFNEDEFRRTNPNVLRNAKKILDIESDMKRFLEENNLEAIKNLIIDLGINCPVSGSKNWTDVRQFNLMFSTELGSVSGDSSKIYLRPETAQGIFVNFLNVQKSGRMKIPFGIAQIGKAFRNEIVARQFIFRMREFEQMEMQFFVKPGEEMKWYDYWKKTRIEWHNSLGLGKDKYRFHDHLKLAHYANAATDIEFDFPIGFK

SEQ ID NO: 186236 - protein, 230 aa, Unknown
  Bacterial polypetide isolated from the Sargasso Sea
YVQPSRRPTDGRYGDNPNRLQHYYQFQVIIKPSPSNIKKLYLNSLSVIGIDHKNHDIRFVEDDWESPTLGAAGLGWEVWCDGMEITQFTYFQQMAGFECKPVSVEITYGLERICMFTQQKKNVYDLIWNNENVEYREVFHQSEKEFSAYNFEHANTGNLFKMFDMFESEAKSLVEKKISLPAYDQCLKASHIFNILDSRGAISVAQRAGYIGRIREITKSVATIWVDTQK

SEQ ID NO: 186237 - protein, 129 aa, Unknown
  Bacterial polypetide isolated from the Sargasso Sea
MPKKIKKKEKKSITFQDLIFNLQKFWGKYGCVILQPYDLEVGAGTFHPATTLRSLGPKSWKAAYVQPSRRPTDGRYGKNPNRLQHYYQYQVIIKPSPQNIKQVYLKSLAAIGIQSKDHDIRFVEDDWEK

SEQ ID NO: 186238 - protein, 95 aa, Unknown
  Bacterial polypetide isolated from the Sargasso Sea
MASKKNKKKPKFQTFQDTIFDLQKFWSKHGCVILQPYDMEVGAGTFHPATTLRSLGPKPWKAAYVQPSRRPTDGRYGDNPNRLQHYYQFQVIIKP

SEQ ID NO: 186239 - protein, 199 aa, Unknown
  Bacterial polypetide isolated from the Sargasso Sea
MFKTQIGATESSSTDLFLRPETAQGIFLNYLNVQKTARMKIPFGIAQIGKAFRNEIVARQFIFRMREFEQMEMQFFIKPGTQKDWYKHWKKTRLDWHLSLGIDKSFFRFHDHEKLAHYADAACDIEFNFPFGFKELEGIHSRTDFDLSNHEKYSNKQIKYFDPTENKKYTPYVLETSIGVDRMFLAVFSSSLVSEKIDD

SEQ ID NO: 186240 - protein, 274 aa, Unknown
  Bacterial polypetide isolated from the Sargasso Sea
LIFRNFWSKKGCIILQPYDMEVGAGTFHPATTLRSLGTKPWKAAYVQPSRRPTDGRYGDNPNRLQHYYQFQVLIKPSPENIKKIYLNSLSTIGIDHNDHDIRFVEDDWESPTLGAAGLGWEVWCDGMEITQFTYFQQMAGFDCKPVSVEITYGLERICMFTQKEKNVYDLLWNDEGVKYHEVFHQAEKEFSAYNFEHANVETLLKMFEMHESEAKTLVEKKISLPAYDQCLKASHVFNILDARGVISVAQRADYIARIRDITKSVAGVWLDSQK

SEQ ID NO: 186241 - protein, 283 aa, Unknown
  Bacterial polypetide isolated from the Sargasso Sea
ISTLQRFWADQGCLVLQPYDTEKGAGTMSPHTVLRAIGPEPWAVAYAEPCRRPTDGRYGDNPNRAQHYFQFQVLIKPSPDGIQETYLRSLEALGIKAADHDIRFVEDNWESPTLGAWGVGWEVWLDGMEVTQFTYFQQCGGIDCKPVSIEITYGLERLAMYLQDVESLWELQWDSKRNYGDIWLPFEKGQCTYNFEASNPERLFKLFEIYEAEAKDLCEQGLAAPALDWVLKCSHTFNLLEARGVISVTERTATIGRIRNLARQVAESWLAEREAIGFPLLKG

SEQ ID NO: 186242 - protein, 196 aa, Unknown
  Bacterial polypetide isolated from the Sargasso Sea
LSHYSKATSDIEYLFPWGWGELQGIANRTDFDLKAHTTHSGVRLDYFDQENNEHFTPYVIEPAVGVDRIFLTLLIDAYREEEINDGKEKRTVLKLAPQIAPIQIAILPLSKNEKLVPKAKEIFTLLNQSYSCEYDDAQSIGRRYRRQDEIGTPLCITVDFDTIEKDNQVTIRDRDTMEQIRVPIEKLQDHIQNTLL

SEQ ID NO: 186243 - protein, 268 aa, Unknown
  Bacterial polypetide isolated from the Sargasso Sea
MVSKIKKKTLSFQDTIFNLQKFWSKKGCVILQPYDLEVGAGTFHPATTLRSLGPKPWKTAYVQPSRRPTDGRYGDNPNRLQHYYQFQVLIKPSPKEIKKMYLNSLSSIGINHEEHDIRFVEDDWESPTLGAAGLGWEVWCDGMEVTQFTYFQQMAGVECKPVSVEITYGLERLCMFIQNKKSVFDLIWNDEGITYKDVFHQSEKEFSAYNFEYANTDNLFKIFEMLEEETKLLVEKKISLPAYDQCLKCSHVFNILDARGVISVAQKG

SEQ ID NO: 186244 - protein, 264 aa, Unknown
  Bacterial polypetide isolated from the Sargasso Sea
TALRSLGLKPWAVAYVQPCRRPTDGRYGENPNRLQHYYQFQVLMKPSPPDFQNLYLGSLDAIGIDRQLHDIRFVEDDWESPTLGAWGLGWEVWCDGMEVSQFTYFQQVGGHDCNPVSGELTYGLERLAMYVLGVDYVMDMPFNDPSASISLKYRDIFQQTEEEYSRWNFDVANTETLFRQFDEAEQGCREILSQDALDPKSGKNITMVHPAYDQCIKASHIFNILDARGVISVTERQAYIGRIRGLAKQCADAFVLTAAGGNVK

SEQ ID NO: 186245 - protein, 233 aa, Unknown
  Bacterial polypetide isolated from the Sargasso Sea
MASKKNKKKPKFQTFQDTIINLQKFWSKNGCVILQPYDMEVGAGTFHPATTLRSLGPKSWKAAYVQPSRRPTDGRYGDNPNRLQHYYQFQVIIKPSPLNIKKLYLNSLSVIGINHKDHDIRFVEDDWESPTLGAAGLGWEVWCDGMEISQFTYFQQMAGFECKPVSVEITYGLERICMFTQQKKNVYDLVWNNEGIEYREVFHQSEKEFSAYNFEHANTENLFKIFDMHENEA

SEQ ID NO: 186246 - protein, 197 aa, Unknown
  Bacterial polypetide isolated from the Sargasso Sea
MPKKNKKKNKALSFQNLIFNLQKFWDKQGCIILQPYDLEVGAGTFHPATTLRSLGTKPWKAAYVQPSRRPTDGRYGKNPNRLQHYYQYQVIIKPSPKDIKQLYLKSLVAIGIDSKDHDIRFVEDDWESPTLGAAGLGWEVWCDGMEITQFTYFQKMTGIECKPISVELTYGLERICMFVQEKKNVFDIDWNDDGVKY

SEQ ID NO: 186247 - protein, 318 aa, Unknown
  Bacterial polypetide isolated from the Sargasso Sea
VYDYGPLGIELKNNISQLWWKEMTQHNENIVGLDSGILMHPKVWEASGHIGAFNDPLVDCKQCKSRYRADEFSDDFNSLDWSKIQCPNCGSKDCFTEPRQFNLMFKTNVGPVEDSGTEAYLRPETAQGIYVNYLLVQGAMRLKIPFGIAQLGKAFRNEIVARNFIFRTREFEQMEMQYFVKPGTDDDAMHEWKESRFQFYTHNLGITKTKLRFHQHGANELAHYAKEAWDIEYEFPFGWSEIEGVHNRTDYDLVRHEEFSGKKLSYFDQLNNERFLPYIVETSAGLNRMLLTVLADSYWEDEENNRIVMKLHPRAAPI

SEQ ID NO: 186248 - protein, 184 aa, Unknown
  Bacterial polypetide isolated from the Sargasso Sea
MVSKKLKKKQKKQKKQKFQTFQDTILNLQKFWSKNGCIILQPYDIEVGAGTFHPATTLRSLGAKPWKAAYVQPSRRPTDGRYGDNPNRLQHYYQFQVIIKPSPSNIKKLYLNSLSVIGINPKNHDIRFVEDDWESPTLGAAGLGWEVWCDGMEITQFTYFQQMAGFECKPVSVEITYGLERICM

SEQ ID NO: 186249 - protein, 296 aa, Unknown
  Bacterial polypetide isolated from the Sargasso Sea
KTAASLNVRAQMDDALLEEVTSLVEWPVVLVGSFEESFLQVPAEPLISTMKDNQKYFPLLDNNGKLQNKFIFVANIASKDPQQIISGNEKVVRPRLSDAQFFFNTDRKQKLADRLDSLKTVLFQQQLGTLAEKSERIAKVAAFVAAKIGADAAAAERAGLLSKTDLMTNMVGEFPEVQGIMGMHYARLDGESEAVALALNEQYMPRFAGDELPSRLEGAAVAIADKLDTLVGIFGIGQAPKGDKDPFALRRAAIGALRIMVDKQLPLDLVDVIAFSQQTFGSKLSNAKVAEEVLEF

SEQ ID NO: 186250 - protein, 242 aa, Unknown
  Bacterial polypetide isolated from the Sargasso Sea
MVSKKKIKKEPLTFQETILALQKYWSKQGCVILQPYDLEVGAGTFHPATTLRSLGDKPWKTAYVQPSRRPTDGRYGDNPNRLQHYYQFQVLIKPSPSNIKKLYLNSIATIGIDYHEHDIRFVEDDWESPTLGAAGLGWEVWCDGMEITQFTYFQQMAGIECKPVSVEITYGLERLCMFIQNKKNVFDLKWNNEDVSYKEIFYQAEKEFSAYNFEYANTDSLFKIFDMIQQEAKSLIEKKVSL

SEQ ID NO: 186251 - protein, 300 aa, Unknown
  Bacterial polypetide isolated from the Sargasso Sea
PLVDCKSCKSRWRADQLLENNKCPNCKSEDLTDPRPFNLMFKTAIGPVDDGSSFVYLRPETCQQIYTNFKNILDATSRTVPFGIAQMGKAFRNEITPRNFIFRVREFEQMELEFFVVPGTDDKWHEYWIDKRINWWVDQGINKENLKTIEVEKKELAHYSKRTVDINYLFPHGEEELEGIANRTDFDLGSHTKNQNEFEIDSEVMKNSSSTTKLAVQNLEEKKWYIPYVIEPSAGVDRGVLALLNEAYKEENTDKDNKRILLSLKPHLSPIKAAVIPLKKNNDELVNLSKEIKSNLQNLD

SEQ ID NO: 186252 - protein, 277 aa, Unknown
  Bacterial polypetide isolated from the Sargasso Sea
ETSVGPIVDDSSVAYLRPETAQQIYINFKNVIDSTSRSLPFGIAQIGKSFRNEITPRNFIFRVREFEQMELEFFVTPGEDEKWHKLWVDERVKWWVDQGIPKDKLELLTVTGDDLAHYSKETVDIMYQFPHGSEELEGIANRTDFDLGSHTKNQKELNINANVMENKDSNTRLAIQDENNEWIVPYVIEPSAGVDRGVLAIINEAFTIETLPDNKKRTVLKLKKHLSPIKAAVIPLKRNNEDLVKLAHNIKKSLQKHQIGRVVVENTGNIGKSYRKH

SEQ ID NO: 186253 - protein, 67 aa, Unknown
  Bacterial polypetide isolated from the Sargasso Sea
MSLEKPLPLPAYEQVMKASHAFNLLDARHAISVTERQRYILRVRTMAKAVAESYYQAREALGFPMCK

SEQ ID NO: 186254 - protein, 131 aa, Unknown
  Bacterial polypetide isolated from the Sargasso Sea
MNFENLLIELGTEELPPKALRKLAESFLANFTEELTKADLAFKSAIWYAAPRRLAINVTELAIAQADKIVEKRGPAVSSAFDAEGKPTKAAEGWARGNGITVDPAERLVDDKGEWLVYNAKVEGVETKSLI

SEQ ID NO: 186255 - protein, 93 aa, Unknown
  Bacterial polypetide isolated from the Sargasso Sea
MVYEFPELQGLMGRYYAAAAGLPDEVAQACEQHYSPLGPSDDVPEGAVARTVALADKLDTLTGFWAIDEKPTGSKDPYALRRAALGVIRIILT

SEQ ID NO: 186256 - protein, 263 aa, Unknown
  Bacterial polypetide isolated from the Sargasso Sea
MQGLYDYGPLGVELKNNLKDAWWSSMVYDRDDVEGLDASILSKPSVLKYSGHEETFTDPLVDCKKCKGRWRADHIKNKACPGCGSTDLTEPRPFNLMFKTSVGPVDDGKSFAYLRPETAQQIFVNFKNVLDSTSKSMPFGIAQIGKAFRNEVTPRNFIFRTREFEQMELEFFVERGTDEKWHDYWVKKRLSWWCEQGIPENRLKLFDVPKEDLSHYSKKTVDIMYAFPHGEEELEGIANRSDFDLGSHTKNQAGFKIHAKVSE

SEQ ID NO: 186257 - protein, 53 aa, Unknown
  Bacterial polypetide isolated from the Sargasso Sea
GKRYRRQDEIGTPYCITVDFDTLDDKSVTIRNRDTMEQERISIENLLDYFSGI

SEQ ID NO: 186258 - protein, 167 aa, Unknown
  Bacterial polypetide isolated from the Sargasso Sea
MVSKKKIKKKKFYSFQDTILNLQKYWGKQGCIILQPYDLEVGAGTFHPATTLRSLGEKPWKTAYVQPSRRPTDGRYGENPNRLQHYYQFQVLIKPSPKNIKKLYLNSLSSIGIKHKEHDIRFVEDDWESPTLGAAGLGWEVWCDGMEVTQFTYFQQMAGIECNPSIC

SEQ ID NO: 186259 - protein, 288 aa, Unknown
  Bacterial polypetide isolated from the Sargasso Sea
NLTEPRPFNLMFKTSLGPIDDGSSFAYLRPETAQNIFTNFKNVLDSSPRHLPFGIAQIGKAFRNEITPRNFIFRVREFEQMELEFFVQKGSDDEWHKKWTDLRVQWWLDQGINKDNIELLSVKGNELAHYSKATVDIMYRFPHGLEELEGIANRTDFDLGSHTKFQEDLNINSKVKQNTKSKSRLAIQDSNNNWEIPYVIEPSAGVDRGVLAVLNEAYRKEIIDNGKERVVLSFKPHLAPIKAAVIPLKRNNENLVEAASQLKSELQKRKLGRVILENTGNIGKSYRK

SEQ ID NO: 186260 - protein, 282 aa, Unknown
  Bacterial polypetide isolated from the Sargasso Sea
MAKTHLTTEGLDFQSILLNLQLYWARKGAVILQPYDMEVGAGTFHPATTLRALGPDHHWRAAYVQPSRRPTDGRFGENPNRLQHYYQFQTIFKPSPPNSQELYLGSLKAIGLDPAAHDIRFVEDDWESPTLGAWGLGWEVWCDGMEVSQFTYFQQVGGVECAPVPLELTYGLERLAMFIQGIDNVYDLDWDGVPADQGGKCYGDIFHRAEVEFSRWNFYHAETDMLLTHFRDTEAECGRLLALETPLALPAYDQCMKASHLFNLLDARGVISVTERAAYMAG

SEQ ID NO: 186261 - protein, 155 aa, Unknown
  Bacterial polypetide isolated from the Sargasso Sea
MEKLLSLSKRRGFVFQSSEVYGGLSSTWDYGPLGVELKRNVKEAWWKSVVVSREDVVGLDAAILMQRQVWEASGHLENFSDPLVECKNCHIRLREDQMQTEICPMEPSKNPEECSGELTDPMNFNLMFKTFQGPVEETASEIFLRPETAQGIFVN

SEQ ID NO: 186262 - protein, 190 aa, Unknown
  Bacterial polypetide isolated from the Sargasso Sea
VEDDWESPTLGAWGLGWEVWCDGMEVSQFTYFQQVGGHDCNPVSGELTYGLERLAMYILGVDYVMDMPFNAPKASIPLKYGDIFKQSEEEYSRWNFDVANTETLFRQFDEAEQDCIEILSQNDLDPKSGKNITMVHPAYDQCIKASHIFNILDARGVISVTERQAYIGRVRGLAKQCADAFVLTAAGGKF

SEQ ID NO: 186263 - protein, 199 aa, Unknown
  Bacterial polypetide isolated from the Sargasso Sea
MTASSMEELVSLCKRRGFIFQSNDIYGGIKGLYDYGPMGVELKNNLKQAWWKSMVYERDDIEGLDASILSAPVVLQQSGHEDTFSDPLVDCKKCKARFRADQIENNECPDCKSKDLTEARPFNLMFKTAIGPVDDGSSFAYLRPETCQQIFTNFKNITDSTSRVVPFGIAQIGKAFRNEITPRNFIFRVREFEQMELEF

SEQ ID NO: 186264 - protein, 249 aa, Unknown
  Bacterial polypetide isolated from the Sargasso Sea
MREFEQMEMQFFVRPGEELEWYEKWKKERLKWHHAIGIAKERYRFHDHTNLAHYANAATDIEYEFPFGFKELEGIHSRTDFDLKKHQEFSGKKLQYFDPEIGENYVPYVVETSIGLDRMFLAVLSHSYGQETLEDGSQRMVMRIPHFLAPYKVAVLPLLKKDGLPEKAREVLGELKFDYNCQYDEKDAIGKRYRRQDAIGTPFCITVDHQSLEDNTVTLRDRDSMQQERVSIAVLQQLLREKVTAPKLN

SEQ ID NO: 186265 - protein, 208 aa, Unknown
  Bacterial polypetide isolated from the Sargasso Sea
MIDLLTSLSKQRGFIFQSSEIYGGLGSTWDYGPLGIELKRNIKDYWWKSMVTSRQNVVGMDASILMHPDVWKASGHIDNFHDPLVDNKESKKRYRLDHLLEDQPDEVIDFFTDKLLSDMSNIKSEEDRFQAIVSALINLDKDSQSVLNESKMIDPETRKPGDWTNIRQFNLMFKTHMGPIEDSGSIAYLRPETAQGIFVNFQNVQSTS

SEQ ID NO: 186266 - protein, 283 aa, Unknown
  Bacterial polypetide isolated from the Sargasso Sea
QKAEKRFKEKFDKNQFLDTSPKVLEIQKKIDEVKARMVSAFEKDDLQEVKKIIDDMEIKCQISGTCNWTEVRHFNLMFSTKLGASEESSMDLYLRPETAQGIFLNYLNVQKTSRMKIPFGIAQTGKAFRNEIVARQFIFRMREFEQMEMQFFIKPGTQENWFNHWKDKRLSWHLNLGIDPSLFRYHDHDKLAHYADAACDIEFNFPFGFKELEGIHSRTDFDLKSHEELSGKKIQYFDPELDKNYTPYVLETSIGLDRMFLAIISNSFKVETLEDGSTRNVMS

SEQ ID NO: 186267 - protein, 266 aa, Unknown
  Bacterial polypetide isolated from the Sargasso Sea
SKQGCTILQPYDMEVGAGTFHPATALNVLGPNPLWKVAYVQPCRRPTDGRYGENPNRLQHYYQFQVIIQPSPDNIQDLYLKSLKEINLDHLLHDIRFVEDDWESPTLGAAGLGWEVWCDGMEVTQFTYFQQVGGFEVRPVAVEITYGLERLAMFIQELDDVYSIDFNGLPKSSGGKSYGDIFKDAEKEYSEYNFENANVDKLFNEFDNCVKECNDLISSEKPLVKPAYDQCIKASHIFNLLDARGVISVSERQAYILKVRNMSKMC

SEQ ID NO: 186268 - protein, 218 aa, Unknown
  Bacterial polypetide isolated from the Sargasso Sea
MTAKTMDELVALCKRRGFIFQSNEIYGGLQGLYDYGPLGVELKNNLKQAWWRDIVFDRDDVEGLDAAILTKPSVLKFSGHEDTFSDPMVDCKSCNQRFRADQVPDHCKKKDLTEPRQFNLMFKTAVGPIQDKDSFAYLRPETAQNIFTNFKNVVDSTSRKVPFGIAQIGKAFRNEITPRNFVFRVREFEQMELEFFVAPGTDDDWHNKWVDARLKWWN

SEQ ID NO: 186269 - protein, 187 aa, Unknown
  Bacterial polypetide isolated from the Sargasso Sea
MVANAPKSFQDIILRLQNYWVAHGCALMQPYDMEVGAGTFHPATTLRSLGPKPWSVAYVQPSRRPTDGRYGDNPNRLQHYYQFQVLMKPSPPDFQNLYLGSLDAIGIDSQLHDIRFVEDDWESPTLGAWGLGWEVWCDGMEVSQFTYFQQVGGHDCNPISGELTYGLERLAMYILGVDYVMDMPFND

SEQ ID NO: 186270 - protein, 253 aa, Unknown
  Bacterial polypetide isolated from the Sargasso Sea
GLRAKQAGDIVWENDMISLANNVSLDDALGPDASEPGTLTQPREFNLMFETKIGALASDDDDRAFLRPETAQGIFVNFKNVLDTSRVKVPFGIGQIGKSFRNEITPRNFTFRSREFEQMEIEFFCCPSDSGDWYRYWRDRRWQWYLDLGLTEGRLQLREHGTDELSHYSVGTADIEYAFPFLAEGEFGELEGIAHRGDFDLRSHMEGKLIRQDGQLVVETDSTGKPTHRGSGKDLSYFDDVKRERFVPHVIEP

SEQ ID NO: 186271 - protein, 225 aa, Unknown
  Bacterial polypetide isolated from the Sargasso Sea
ILKPSPDNVEELYLDSLQAIGINPMDHDIRFVEDNWEAPTLGAWGLGWEIWLDGMEITQFTYFQQVGGIECQPVSAELTYGLERIASYLQNVDDVFELEYSKGISYSAIFRQPEFEHSKYTFEVADTDMLFRHFSDYEKEANRALEQRLVFPAYDYVLKCSHTFNQLDATGAISVSARASFIRRVRNIAQSIAKLFLEERCKLAFPLMKDRKAAQKWVYQLKSKK

SEQ ID NO: 186272 - protein, 272 aa, Unknown
  Bacterial polypetide isolated from the Sargasso Sea
MASKKNKKISKFQTFQDTILNLQKFWSKHGCIILQPYDMEVGAGTFHPATTLRSLGPKPWKAAYVQPSRRPTDGRYGDNPNRLQHYYQFQVIIKPSPSNIKKLYLNSLSVIGINHKDHDIRFVEDDWESPTLGAAGLGWEVWCDGMEITQFTYFQQMAGFECKPVSVELTYGLERICMFTQQKKNVYDLIWNNEGIEYKEVFHQAEKEFSSYNFEYANTENLFKIFDMFESEALSLVEKKISLPAYDQCLKASHIFNVLDARGVISVAQRAE

SEQ ID NO: 186273 - protein, 300 aa, Unknown
  Bacterial polypetide isolated from the Sargasso Sea
QLNDNIVGIDSAIFMHPKTWVASGHVDAFNDPLIDNKDSKKRYRADVLIEEHIEKLNLKIQKEINKAEKRFTEKFDKKQFMETSSRVQEILSSVEDIKSKMVSAFENDNLAQVKNLIDELEIKCPISGTCNWTEVRQFNLMFKTKLGASEDSSMDLFLRPETAQGIFLNYLNVQKTSRMKIPFGIAQTGKAFRNEIVARQFIFRMREFEQMEMQFFIQPGSQGEWFDIWKKKRLEWHLNIGIDDNSFRYHDHDKLAHYADAACDIEFLFPFGFKELEGIHSRTDFDLKSHEKLSGKKIQY

SEQ ID NO: 186274 - protein, 242 aa, Unknown
  Bacterial polypetide isolated from the Sargasso Sea
MVSKSNKKKPKFQTFQETILNLQKFWNKHNCILLQPYDMEVGAGTFHPATTLRSLGPKPWKAAYVQPSRRPTDGRYGDNPNRLQHYYQFQVIIKPSPSNIKKLYLNSLSVIGINHKDHDIRFVEDDWESPTLGAAGLGWEVWCNGMEITQFTYFQQMAGFECKPVSVEITYGLERICMFTQQKKNVYDLVWNSDGIEYREVFHQAEKEFSAYNFEHANTNNLFKIFDMYENEAKSLVEKKIS

SEQ ID NO: 186275 - protein, 314 aa, Unknown
  Bacterial polypetide isolated from the Sargasso Sea
SGLVEWPVALLGEVDTAFSDLPAEVLQASMKEHQKFFSLKNSKTGKIERFITVANIEAADNGETILKGNQKVLYARLSDAKFFWENDIRLIQKDGLDAWLGKLVNVTFHNKLGSQADKVTRVSALTKILAKRLFCDIEDAVKSANICKSDLASEMVYEFPELQGVMGRYYALSAGYSQDVAKVCEEHYAPKGPNDPVPKASISVAVSLADKLDTLLGFWIIDEKPTSSKDPFALRRAALGVIRIILENDLELDLVELLNAHLEHLSKFGNHPDAVSDVMNFIRERFKIYLRDKNIRYDVVDACLAVGKVWNLSW

SEQ ID NO: 186276 - protein, 233 aa, Unknown
  Bacterial polypetide isolated from the Sargasso Sea
MTAKTMDELVALCKRRGFIFQSNEIYGGLQGLYDYGPLGVELKNNLKQAWWRDIVFDRDDIEGLDASILTKPNVLKFSGHEETFSDPMVDCKSCNQRFRADQVPDYCKEEDLTEPRQFNLMFKTAVGPIEDKNSFAYLRPETAQNIFTNFKNVVDSTSRKLPFGIAQIGKAFRNEITPRNFVFRVREFEQMELEFFVAPGTDDEWHEAWTEARLNWWYEQGINKDNIELYDVP

SEQ ID NO: 186277 - protein, 245 aa, Unknown
  Bacterial polypetide isolated from the Sargasso Sea
MTAKTMDELVALCKRRGFIFQSNEIYGGLQGLYDYGPLGVELKNNLKQAWWKDLVFDRDDVEGLDASILTKPDVLKFSGHEDTFTDPLVDCKDCNSRWRADQLKSNKCPSCGSKNLTDPRPFNLMFKTSVGPVEDNNSFAYLRPETAQNIFTNFKNVIDSTSKQLPFGIAQIGKAFRNEITPRNFVFRVREFEQMELEFFVTPGTDDQWHETWVNSRLNWWDQQGVSKDNLELYRVPENELAHYS

SEQ ID NO: 186278 - protein, 258 aa, Unknown
  Bacterial polypetide isolated from the Sargasso Sea
VPFGIAQIGKAFRNEITPRNFIFRVREFEQMELEFFVKPGTDDEWHEYWINKRIEWWVNQGIKKENLKKIEVEKDELAHYSKRTVDINYVFPHGEEELEGVANRTDFDLGSHTKNQNDFKITSEVMKNSSSTTKLAVQDLEEKKWYIPYVIEPSAGVDRGVLALLNEAYREENVDKDNKRILLSLKPHLSPIKAAIIPLKKNNVDLVNLSKEIKSNLQKLGLGRVVLENSGNIGKNYRRHDEIGTPICLTVDFETLED

SEQ ID NO: 186279 - protein, 176 aa, Unknown
  Bacterial polypetide isolated from the Sargasso Sea
MVSKKKKKQPKFQTFQDTILNLQKYWSKQGCIILQPYDMEVGAGTFHPATTLRSLGPQPWKAAYVQPSRRPTDGRYGDNPNRLQHYYQFQVIIKPSPKNIKKLYLNSLNTIGINHNEHDIRFVEDDWESPTLGAAGLGWEVWCDGMEITQFTYFQQMAGFECKPVSVELTYGLERL

SEQ ID NO: 186280 - protein, 278 aa, Unknown
  Bacterial polypetide isolated from the Sargasso Sea
ILTNPLILKYSGHEDTFSDPMVDCKSCNLRFRADQVPDSCKKEDLTEPRQFNLMFKTNVGPIEDGSTYAYLRPETAQQIFTNFKNVLDSTSNSLPFGIAQIGKAFRNEITPRNFIFRVREFEQMELEYFVSPGKDEEAHNLWVQNRIEWWNNQGVPTESIEIYDVPKDELAHYSKKTVDIMYKFPHGVEELEGIANRTDFDLGSHSKKQNELNIKSKVTVNKDSNSKLAVQDDNGDWVVPFVIEPSAGVERGFLAILNEAYTNEELEDGKTRIVLKLK

SEQ ID NO: 186281 - protein, 302 aa, Unknown
  Bacterial polypetide isolated from the Sargasso Sea
INVLHGGSDNLTDPRPFNLMFKTTIGPVDDGTSFAYLRPETAQQIFTNFKNVVDSTSRTLPFGIAQIGKAFRNEITPRNFIFRVREFEQMELEFFVEPGSDEEWHQKWVDERVIWWERQGVDKSKLEIIDVDKEDLSHYSKKTVDIMYEFPHGLEELEGIANRTDFDIGSHTKNQKDFEINADVIKNDDSVTKLAIQDKINNTWTIPYVIEPSAGVDRGFLAVLNEAYKIEKLENGKERTVLSLKSHLSPIKAAVIPLKRNNQDLVNKAVELKKQLQSIGLGRVVLDNASNIGKSYRRHDEV

SEQ ID NO: 186282 - protein, 229 aa, Unknown
  Bacterial polypetide isolated from the Sargasso Sea
CSPSRRPTDGRYGDNPNRLQHYYQFQVLIKPSPKEIKKLYLNSLTAIGIDHKDHDVRFVEDDWESPTLAAAGLGWEVWCDGMEVTQFTYFQQMAGLECNPISVEITYGLERLCMFIQNKKNVFDLAWNNEGILYRDVFHQSEKEFSAYNFDYANTENLFKIFDMLESEAKSLIEKKISLPAYDQCLKSSHVFNLLDARGVISVAQRAEYIARVRDLTKEIGKIWIESQS

SEQ ID NO: 186283 - protein, 268 aa, Unknown
  Bacterial polypetide isolated from the Sargasso Sea
MEQHGCVILQPYDMEVGAGTFHPATTLRSLGPKPWKAAYVQPSRRPTDGRYGDNPNRLQHYYQFQVIIKPSPSNIKKLYLNSLSVVGINHNDHDIRFVEDDWESPTLGASGLGWEVWCDGMEITQFTYFQQMAGFECKPVSVEITYGLERICMFTQQKKNVYDLIWNNDGVEYREVFHQAEKEFSAYNFEHANTENLFKIFDMFENEAKSLVEKKISLPAYDQCLKASHIFNVLDARGAISVAQRAEYISRIREITKSAASIWIGTQV

SEQ ID NO: 186284 - protein, 252 aa, Unknown
  Bacterial polypetide isolated from the Sargasso Sea
MPAKKKVKQKLNFLSFQEIIMNLQNFWGKNGCVILQPYDMEVGAGTFHPATTLRSLGPKPWKAAYVQPSRRPTDGRYGENPNRLQHYYQYQVIIKPSPKNIKQLYLKSLEAIGIDVKNHDIRFVEDDWESPTLGAAGLGWEVWCDGMEITQFTYFQQMTGIECKPVPVEITYGLERLCMFVQGKNNVFDLDWNNDGVKYKEVFFQAEKEFSAYNFEFANTDTLLKSFENIENECKSLLEKNLSLPAYDQCLK

SEQ ID NO: 186285 - protein, 294 aa, Unknown
  Bacterial polypetide isolated from the Sargasso Sea
KNKLKKKKGKPTPVYFQETILNLQKFWGNYGCVILQPYDIEVGAGTFHPATTLRSLGTKPWKAAYVQPSRRPTDGRYGKNPNRLQHYYQFQVIIKPSPDEIKKVFLKSLSTIGINHREHDIRFVEDDWESPTLGAAGRGWEVWCDGMEITQFTYFQQMAGMECKPVSVELTYGLERICMFTQGKNNVFELIWNNEGIKYKDIFHQAEKEYSAYNFEFANTESLLKNFEIAEAECKALLEKNIPLPAYDQCLKASHIFNLLDARGVIGVAQRTEYISRIRELAKGSGESWVESQK

SEQ ID NO: 186286 - protein, 250 aa, Unknown
  Bacterial polypetide isolated from the Sargasso Sea
MSSKNIKTDFQSIILNLQYYWSENGCVILQPYDKEVGAGTFHPATTLRSLGPEENWNVAYVQPSRRPTDGRYGDSPNRAQHYYQFQTIMKPSPEDSQALYLGSLEAIGLNLNDHDIRFVEDDWESPTLGAWGLGWEVWCDGMEISQFTYFQQMGGIECSPIPLELTYGLERLAMFIQNVESIFDIIWSQSSTKQVFYKDIFLKNEIEFSYYNFEKADINILYRQFEMAQEECKNLLNNDRPLPLPAYDLC

SEQ ID NO: 186287 - protein, 278 aa, Unknown
  Bacterial polypetide isolated from the Sargasso Sea
NKLNKQKGKPTPVNFQDTILNLQKFWGKYGCVILQPYDIEVGAGTFHPATTLRSLGPQTWKAAYVQPSRRPTDGRYGKNPNRLQHYYQFQVIIKPSPNNIKKIFLKSLNTVGINHKEHDIRFVEDDWESPTLGAAGRGWEVWCDGMEITQFTYFQQMAGIECKPVSVELTYGLERLCMFTQGKKNVFELIWNDEGIKYKDIFLQAEKEYSTYNFEYANTDFLLKNFEIAESECKFLLEKKLPLPAYDQCLKASHIFNLLDARGVIGVAQRTEYISRIR

SEQ ID NO: 186288 - protein, 192 aa, Unknown
  Bacterial polypetide isolated from the Sargasso Sea
MQPYDSEKGAGTMSPHTFLRAIGPEPWSVAYAEPCRRPTDGRFGDNPNRAQHYFQYQVIIKPSPDGIQEKYLKSLESLGIEAKNHDIRFVEDNWESPTLGAWGVGWEVWLDGMEVTQFTYFQQCGGVDCQPIPIEITYGLERIAMFLQDKESIWDLNWNKDLKYSDIWLEFEKDQCSYNFSESNPENLRKLF

SEQ ID NO: 186289 - protein, 236 aa, Unknown
  Bacterial polypetide isolated from the Sargasso Sea
MYFQDIILNLQNYWASHECAIHQPYDIEVGAGTFNPCTFFRVLGPEPYNAAYVEPSRRPTDGRYGENPNRLQHYYQFQVILKPSPQGVQDQYLESLTVLGVDPIKHDIRFVEDDWESPTLGAWGLGWEVWLDGMEITQFTYFQQVGGIDLKPVTAELTYGLERIAMYLQNVENVYDLKWNEELLYGDVHLETEKQFSRYNFEVSNKDRLFEWFDMYELEAKELWKKNLFSLHMITH

SEQ ID NO: 186290 - protein, 286 aa, Unknown
  Bacterial polypetide isolated from the Sargasso Sea
KKKIKKKLKKNNFQTFQDTILNLQKYWSKQGCVILQPYDIEVGAGTFHPATTLRSLGSKPWKTAYVQPSRRPTDGRYGENPNRLQHYYQFQVLIKPSPKNIKKLYLNSLRSIGINNLDHDIRFVEDDWESPTLGASGLGWEVWCDGMEITQFTYFQQMAGIECKPVSVELTYGLERICMFTQQIKNVFDLSWNNEGIKYREVFHQAEKEFSAYNFEYANTENLFKIFEMLENETRSLLEKKISLPAYDQCLKASHVFNILDARGVISVAQRAEYISKIRELTKNVG

SEQ ID NO: 186291 - protein, 295 aa, Unknown
  Bacterial polypetide isolated from the Sargasso Sea
NNIKSAWWEAMVYENDDIEGLDSSILTNPLVLGYSGHEDTFSDPMVDCKSCGLRFRADQVPKECKPEDLTEPRQFNLMFKTNVGPIDDGSSFAYLRPETAQQIFTNFKNVIDSTSKPVPFGIAQIGKAFRNEITPRNFIFRVREFEQMELEYFVMPGEDEKSHDTWVQKRLEWWKKQGVPTESIELYDVPTEELAHYSKKTIDLMYKFPHGLEELEGIANRTDFDLGSHSKKQNELSIGSSVKENKHSNSKMAVQDNSGKWVVPFVIEPSAGVERGFLAILNEAYFVEDLEDDKT

SEQ ID NO: 186292 - protein, 292 aa, Unknown
  Bacterial polypetide isolated from the Sargasso Sea
SSKKKKGKPTPVNFQDTILNLQKFWGNYGCVILQPYDIEVGAGTFHPATTLRSLGPKSWRAAYVQPSRRPTDGRYGKNPNRLQHYYQFQVIIKPSPDDIKKVFLKSLSTIGINHKEHDIRFVEDDWESPTLGAAGRGWEVWCDGMEITQFTYFQQMAGIECKPVSVELTYGLERICMFTQSKNNVFELLWNNSGIKYREVFYQAEKEFSAYNFEFANTENLLRNFEIAESECKSLLEKKLPLPAYDQCLKASHIFNLLDARGVIGVAQRTEYISRIRELAKGSGQSWLESQK

SEQ ID NO: 186293 - protein, 124 aa, Unknown
  Bacterial polypetide isolated from the Sargasso Sea
MNKKNISFENIIVRLQEFWQSKGCILMQPIDMEVGAGTFHPATLLRSIGSKAWKCAYVQNCRRPTDGRYGENPNRMQQYYQYQVLLKPSPENMKKLYIESLLYLGIDGDNNDIRFVEMIGKVLL

SEQ ID NO: 186294 - protein, 124 aa, Unknown
  Bacterial polypetide isolated from the Sargasso Sea
MPAKKQVKKKLPIKLNFLSFQDIIMNLQKFWGKHGCVILQPYDMEVGAGTFHPATTLRSLGTKPWKAAYVQPSRRPTDGRYGENPNRLQHYYQYQVIIKPSPKNIKQLYLKSLATIGIDVKIMT

SEQ ID NO: 186295 - protein, 220 aa, Unknown
  Bacterial polypetide isolated from the Sargasso Sea
MVFKKKNKKKSKVKYQTFQDTILNLQKYWSKQGCVILQPYDMEVGAGTFHPATTLRSLGEKPWKTAYVQPSRRPTDGRYGENPNRLQHYYQFQVLIKPSPKNIKKLYLNSLKSIGINHLDHDVRFVEDDWESPTLGAAGLGWEVWCDGMEITQFTYFQQMAGVECKPVSVELTYGLERICMFTQEKKNVFDLDWNNEGIKYREVFHQAEKEFSAYNFEHA

SEQ ID NO: 186296 - protein, 129 aa, Unknown
  Bacterial polypetide isolated from the Sargasso Sea
MVSKAKKEKKKIQTFQDTILNLQKFWSKKGCIILQPYDMEVGAGTFHPATTLRSLGNKPWKAAYVQPSRRPTDGRYGDNPNRLQHYYQFQVLIKPSPENIKKLYLNSLSTIGIDHNDHDIRFVKMTGKV

SEQ ID NO: 186297 - protein, 223 aa, Unknown
  Bacterial polypetide isolated from the Sargasso Sea
MVSKTKKKKIKFHSFQDTILNLQKYWSKHGCVILQPYDIEVGAGTFHPATTLRSLGPKPWKAAYVQPSRRPTDGRYGENPNRLQHYYQFQVIIKPSPSNIKRLYLNSLSSIGINHLDHDIRFVEDDWESPTLGAAGLGWEVWCDGMEITQFTYFQQMAGSECNPVSVELTYGLERLCMFTQYKKNVFDLVWNNDGIFYRDVFLQSEKEFSKYNFELANTGQPI

SEQ ID NO: 186298 - protein, 232 aa, Unknown
  Bacterial polypetide isolated from the Sargasso Sea
MPAKKKVKKKITNISFQDIIMNLQKFWGKNGCIILQPYDLEVGAGTFHPATTLRSLGPKPWRAAYVQPSRRPTDGRYGENPNRLQHYYQYQVIIKPSPSNIKQTYLKSLASIGIDIKNHDIRFVEDDWESPTLGAAGLGWEVWCDGMEITQFTYFQQMTGIECKPVPVEITYGLERLCMFVQEKNNIFDLDWNNDGVKYKEVFFQAEKEFSAYNFEFANTDILLKSFENTEK

SEQ ID NO: 186299 - protein, 270 aa, Unknown
  Bacterial polypetide isolated from the Sargasso Sea
SSWWSAMVFERDDIEGLDASILSKKELFKYSGHEDTFSDPLVDCKSCKSRWREDLIEGGKCPGCGSSELTEARPFNLMFKTPVGPVENEESFAYLRPETAQHIFASFKNVKDSTSRQVPFGIAQIGKAFRNEINPRNFIFRLREFEQMELEYFVKPGEDETALEYWKKERLEWWERQGIDLTNIEIYDVPENELAHYSKRTLDIMYRFPHGLEELEGIANRTDFDLGSHTKNQKDLSLSSAVVENDESTMRLAVQDLETNEWYVPYVIEP

SEQ ID NO: 186300 - protein, 257 aa, Unknown
  Bacterial polypetide isolated from the Sargasso Sea
DPMVDCKSCNQRFRADQVPDHCKEEDLTEPRQFNLMFKTSVGPIEDKDSFAYLRPETAQNIFTNFKNVVDSTSRKIPFGIAQIGKAFRNEITPRNFVFRVREFEQMELEFFVAPGTDDKWHKAWVDARLKWWEEQGVSKENIELYNVPSDELAHYSKATVDIMYKFPHGLEELEGIANRTDFDLGSHSKNQKDLDIHSKVNENNESNARLALQDPETKKWSVPYVIEPSAGVDRGVLAVLNEAYEIEKLEDNKTRTV

SEQ ID NO: 186301 - protein, 94 aa, Unknown
  Bacterial polypetide isolated from the Sargasso Sea
MASKKKTKKKIQTFQDTILNLQRYWSKNGCIILQPYDMEVGAGTFHPATTLRSLGPKPWKAAYVQPSRRPTDGRYGDNPNRLQHYYQFQVLIKP

SEQ ID NO: 186302 - protein, 292 aa, Unknown
  Bacterial polypetide isolated from the Sargasso Sea
PVKNENSAVYLRPETAQGIFVNFENVLRTMRAKIPFGIGNIGKSFRNEITPGQFIFRTREFEQMEIEFFCDESEEDKWFDYWIENRLNWYRNLGIPENKLRVRDHDKSELAHYAKKTSDIEFEYPWGWGELEGIANRGNFDLNAHQENSGKDLKYFDPNNEIKYIPSVIEPAGGLTRTLFAVLLSLYEEEELEKETRTIFRFNFDLAPIQIGILPLSKKDELITFCDEINATLRSMFRTEIDITQSIGKRYRRQDEIGTPYCITVDFETLEDKSVTVRNRDTMQQERIKIDD

SEQ ID NO: 186303 - protein, 128 aa, Unknown
  Bacterial polypetide isolated from the Sargasso Sea
TDGPFGTVTYGDVFHQNEVEQSTYNFEHANVEKLFELFDFYESEANRLIELELPLPTYEMVLKASHTFNLLDARRAISVTARQQYILRVRTLARAVAQSYLQARAKLGFPMATPELRDEVLAKLEAQA

SEQ ID NO: 186304 - protein, 198 aa, Unknown
  Bacterial polypetide isolated from the Sargasso Sea
ALAGDDDDRAFLRPETAQGIFLNFKNVLDTSRVRVPFGIGQIGKSFRNEITPRNFTFRSREFEQMEIEFFCRPDDSRKWYQFWRDRRWQWYLNLGLTEGRLQLREHHEAELAHYSCGTADIEYAFPFLADGEYGELEGIAHRGDFDLRSHMEGKLVREDGKLVLETDSNGKPKHRGSGRDLSYFDDVTRERFVPHVIE

SEQ ID NO: 186305 - protein, 178 aa, Unknown
  Bacterial polypetide isolated from the Sargasso Sea
NDHDIRFVEDDWESPTLGAAGLGWEVWCDGMEITQFTYFQQMAGFDCKPVSVEITYGLERICMFTQQQKNVYELLWNDEGIKYSEVFHQAEKEFSAYNFEYANVETLLKMFEMHESEAKALVEKKISLPAYDQCLKASHVFNILDARGAISVAQRAGYIARIRDITKSAAGVWLDSQK

SEQ ID NO: 186306 - protein, 143 aa, Unknown
  Bacterial polypetide isolated from the Sargasso Sea
MPKKKKIKKNKNFLSFQDIIMNLQKFWGKFGCIILQPYDLEVGAGTFHPATTLRSLGTKPWKAAYVQPSRRPTDGRYGENPNRLQHYYQFQVIIKPSPNNIKQIYLKSLTSIGIDVKNHDIRFVEDDWESPTLGAAGLGWEVW

SEQ ID NO: 186307 - protein, 215 aa, Unknown
  Bacterial polypetide isolated from the Sargasso Sea
MVSKKKRKKKPKFQTFQDTILNLQKYWSKHGCIILQPYDVEVGAGTFHPATTLRSLGLKPWKVAYVQPSRRPTDGRYGDNPNRLQHYYQFQVLIKPSPKNIKQLYLNSLSAIGIKHQEHDIRFVEDDWESPTLGAAGLGWEVWCDGMEITQFTYFQQMAGVDCNPISVELTYGLERICMFTQEKKNVFDLVWNNENVLYKEVFHQAEKEFSAYNF

SEQ ID NO: 186308 - protein, 260 aa, Unknown
  Bacterial polypetide isolated from the Sargasso Sea
MVAKNMDDLVSLCKRRGFIFQSNDIYGGIKGLYDFGPMGIELKNNLKHSWWRSMIYERDDIEGLDATILTSQDVMKFSGHEETFSDPLVDCKSCKSRWREDQLENQSCPDCKSNDLTDSRPFNLMFKTSIGPVDDGSSFVYLRPETAQQIFTNFKNVISSTSRSIPFGIAQIGKAFRNEITPRNFIFRVREFEQMELEFFVEPGTDDDWHNYWIDLRLNWWIKQGIDKKNLSLIKVEKEELSHYSKATTDIMYNFPTWER

SEQ ID NO: 186309 - protein, 290 aa, Unknown
  Bacterial polypetide isolated from the Sargasso Sea
MTAQTMEELVSLCKRRGFLFQSNDIYGGIKGLYDYGPMGVEFKNNLKQAWWKSMVYERDDTEGLDASILSSPVVLKHSGHEDTFTDPLVDCRACKSRWRADQLLENNKCPNCKSEDLTEPRPFNLMFKTAIGPVDDGSSFAYLRPETCQQIFTNFKNILDSTSRTVPFGIAQMGKAFRNEITPRNFIFRVREFEQMELEFFVKPGTDDEWHEYWINKRLEWWVNQGIKKENLKKIEVEKNELAHYSKRTVDINYVFPHGEEELEGVANRTDFDLGSHTKIKTILKLHQKL

SEQ ID NO: 186310 - protein, 117 aa, Unknown
  Bacterial polypetide isolated from the Sargasso Sea
MTTKHDVKTFQGFILTLQEYWAQQGCAIVQPLDMEVGAGTFHPQTFLRSLGPEPMSSAYVQPSRRPTDGRYGENPNRLQHYYQFQVVLKPSPDNIQELYLGSLQALGIDTQIHDIRF

SEQ ID NO: 186311 - protein, 180 aa, Unknown
  Bacterial polypetide isolated from the Sargasso Sea
KHQEHDIRFVEDDWESPTLGASGLGWEVWCDGMEITQFTYFQQMAGIECKPISVELTYGLERICMFTQEKKNVFNLIWNDEGVLYKEVFHQAEKEFSAYNFEHANIENLFKIFEMVEIEAKLLIDKKLSLPAYDQCLKASHVFNLLDARGAISVAQRAEYISKIRELTKSIGQIWVNSQK

SEQ ID NO: 186312 - protein, 120 aa, Unknown
  Bacterial polypetide isolated from the Sargasso Sea
MPVKKKVKKKLPLKLNFLSFQDIIMNLQKFWGKHGCVILQPYDMEVGAGTFHPATTLRSLGTKPWKAAYVQPSRRPTDGRYGENPNRLQHYYQFQVIIKPSPKNIKQLYLKSLATIGIDV

SEQ ID NO: 186313 - protein, 198 aa, Unknown
  Bacterial polypetide isolated from the Sargasso Sea
SPSNIKKLYLNSLSVIGIDPKNHDIRFVEDDWESPTLGAAGLGWEVWCDGMEITQFTYFQQMASFECKPVSVEITYGLERICMFTQQKKNVYDLIWNNEGVEYREVFHQAEKEFSAYNFEHANTENLFKIFDMFENEAKSLIEKKISLPAYDQCLKASHIFNVLDARGAISVAQRAEYIGRIREITKSVAEIWINTQV

SEQ ID NO: 186314 - protein, 248 aa, Unknown
  Bacterial polypetide isolated from the Sargasso Sea
FHPATTLRSLGPKAWKAAYVQPSRRPTDGRYGDNPNRLQHYYQFQVLIKPSPNNIKKLYLNSLSVIGIDHNDHDIRFVEDDWESPTLGAAGLGWEVWCDGMEITQFTYFQQMAGHECKPVSVEITYGLERICMFTQKQKNVYDLLWNDEGVKYRDVFHQAEKEFSSYNFEYANTDNLFKMFDMHELEAKNLVEKKISLPAYDQCLKASHVFNILDARGAISVAQRAGYIGRIRDITKAAARIWLDSQS

SEQ ID NO: 186315 - protein, 242 aa, Unknown
  Bacterial polypetide isolated from the Sargasso Sea
LRSLGPKPWKAAYVQPSRRPTDGRYGENPNRLQHYYQYQVIIKPSPSNIKQTYLKSLAAIGIDVKNHDIRFVEDDWESPTLGAAGLGWEVWCDGMEITQFTYFQQMTGIECKPVPVEITYGLERLCMFVQEKNNVFDLDWNNNGVKYKEVFFQAEKEFSAYNFEFANTDALLKSFENTENECKSLLQKNLSLPAYDQCLKASHIFNLLDARGVIGVAERTGYITRIRELAKGCGSLWLSSQS

SEQ ID NO: 186316 - protein, 277 aa, Unknown
  Bacterial polypetide isolated from the Sargasso Sea
MNNTSMEDLVSLCKRRGFIYQSNEIYGGLQGLYDYGPLGVELKNNLKKSWWKSMIYERDDIEGIDSSILTNPLVLKYSGHENTFTDPLVDCKSCGERFRADQVPDYCKKEDLTEPRQFNLMFKTNVGPIEDGNSFAYLRPETAQNIFTNFKNVLDSNPHPLPFGIAQMGKAFRNEITPRNFIFRVREFEQMELEFFVKPGEDEKWHKKWTDLRLQWWEDQGVSKESLKIYHVPDDELAHYSKATVDIMYNFPHGLEELEGIAHRTDFDLGSHTRGPK

SEQ ID NO: 186317 - protein, 276 aa, Unknown
  Bacterial polypetide isolated from the Sargasso Sea
MASKKNKKTPKFQTFQDTIFNLQKFWSKHGCVILQPYDMEVGAGTFHPATTLRSLGPKPWKAAYVQPSRRPTDGRYGDNPNRLQHYYQFQVIIKPSPSNIKKLYLNSLSVIGINHKDHDIRFVEDDWESPTLGAAGLGWEVWCDGMEITQFTYFQQMAGFECKPVSVEITYGLERICMFTQQKKNVFDLIWNSEDVKYGEVFHQAEKEFSAYNFEHANTENLFKIFDMFENEAKSLVEKKISLPAYDQCLKASHIFNVLDARGAISVAQRAEYISR

SEQ ID NO: 186318 - protein, 282 aa, Unknown
  Bacterial polypetide isolated from the Sargasso Sea
SRWKADQINLNECPNCKSKDLTDPRPFNLMFKTAIGPVDDGSSFAYLRPETCQQIFTNFKNILDSTSRTVPFGIAQIGKAFRNEITPRNFIFRVREFEQMELEFFVEPGDDDKWHKHWINKRLQWWIEQGISGENLKLLNVEKNELSHYSKATVDIMYKFPHGNEELEGIANRTDFDLGSHTKNQADFSITSNVTKNEHSTTKLCVHNLEKKNFYIPYVIEPSAGVDRGVLALLNEAYREEKIDNENSRIVLSLKPHLSPIKAAVIPLKKNNEKIVNLSKRN

SEQ ID NO: 186319 - protein, 256 aa, Unknown
  Bacterial polypetide isolated from the Sargasso Sea
SRVVPFGIAQIGKAFRNEITPRNFIFRVREFEQMELEFFVEPGSDDKWHKYWVDKRIEWWEMQGVSKKNLHLVEVEQSELSHYSKATVDIMYEFPHGKEELEGIANRTDFDLGSHTKNQKDYNISSDVKKNKHSTTKLGVQNLEEKTSYIPYVIEPSAGVDRGLLAILNEAYTIESIENGNVRTVLKLKPHLSPIKAAVIPLKKNNEEIVAKAKAIKNELQNLGMGRVILENSGNIGKNYRRHDEIGTPDLYYCRF

SEQ ID NO: 186320 - protein, 270 aa, Unknown
  Bacterial polypetide isolated from the Sargasso Sea
DTFSDPMVDCKSCGLRFRADQVPKSCKKEDLTEPRQFNLMFKTNVGPIDDGSNYAYLRPETAQQIFTNFKNVVDATSRSLPFGIAQIGKAFRNEITPRNFIFRVREFEQMELEYFVAPGSDDDAHDSWVQKRIEWWVKQGVPMESIELYDVPTEELAHYSKKTIDLMYKFPHGLEELEGIANRTDFDLGSHSKKQEELNIVSKVKKNKDSNSKLSINDNEKGMVVPYVIEPSAGVERGMLAILNEAYTVEELEDKKTRIVLKLKPHLAPI

SEQ ID NO: 186321 - protein, 267 aa, Unknown
  Bacterial polypetide isolated from the Sargasso Sea
MQDIIMLLNVYWHKQGCILTSPYDVETGAGTMNPMTTLRTLGPEEWNVAYVEPSRRPADGRYGENPNRLYQHHQYQVILKPSPDNVEELYLESLKAMGINPLDHDIRFVEDNWEAPTLGAWGLGWEIWLDGMEITQFTYFQQVGGIECNPVSAELTYGLERIASYLQDVDNVFDIEYTKGVSYSAIFKQPEFEHSKYTFEVADTEMLFQHFNDYEKEANRALDQRLVFPAYDYVLKCSHTFNQLDATGAISVSARASFIRRVRNIAQ

SEQ ID NO: 186322 - protein, 287 aa, Unknown
  Bacterial polypetide isolated from the Sargasso Sea
MVSKKKKNNKEPLTFQETILALQKYWSKQGCIILQPYDLEVGAGTFHPATTLRSLGDKPWKTAYVQPSRRPTDGRYGNNPNRLQHYYQFQVLIKPSPTNIKKLYLNSIAAIGINHEEHDIRFIEDDWESPTLGAAGLGWEVWCNGMEITQFTYFQQMAGIECNPISVELTYGLERLCMFIQNKKNVFDLKWNDEGVLYKEVFYQSEKEFSAYNFEYANTDNLFKIFDMIEEEAESLVEKKISLPAYDQCLKASHIFNILDARGVISVAQRAEYISKIRDLTKAIGKV

SEQ ID NO: 186323 - protein, 272 aa, Unknown
  Bacterial polypetide isolated from the Sargasso Sea
NAQTGKAFRNEIVARQFIFRMREFEQMEMQFFIPPGTQKEWYEHWKNNRLKWHLALGMGEDKYRFHDHEKLAHYADAASDIEFLFPFGFKELEGIHSRTDFDLANHEKFTGKKLQYFDPEHNNNYIPFVIETSIGLDRMFLAVLSNALTEENLENGASRTVLKLPPALAPTKVAVLPLVKKDGLPELARKIIEQLKWDLTTTYDEKDAIGRRYRRQDALGTPFCITVDHQSLNDKTVTFRDRDSMKQERFSIDSLNNMVAEKVSINSLLKKL

SEQ ID NO: 186324 - protein, 290 aa, Unknown
  Bacterial polypetide isolated from the Sargasso Sea
MPTKKKLKFLSFQEIIMNLQKFWGKYGCIILQPYDLEVGAGTFHPATTLRSLGSKPWKAAYVQPSRRPTDGRYGENPNRLQHYYQYQVIIKPSPDNIKQTYLKSLSTIGIDVKNHDIRFVEDDWESPTLGAAGLGWEVWCDGMEITQFTYFQQMTGLECKPVPVEMTYGLERLCMFVQGKKNVFDLDWNNEGVKYKDVFFQAEKEFSAYNFEFANTETLLKNFESTEAECKSLLDKKLSLPAYDQCLKASHIFNLLDARGVIGVAERTGYINRIRELAKGCGALWLSTQI

SEQ ID NO: 186325 - protein, 280 aa, Unknown
  Bacterial polypetide isolated from the Sargasso Sea
LTEPRPFNLMFKTNIGPVADDESYAYLRPETAQQIFTNFKNVVDSTSKSIPFGIAQIGKAFRNEITPRNFIFRVREFEQMELEFFVKKGEDEDWHKYWIEERINWWVQQGVNKEKIEILNVPQEELSHYSKATIDLMYEFPHGVEELEGIANRTDFDLGSHSKNQQDLDIEANVLKNKDSNARLAIQNIDSKEWEVPYVIEPSAGVDRGVLAILNESYKEETLENGKNRVVLALKPHLSPIKAAVIPIKKNDSTIVEFSKQIKDNLQKLGLGRVVLENTG

SEQ ID NO: 186326 - protein, 125 aa, Unknown
  Bacterial polypetide isolated from the Sargasso Sea
MVSKKKIKKPNFQTFQDTILNLQKYWGKLGCVVLQPYDIEVGAGTFHPATTLRSLGPNSWKAAYVQPSRRPTDGRYGNNPNRLQHYYQFQVLIKPSPKNIKKLYLNSLSTIGISYKDHDIRFVED

SEQ ID NO: 186327 - protein, 135 aa, Unknown
  Bacterial polypetide isolated from the Sargasso Sea
MPKKIKNKKNFFTFQDVVFNLQKYWSKYGCVILQPYDLEVGAGTFHPATTLRSLGPKPWKAAYVQPSRRPTDGRYGKNPNRLQHYYQFQVIIKPSPKNIKQIYLKSLSSIGIIAKDHDIRFVEDDWGKPPLSCSW

SEQ ID NO: 186328 - protein, 151 aa, Unknown
  Bacterial polypetide isolated from the Sargasso Sea
MVSKKKKKPNFQTFQDTIFNLQKYWSKHGCIILQPYDIEVGAGTFHPATTLRSLGPKPWQAAYVQPSRRPTDGRYGDNPNRLQHYYQFQVIIKPSPTNIKKLYLQSLSVIGINHKDHDIRFVEDDWESPTLGAAGLGWEVWCDGMEITQFT

SEQ ID NO: 186329 - protein, 299 aa, Unknown
  Bacterial polypetide isolated from the Sargasso Sea
VELKLNLKSAWWKSMVYERDDVEGLDSTILTSPTVLKYSGHEDTFSDPLVDCKKCKSRWRADQFEDGKCPNCKSTDLTDPRPFNLMFKTAIGPVDDGSSFAYLRPETAQQIFVNFKNVVDSTSRVPPFGIAQIGKAFRNEITPRNFIFRVREFEQMELEYFVKPGSDEDWHKYWVDKRLNWWAEQGVKSEKLKLLEVEKKDLSHYSKATFDIMYDFPHGLEELEGIANRTDFDLGSHSKNQKDFNIKANIQENKNSTTKLAIQDLENKEWFIPFVIEPSAGVERGVLAVLNEAYTIEEA

SEQ ID NO: 186330 - protein, 182 aa, Unknown
  Bacterial polypetide isolated from the Sargasso Sea
MVSKKKKIKKEPLTFQETIFALQKYWSKHGCVILQPYDLEVGAGTFHPATTLRSLGEKPWKTAYVQPSRRPTDGRYGENPNRLQHYYQFQVLIKPSPSNIKKLYLNSIATIGINHNEHDIRFVEDDWESPTLGAAGLGWEVWCNGMEITQFTYFQQMAGIECKPISVEITYGLERLCMFIQK

SEQ ID NO: 186331 - protein, 233 aa, Unknown
  Bacterial polypetide isolated from the Sargasso Sea
KAAYVQLSRRPTDGRYGENQNRLQHYYQYQVIIKPSPENIKKIYLKSLSAIGIDVKKHDIRFIEDDWESPTLGAAGLGWEVWCDGMEITQFTYFQQMTGIECKPVPVELTYGLERLCMFVQGKKNVFDLDWNNEGVKYREVFLQAEKEFSAYNFEFANTETLLKSFEVCETECKSLLDKKLSLPAYDQCLKASHLFNLLDARGVIGVAERTGYINRIRELSKGCGALWLSTQI

SEQ ID NO: 186332 - protein, 229 aa, Unknown
  Bacterial polypetide isolated from the Sargasso Sea
MPATNIEDLIALCKRRGFIFQSSEIYGGTQGLYDYGPLGVELKNNIKNSWWKSIVYERDDVEGLDAAILTKQSVLKYSGHEETFTDPLVDCKSCGERFRADQVPDYCKKEDLTEPRQFNLMFKTNIGPVDDGKTFAYLRPETAQQIFTNFKNVVDSTSRNVPFGIAQIGKAFRNEITLKSFIFRVREFEQMELEFFVVPGTDEDWHKKWVELRINWWEKQGVSKKSLEL

SEQ ID NO: 186333 - protein, 135 aa, Unknown
  Bacterial polypetide isolated from the Sargasso Sea
MPKKIINKTKNYITFQDLVFNLQKFWSRYGCVILQPYDLEVGAGTFHPATTLRSLGPKPWKAAYVQPSRRPTDGRYGKNPNRLQHYYQYQVIIKPSPQNIKQVYLKSLAAIGIQAKDHDIRFVEDDWESPTLGAA

SEQ ID NO: 186334 - protein, 171 aa, Unknown
  Bacterial polypetide isolated from the Sargasso Sea
MPAEKRDEIRTDFQSIIMNLQRYWAQQGAVVLQPYDMEVGAGTFHPATVLRSLGPDDVWRAAYVQPSRRPADGRYGENPNRLQHYYQFQVVLKPSPVHSQAVYLGSLKAIGLDPNLHDIRFVEDDWESPTLGAWGLGWEVWCDGMEISQFTYFQQVGGVECNPVPLELTYG

SEQ ID NO: 186335 - protein, 103 aa, Unknown
  Bacterial polypetide isolated from the Sargasso Sea
MVSKKKKTKKPRLLSFQDTILNLQKYWSKQGCVLVQPYDMEVGAGTFHPATTLRSLGPKPWKVAYVQPSRRPTDGRYGDNPNRLQHYYQFQVLIKPSPDNIKK

SEQ ID NO: 186336 - protein, 277 aa, Unknown
  Bacterial polypetide isolated from the Sargasso Sea
IDQGCVLLQPYDLEVGAGTFHPATVLRVLGPDPIWKAAYVQPCRRPTDGRYGENPNRLQHYYQFQVIIQPSPEDIQNLYLESLNFIGLNPKNHDIRFVEDDWESPTLGASGLGWEIWCDGMEISQFTYFQQVGGIEVKPVASEITYGLERLAMFIQKIENVYDLDWDGIEKNKGGKTYGDIFLQQEKEFSRYNFEKADTSFLFKQFNDAETECKNLLDDKKNPLALPAYHQCIKASHIFNLLDARGVISVSERQSYILRVRNMARSSCLAWMGKLNE

SEQ ID NO: 186337 - protein, 224 aa, Unknown
  Bacterial polypetide isolated from the Sargasso Sea
MPAQSMEQLVSLCKRRGFIFQTNEIYGGLQGVYDYGPLGVELKENLKRSWWAAMVYSRDDVEGLDASILTNKKVLKYSGHEDTFTDPLVDCKDCNNRMRADHLKDSKCLHCGSTNLTEPRPFNLMFKTNIGPVADDESYAYLRPETAQQIFTNFKNVVDSTSKSIPFGIAQIGKAFRNEITPRNFIFRVREFEQMELEFFVKKGEDEDWHKYWIEERINWVGSA

SEQ ID NO: 186338 - protein, 222 aa, Unknown
  Bacterial polypetide isolated from the Sargasso Sea
SDGRYGDNPNRLQHYYQFQVIVKPSPSNIKKLYLNSLSVIGINYKDHDIRFVEDDWESPTLGAAGLGWEVWCDGMEITQFTYFQQMAGFECKPVSVELTYGLERICMFTQQKKNVYDLVWNNDGVEYREVFHQAEKEFSAYNFEHANTENLFKIFDMFENEAKSLVEKNISLPAYDQCLKASHVFNILDARGAISVAQRAEYIGKIREITKSVGEIWIDSQK

SEQ ID NO: 186339 - protein, 216 aa, Unknown
  Bacterial polypetide isolated from the Sargasso Sea
QWYLDLGSPEEQLRLRAHDDDELSHYSSGTSDVEFLFPWGWGELEGVANRGDFDLLQHAEHSGQKLEYFDQGTGERYVPHCIEPAAGATRSMMAFLMAAYDEEQVNDETRTVLRLHPRLAPYKIAVLPLSKKDTLLPKAEEVLALLQPHFMCDYDITQAIGKRYRRQDEIGTPYCVTIDFDSLKDDAVTVRERDSMEQERVATDELVSYLTEQLAL

SEQ ID NO: 186340 - protein, 130 aa, Unknown
  Bacterial polypetide isolated from the Sargasso Sea
MQKPECFQQIILMLQNFWSDKGCVILQPYDLEVGAGTFHPATTLRSLGPDHWSAAYVQPCRRPTDGRYGDSPNRLQHYYQFQVVMKPSPTTLKEMYLESLSVLGIDNRVHDIRFVEDDWESPTLGAWGLG

SEQ ID NO: 186341 - protein, 242 aa, Unknown
  Bacterial polypetide isolated from the Sargasso Sea
MPAKKKLKFLSFQEIIMNLQKFWGKYGCIILQPYDLEVGAGTFHPATTLRSLGPRPWKAAYVQPSRRPTDGRYGENPNRLQHYYQYQVIIKPSPDNIKQTYLKSLSAIGIDVKNHDIRFVEDDWESPTLGAAGLGWEVWCDGMEITQFTYFQQMTGLECNPVPVEMTYGLERLCMFVQGKKNVFDLDWNNEGVKYKEVFFQAEKEFSAYNFEFANTETLLKSFQSIEIECKSLLDKKLSLPA

SEQ ID NO: 186342 - protein, 248 aa, Unknown
  Bacterial polypetide isolated from the Sargasso Sea
MGMHYARLDGEPEAVAVALNEQYKPRFAGDSLPSQLEACAVAIADKMDSLVGIFGIGQAPKGDKDPFALRRAAIGALRIMVEKQLPLDLLELIEFSKTTFGDKLTQQSVSDEVLDFMLGRFRAWYEGEGFGVDVIQAVLARRPTNPADFDRRVKAVAEFLKLDAALALAAANKRVANILAKVTEAIPQSINSALLSEEAEQALYKAIVAEQAYQATVSSYAEGLSHLAAMRDVVDQFFDKVMVNADDA

SEQ ID NO: 186343 - protein, 210 aa, Unknown
  Bacterial polypetide isolated from the Sargasso Sea
HYYQFQVIIKPSVDNIKKLYLNSLSLIGIDHSVHDIRFVEDDWESPTLGAAGLGWEVWCDGMEITQFTYFQQMAGFECKPVSVEITYGLERICMFTQQKQNVYELNWNDDGIKYHEVFHQSEKEFSKYNFEYANTDDLFKIFNMHETEAMSLSKNAISLPAYDQCLKASHVFNILDARGAIGVAERAEYISRIRNIVKLAAEVWIETQKV

SEQ ID NO: 186344 - protein, 123 aa, Unknown
  Bacterial polypetide isolated from the Sargasso Sea
SIYDLIWTDGPLGKVTYGDVFHQNEVEQSTFNFEHANVDALFRTFNECEAQSNVLIENNLPLPAYEQVMKASHAFNLLDARYAISVTERQRYILRVRTLAKACAESYYQAREALGFPLCSKEA

SEQ ID NO: 186345 - protein, 291 aa, Unknown
  Bacterial polypetide isolated from the Sargasso Sea
LKKNKKNKFQTFQDTILNLQKYWSLQGCVILQPYDMEVGAGTFHPATTLRSLGPKPWKTAYVQPSRRPTDGRYGDNPNRLQHYYQFQVLIKPSPKNIKKMYLKSLSAIGIKHTEHDIRFVEDDWESPTLGAAGLGWEVWCDGMEITQFTYFQKMAGIECKPISVELTYGLERICMFTQQKKNVFELAWNNEGIKYRDVFHQAEKEFSAYNFEHANTDNLFKIFDMLEKESKSLLEKELSLPAYDQCLKASHVFNILDARGAISVAQRASYIARIREITKYVGEIWLKSQTK

SEQ ID NO: 186346 - protein, 296 aa, Unknown
  Bacterial polypetide isolated from the Sargasso Sea
CIFKTRNRSQIFTNFKNVVDSTSRTLPFGIAQIGKAFRNEITPRNFIFRVREFEQMELEFFVEPGSDEEWHQKWVDERVSWWERQGVDKSKLEIIDVDKEDLSHYSKKTVDIMYEFPHGLEELEGIANRTDFDIGSHTKNQKDFEINADVIKNDDSVTKLAIQDKINNTWTIPYVIEPSAGVDRGFLAVLNEAYKVEKLENGKERTVLSLKSHLSPIKAAVIPLKRNNQDLVNKAVELKKQLQSIGLGRVVLDNAGNIGKSYRRHDEVGTPMCITIDFETLDDNSVTVRDRDTMEQ

SEQ ID NO: 186347 - protein, 213 aa, Unknown
  Bacterial polypetide isolated from the Sargasso Sea
NRLQHYYQFQVIIKPSPSNIKKLYLNSLSVIGINHKDHDIRFVEDDWESPTLGAAGLGWEVWCDGMEITQFTYFQQMAGFECKPVSVELTYGLERICMFTQQKKNVYDLVWNNEGIEYKEVFHQAEKEFSSYNFEHANTENLFKIFDMFESEAISLVKKKISLPAYDQCLKASHIFNVLDARGVISVAQRAEYISRIREITKSAAAIWIETQK

SEQ ID NO: 186348 - protein, 233 aa, Unknown
  Bacterial polypetide isolated from the Sargasso Sea
QNLISCAVAIADKFDTLVGIFGIGQAPKGDKDPFALRRAAIGALRIMVEKELPLDILDLVAKAQTLFGDKLTNLNVSTDVFEFMLGRFRAWYQDEGIEVDVIQAVLARRPTKPVDFDRRVKAVSHFRTLDAAEALAAANKRVSNILAKNDITSQGNVDESLLSDDAEKVLASQVAKFATELAPLYADGNYQEALSQLAGIRESVDNFFDNVMVMADDEAVKQNRLALLSQLSS

SEQ ID NO: 186349 - protein, 223 aa, Unknown
  Bacterial polypetide isolated from the Sargasso Sea
PTDGRYGNNPNRLQHYYQFQVLIKPSPKDIKKLYLNSIAAIGINYEEHDIRFVEDDWESPTLGAAGLGWEVWCDGMEVSQFTYFQQMAGTECNPISVEITYGLERLCMFIQNKKNVFDIIWNNEGILYKDVFHQSEKEFSAYNFEHANTEYLFKIFDMLEQEAKSLIEKKVSLPAYDQCLKSSHVFNILDARGVISVAQRAEYIARIRDLTKEIGKVWVESQS

SEQ ID NO: 186350 - protein, 270 aa, Unknown
  Bacterial polypetide isolated from the Sargasso Sea
CKRRGFIFQSSDIYGGVKGLYDYGPMGVELKNNLKNAWWKSMVYERDDIEGLDAAILSSPMVFKQSGHEDTFTDPLIDCKSCKSRWRADQLQNQTCPNCKSTDLTEPRPFNLMFKTAIGPVDDGKTFAYLRPETCQQIFTNFKNILDSTNKTVPFGIAQIGKAFRNEITPRNFIFRVREFEQMELEFFVEPGSEEVWHKYWVEHRLKWWISQGIDKKNIKLLSVPKEDLSHYSESTIDIMYNFPHGQEELEGIANRTDFDLGSHTKNQKD

SEQ ID NO: 186351 - protein, 198 aa, Unknown
  Bacterial polypetide isolated from the Sargasso Sea
MPAQSMEQLVSLCKRRGFIFQTNEIYGGLQGVYDYGPLGVELKENLKRSWWAAMVYSRDDVEGLDASILTNKKVLKYSGHEDTFTDPLVDCKDCNNRMRADHLKDSKCLHCGSTNLTEPRPFNLMFKTNIGPVADDESYAYLRPETAQQIFTNFKNVVDSTSKSIPFGIAQIGKAFRNEITPRNFIFRVREFEQMELE

SEQ ID NO: 186352 - protein, 303 aa, Unknown
  Bacterial polypetide isolated from the Sargasso Sea
MSAQSMEQLVSLCKRRGFIYQTNEIYGGLQGMYDFGPYGVELKNNLKNAWWSEMVYQRDDVEGIDASILTNRLVLKYSGHEETFTDPLVDCKSCGERFRADQVPDYCKEEDLTEPRQFNLMFKTSVGPVEDENNYAYLRPETAQQIFTNFKNVLNSNPKKIPFGIAQIGKAFRNEITPRNFIFRVREFEQMELEFFVKKGDDEEWHKYWLEKRIEWWGKQGVTKDKIKILNVPENELSHYSKGTYDLMYEFPHGVEELEGIANRTDFDLGSHSKTQEDYQIDAKVIKNNESNEKLVFTDSETN

SEQ ID NO: 186353 - protein, 176 aa, Unknown
  Bacterial polypetide isolated from the Sargasso Sea
MVSKKKNKKSKHQSFQDTILNLQKYWSKYGCVILQPYDLEVGAGTFHPATTLRSLGSKPWKTAYVQPSRRPTDGRYGENPNRLQHYYQFQVLIKPSPKNIKKLYLNSLSSIGIKHKEHDIRFVEDDWESPTLGAAGLGWEVWCDGMEVTQFTYFQQMAGIECNPISVELTYGLERL

SEQ ID NO: 186354 - protein, 282 aa, Unknown
  Bacterial polypetide isolated from the Sargasso Sea
DASVLTKELVLDYSGHTDTFSDPMVDCKSCGLRFREDQVPKTCKKEDLTEPRQFNLMFKTNIGPIDDGSSYAYLRPETAQQIFTNFKNVVDSTSSSLPFGIAQIGKAFRNEITPRNFIFRVREFEQMELEYFVVPGEDDEAHSSWVQKRLNWWEKQGVPINTIELYEVPMDELAHYSKRTVDLMYKFPHGLEELEGIANRTDFDLGSHSKKQSELNINAKVKLNKDSNSKLSIKNNENGMVVPYVIEPSAGVERGMLAVLNEAFTIESLPENKSRIVLKLKP

SEQ ID NO: 186355 - protein, 203 aa, Unknown
  Bacterial polypetide isolated from the Sargasso Sea
VDLMYKFPHGVEELEGIANRTDFDLGSHSKNQNELSINAKTKENKHSNAKLAVQNEDNSWSVPYVIEPSAGVDRGFLAILNEAFIEEELENGSKRVVLALKPHLAPIKAAVIPLKKNNEELVILAKKLKDQLQNHRLGRVLLENTGNIGKSYRKHDEIGTPICITVDFDSLEKNTVTVRDRDTMEQETIPIDDLSKKYRDSIL

SEQ ID NO: 186356 - protein, 120 aa, Unknown
  Bacterial polypetide isolated from the Sargasso Sea
MASKKNKKKPKFQTFQDTIINLQKFWSKNGCVILQPYDMEVGAGTFHPATTLRSLGPKPWKAAYVQPSRRPTDGRYGDNPNRLQHYYQFQVIIKPSPLNIKKLYLNSLSVIGINHKDHDI

SEQ ID NO: 186357 - protein, 214 aa, Unknown
  Bacterial polypetide isolated from the Sargasso Sea
MPAKKKVKKSNILSFQDIIMSLQKFWGKNGCIILQPYDLEVGAGTFHPATTLRSLGPQPWKAAYVQPSRRPTDGRYGENPNRLQHYYQYQVIIKPSPKNIKQTYLKSLAAIGINVKNHDIRFVEDDWESPTLGASGLGWEVWCDGMEITQFTYFQQMTGLECKPVPVEITYGLERLCMFVQGKSNVYDLDWNSEGVKYKEVFLQAEKEFSAYNL

SEQ ID NO: 186358 - protein, 263 aa, Unknown
  Bacterial polypetide isolated from the Sargasso Sea
MVAKTMEELVSLCKRRGFIFQSNDIYGGVKGLYDYGPMGVELKNNLKQSWWKSMVYERDDIEGLDASILSSPVALKQSGHEDTFTDPLVDCKSCKSRWRSDQLIESKCPNCKSKDLTDPRPFNLMFKTAIGPVDDGSSFAYLRPETCQQIFINFKNIIDSTNKSIPFGIAQIGKAFRNEITPRNFVFRVREFEQMELEFFIEPGSEDKWHSYWVDKRVEWWINQGVRKDNIKIENVAKDDLAHYSSKTIDIIYQFPHGDEELE

SEQ ID NO: 186359 - protein, 259 aa, Unknown
  Bacterial polypetide isolated from the Sargasso Sea
MPAKKKVKKSNILSFQDIIMSLQKFWGKNGCIILQPYDLEVGAGTFHPATTLRSLGPQPWKAAYVQPSRRPTDGRYGENPNRLQHYYQYQVIIKPSPKNIKQTYLKSLAAIGINVKNHDIRFVEDDWESPTLGASGLGWEVWCDGMEITQFTYFQQMTGLECKPVPVEITYGLERLCMFVQGKSNVYDLDWNSEGVKYKEVFLQAEKEFSAYNFEFANTESLLKNFENTEIECKSLLEKKLSLPAYDQCLKASHISIYG

SEQ ID NO: 186360 - protein, 425 aa, Unknown
  Bacterial polypetide isolated from the Sargasso Sea
MAAKTMEELVSLCKRRGFLFQSNDIYGGIKGLYDYGPMGVELKNNLKQAWWKSMVYERDDTEGLDASILSAPVVLKHSGHEDTFSDPLVDCKICKSRFRADQLENSDCPRGGLLSDCKVKDLTEPRPFNLMFKTAIGPVDDGSSFAYLRPETCQQIFTNFKNILDSTSRTVPFGIAQMGKAFRNEITPRNFIFRVREFEQMELEFFVVPGTDDKWHEYWIDKRINWWVDQGIKKENLKTIEVEKSELAHYSKRTVDINYLFPHGEEELEGIANRTDFDLGSHTKNQNEFKIESKVMKNSSSTTKLAVQNLEEKKWYIPYVIEPSAGVDRGVLALLNEAYKEENTDKDNKRILLSLKPHLSPIKAAVIPLKKNKYELVNLSKEIKSNLQKLGLGRVVLENSGNIGKNYRRHDEIGTPICITVDFET

SEQ ID NO: 186361 - protein, 231 aa, Unknown
  Bacterial polypetide isolated from the Sargasso Sea
AYVQPSRRPTDGRYGDNPNRLQHYYQFQVLIKPSPKEIKKLYLNSLASIGINYKEHDIRFVEDDWESPTLGAAGLGWEVWCDGMEITQFTYFQQMAGIECNPISVEITYGLERLCMFIQNKKNVFDLVWNDDGILYRDVFYQSEKEFSEYNFDYANTDNLFKIFDMLESEAKSLIEKKISLPAYDQCLKSSHVFNLLDARGVISVAQRAEYIGRIRDLTKEIGKIWIESQK

SEQ ID NO: 186362 - protein, 285 aa, Unknown
  Bacterial polypetide isolated from the Sargasso Sea
MASKKKNKKIKFQSFQDTILNLQKYWSKHGCVILQPYDLEVGAGTFHPATTLRSLGSKPWRTAYVQPSRRPTDGRYGENPNRLQHYYQFQVLIKPSPKNIKKLYLNSLSTIGIKHKEHDIRFVEDDWESPTLGAAGLGWEVWCDGMEVTQFTYFQQMAGIECNPISVELTYGLERLCMFTQGKKNVFDLEWNNDGVLYRDVFHQSEKEFSKYNFELANTDNLFKIFDMIEKESKSLIENKLSLPAYDQCLKASHIFNILDARGVISVAQRAEYIARIRDLAKSVG

SEQ ID NO: 186363 - protein, 290 aa, Unknown
  Bacterial polypetide isolated from the Sargasso Sea
MASKKKTKIQTFQDTIFTLQKFWANHGCVILQPYDLEVGAGTFHPATTLRSLGPKPWKSAYVQPSRRPTDGRYGENPNRLQHYYQFQVIIKPSPKNIKKLYLNSLENLGIKHSEHDIRFVEDDWESPTLGAAGLGWEVWCDGMEVTQFTYFQKMAGMDCKPISVEITYGLERLCMFTQQKKNVFDLVWNNEGILYRDVFLQSEKEFSAYNFEFANVDNLFKIFDMVEQETKLLLEKKLPLPAYDQCLKASHVFNVLDARGAISVAQRAEYIAKIRDMTKSVGQVWVDNQK

SEQ ID NO: 186364 - protein, 684 aa, Unknown
  Bacterial polypetide isolated from the Sargasso Sea
MSAQDFLVELGTEELPPKALNTLADAFLAGIEKGLQTAGLKFEAKKVYAAPRRLAVLLTALETQQPDRNINLDGPPRQAAFDADGNPTQAALGFAKKCGVELSEIDQSGPKLRFSQVITGKPTASLLPTIVEDSLNDLPIPKRMRWGARKEEFVRPTQWLVMLLGDQVIDCTILAQKAGRESRGHRFHHPESVRITSPANYLNDLRAAYVLADANERRELISKRTEELARLQEGTAIVPPSLLDEVTALVEWPVPLVCSFEERFLDVPQEALITTMQDNQKYFCLLDVDGKLLPRFITVANIESKDPQQIIAGNEKVVRPRLTDAEFFFKQDKKQKLEDFNLRLQNVVFQEKLGSVYDKALRVSKLAAYIAPRIGGDAAWAARAGLLSKCDLATEMVGEFPEMQGVAGYYYALNDGEPDDVALALNEQYMPRGAGAELPTTLTGAAVAIADKLDTLVGIFGIGMLPTGSKDPYALRRAALGVLRILIDKKLDLDLTQAVVFAVGQFGTKVKQAGLAEQVLEFVFDRLRARYEDEGVDVSVYLSVRALQPGSALDFDQRVQAVQAFRKLPEADALAAVNKRVSNLLSKADNLGNAEVDPGLFADAKEFSLNSAIAKAENAVKPLIAERDYAQALARLASLREPVDAFFEAVMINADDAGVRKNRYAMLARLRGLFINIADISVLG

SEQ ID NO: 186365 - protein, 344 aa, Unknown
  Bacterial polypetide isolated from the Sargasso Sea
MEETNRELFEKVVKVAQARGFVFNASSIYGGLRSSYDYGPLGVLLKNNISKYWWKDIDNDSEISIFPVDTAIIQSSEVWKASGHLAEFSDPMVDHKPTGERYRADQVPDDIDKKDLTEPRQFNLMFETSIGPVQNENSTVYLRPETAQGIFVNFENVLRTMRAKIPFGIANIGKSFRNEITPGQFIFRTREFEQMEIEFFCKEEDENKWFDYWVKKRMEWYKSIGIPDTSLRLREHSDNELAHYASKTVDIEFLYPWGWGELEGIANRGTFDLSSHEKASGKDMSYFDPETNEKITPTVIEPAGGLTRTLFALLCSCYDEEEVNDTTRTLFRFDFNIAPIQIWN

SEQ ID NO: 186366 - protein, 223 aa, Unknown
  Bacterial polypetide isolated from the Sargasso Sea
MVSKKKNFLTFQNTIFNLQKYWSGIGCVILQPYDLEVGAGTFHPATTLRSLGPKPWKAAYVQPSRRPTDGRYAQNPNRLQHYYQFQTIIKPSPDNIKKLFLNSLSVVGIEHNKHDIRFIEDDWESPTLGAAGLGWEVWCDGMEITQFTYFQQMAGIQCNPISVEITYGLERICMFTQQKKNVFDLIWNDEGTTYKDIFYKSEKEFSKYNFELANTESLLTKFE

SEQ ID NO: 186367 - protein, 301 aa, Unknown
  Bacterial polypetide isolated from the Sargasso Sea
MTTKHDVKTFQGFILTLQEYWAQQGCAIVQPLDMEVGAGTFHPQTFLRSLGPEPMSSAYVQPSRRPTDGRYGENPNRLQHYYQFQVVLKPSPDNIQELYLGSLQALGIDTQIHDIRFVEDNWESPTLGAWGLGWEVWLNGMEVTQFTYFQQVGGLECSPVTGEITYGLERLAMYIQGVDSVYDLVWTDGPMGRITYGDVFHQNEVEQSTYNFEHADVDFMFALFDQCEKMCQHLLSLEKPLPLPAYEQVMKASHAFNLLDARHAISVTERQRYILRVRTMAKAVAESYYQAREALGFPMCK

SEQ ID NO: 186368 - protein, 293 aa, Unknown
  Bacterial polypetide isolated from the Sargasso Sea
MVSKIKKQKKKIQTFQETIFNLQKFWSKKGCVVLQPYDMEVGAGTFHPATTLRSLGPKPWRAAYVQPSRRPTDGRYGDNPNRLQHYYQFQVLIKPSPENIKKLFLNSLSVIGIDHNEHDIRFVEDDWESPTLGAAGLGWEVWCDGMEITQFTYFQQMGGYECKPVSVEITYGLERICMFTQQQKNVYDLLWNDEGVQYKEVFHQAEKEFSAYNFEHANIDNLLKMFDMHESEAKSLVEKKISLPAYDQCLKASHIFNILDARGAISVAERAGYIGRIRDITKAVAGIWLDSQS

SEQ ID NO: 186369 - protein, 316 aa, Unknown
  Bacterial polypetide isolated from the Sargasso Sea
MQQYWAEQGCVVVQPLDMEVGAGLFHPSTFLRAIGPENWNSAYVQPSRRPTDGRYGENPNRLQHYYQFQVVLKPSPDNIQELYLGSLRMLGFDPLVHDIRFVEDNWESPTLGAWGLGWEVWLNGMEVTQFTYFQQVGGIDCYPVTGEITYGLERLAMYIQGVDSVYDLVWSDGPFGKVTYGDVFLQNEVEMSTFNFEHANVDELFKQFDLFEGESSKLIDAGLPLPAYEYVLKASHTFNLLDARKAISVTERQRFILRVRTLARAVAQAYFDKRRALGFPMADDTVREEVMAELQKQDDKAAKQAQKDGQKKKGKQ

SEQ ID NO: 186370 - protein, 284 aa, Unknown
  Bacterial polypetide isolated from the Sargasso Sea
AQIGKAFRNEITPRNFIFRVREFEQMELEFFVKPGEDEKWHKEWTEMRLKWWQDQGLSSDNIELYHVSEDELAHYSKATVDIMYRYPHGLEELEGIANRTDFDLGSHTKGQDQLSIFSKVAENTQSNAKLAVQDLKTKEWFLPYVIEPSAGVDRGFLAILNEAYEEEALEGGKTRIVLHLKPHLSPIKAAVIPLKRNDSNIVEKAVNLKNKLQRTISGKVLLENTGNIGKNYRKHDEIGTPVCITVDFQSLDDDTFTVRDRDSMQQERVSLEEIRHFLEENYEI

SEQ ID NO: 186371 - protein, 235 aa, Unknown
  Bacterial polypetide isolated from the Sargasso Sea
PWKTAYVQPSRRPTDGRYGENPNRLQHYYQFQVLIKPSPKNIKKLYLNSIASIGIKHEEHDIRFVEDDWESPTLGAAGLGWEVWCDGMEVTQFTYFQQMAGVECDPISVEITYGLERLCMFIQNKKNVFELDWNNDGIFYKDVFHQAEKEFSAYNFEYANTEKLFKMFDMLESEARSMIENKISLPAYDQCLKSSHVFNILDSRGVISVAQRAEYISRIRDLTKEIGKIWIESQS

SEQ ID NO: 186372 - protein, 255 aa, Unknown
  Bacterial polypetide isolated from the Sargasso Sea
MVSKKKTLKSKKFLKPKFKSFQETIMNLQNYWGKNGCVILQPYDIEVGAGTFHPATTLRSLGPMPWKTAYVQPSRRPTDGRYGKNPNRLQHYYQFQVLIKPSPKNIKKLYLNSLKSIGINHLNHDIRFVEDDWESPTLGAAGLGWEVWCDGMEITQFTYFQQMAGIECKPVSVELTYGLERICMFTQGKKNVFDLDWNNEGIKYRDVFYRAEKEYSAYNFEYANTDNLFKIFDMLENETKSLLDKKLSLPAYDQC

SEQ ID NO: 186373 - protein, 229 aa, Unknown
  Bacterial polypetide isolated from the Sargasso Sea
MDKTIEKIVSLCKRRGFIFQSSDIYGGFSAVYDYGPLGIELKNNISNLWWKEMTQVHENIVGLDSGILMHPKIWEASGHVGAFNDPLVDCKQCKSRYRADEFSENYSSINWEETKCPNCGSVGILTEPRQFNLMFKTHVGPVEETGTEAFLRPETAQGIYVNYQLVQGAMRMKVPFGIAQIGKAFRNEIVARNFIFRTREFEQMEMQYFVKPGTDNEAFSQWKDKRLNF

SEQ ID NO: 186374 - protein, 294 aa, Unknown
  Bacterial polypetide isolated from the Sargasso Sea
MASKIKTKKPKFQSFQDTILSLQKYWSKQGCVVLQPYDMEVGAGTFHPATTLRSLGTKPWKAAYVQPSRRPTDGRYGDNPNRLQHYYQFQVLIKPSPKNIKKLYLNSLSTIGINHKDHDIRFVEDDWESPTLGAAGLGWEVWCDGMEITQFTYFQQMAGFECKPVSVELTYGLERICMFTQQKKNVFDLLWNTEGIKYKDVFHQAEKEFSAYNFEHANTDNLFKIFDMLELEAKSLTEKKISLPAYDQCLKASHVFNILDARGVISVAQRAEYIGRIRDITKGVAGVWLNHQTK

SEQ ID NO: 186375 - protein, 289 aa, Unknown
  Bacterial polypetide isolated from the Sargasso Sea
MFFQDIVQNLNNFWSEEGCLIMQPYDTEKGAGTMNPHTFLRAIGPEPWSVAYAEPCRRPTDGRFGDNPNRAQHYFQYQVIIKPSPQGIQEKYLKSLESLGIKPRNHDIRFVEDNWESPTLGAWGVGWEVWLDGMEVTQFTYFQQCGGIDCNPIPIEITYGLERIAMFLQDKESIWDLSWNKDLKYSEIWLQFEKSQCSYNFTESNADNLRKLFEIYQVEAISLTEKKLTYPALDFVLKCSHTFNLLDARGVISVTDRAQYIEKIRKLAREVAASWVEERESLNFPLIKK

SEQ ID NO: 186376 - protein, 353 aa, Unknown
  Bacterial polypetide isolated from the Sargasso Sea
MSKKHLDKIVSLCKRKGFVFPNSEIYGGLKASYDYGPLGVDLKRAISEKWWKAMTHNSNIVGLDSSIMVHPDVWEASGHVANFNDPMTDNKDNKKRYRVDDLLLQQKNKVIDALCEMMSIENNNDNDTIDKISSTLLNDANKYNDALESAGVIDPFSGNVGKWTQATQFNLMFKTNAGPSEKTGKSVYLRPETAQGIYINYLLVQNSMRLKVPFGIAQTGKAFRNEIIARNFIFRTREFEQMEMQYFVHPSEDESSMNFWKKQRMDFYSSELGISNENLKFHQHSKDALAHYAKDAFDIEYNFPFGWGEVEGIHNRTDFDLKEHEKLSGKNMMYFDAIKNEKYHPYIIETSTG

SEQ ID NO: 186377 - protein, 201 aa, Unknown
  Bacterial polypetide isolated from the Sargasso Sea
MPAQSMEQLVSLCKRRGFIFQTNEIYGGLQGVYDYGPLGVELKENLKKSWWAAMVYSRDDVEGLDASILTSKKVLKYSGHEKTFTDPLVDCKVCKNRMRADHLKDSKCLHCGSKNLTDPRPFNLMFKTNIGPVADDESYAYLRPETAQQIFTNFKNVVDSTSKSLPFGIAQIGKAFRNEITPRNFIFRVREFEQMELEFFV

SEQ ID NO: 186378 - protein, 506 aa, Unknown
  Bacterial polypetide isolated from the Sargasso Sea
FKVKDFEDIKRKLRDAYVILDHKERAEIILNDANNLAFAHGLDLIHDDALLEEVSGLVEWPVTLLGEVDNAFSDLPAEVLQASMKEHQKFFSLKNSKTGKIERFITVANIEAADNGETILKGNQKVLYARLSDAKFFWENDIRLIQKDGLDAWLGKLDDVTFHNKLGSQADKVTRVSTLTKILAKQLLCDIEDAVTSANICKCDLASEMVYEFPELQGVMGRYYALRAGYSEDVAKVCEEHYAPKGPNDPVPTASISVAVSLADKLDTLLGFWTIDEKPTSSKDPFALRRAALGVIRIILENDVELDLVEVLNAHFEHLSKFGNHPHAVSDVMNFIRDRFKIYLRDKNIRYDVVDACLAVGKVGNLKLVKKRINALANLLSSDEAEDFFQGFKRANNILAKAEQKDGVEYSFGADIKYMEVDPEKELFNALKEQHSVVEQAVFEEAFQKAILAVTDLRQPIDDFFECVQVNSENDIVRRNRLNLLGQIRATCNLVADLSKIEGQSG

SEQ ID NO: 186379 - protein, 453 aa, Unknown
  Bacterial polypetide isolated from the Sargasso Sea
MAAESMDKLVALCKRRGFIFQTNEIYGGLQGVYDYGPLGVELKNNLKRSWWNAMVYERDDIEGIDSSILTNPLVLKQSGHEETFSDPLVDCKNCKARIRADHLKDGKCPECGSDDLTDPRPFNLMFKTNVGPIEDGSSFAYLRPETAQQIFTNFKNVLDSTPHHLPFGIAQIGKAFRNEITPRNFIFRVRELEQMEMEFFVRPGEDEKWHKTWTDLRVAWWEKQGINKKSIELLDVPKNELAHYSKATIDIMYKYPHGLEELEGIANRTDFDLGSHTRDQSKLKIAAKVDKNTKSNAKMAVQDPETREWIVPYVIEPAAGVERGVLAVLNEAYKVEELEDGKERTVLSLKPHLSPIKAAVIPLKKNNEDLVKKAKELKNALQSLGLGRVLLENSGNIGKSYRRHDEIGTPMCITVDFESLEDGTVTIRDRDSMEQSRLDVASVSDHFKKTIDN

SEQ ID NO: 186380 - protein, 449 aa, Unknown
  Bacterial polypetide isolated from the Sargasso Sea
MNNASMEDLVSLCKRRGFIYQSNEIYGGLQGLYDYGPLGVELKNNLKKSWWKSMIYERDDIEGIDSSILTNPLVLKYSGHENTFTDPLVDCKSCGERFRADQVPDYCKKEDLTEPRQFNLMFKTNVGPIEDGNSFAYLRPETAQNIFTNFKNVLDSNPHPLPFGIAQMGKAFRNEITPRNFIFRVREFEQMELEFFVKPGEDEEWHKKWTDLRLQWWEDQGVSKERLEIYHVPDDELAHYSKATVDIMYNFPHGLEELEGIANRTDFDLGSHTRGQKDLNIDATVAENTQSNAKLAIQDLETKQWVVPYVIEPSAGVDRGFLAILNEAYKVESLENNKERTVLSLKPHLAPIKIAVIPLKRNENSIVMTSVDLKNDLQRTIEGRVLLENTGNIGKNYRKHDEIGTPACITVDFQTLEDNTVTIRDRDTMDQTRLKIDEVRTFLAQNYKI

SEQ ID NO: 186381 - protein, 418 aa, Unknown
  Bacterial polypetide isolated from the Sargasso Sea
MVLLGVELKNNLKSSWWSAMVFERDDIEGLDASILSKKELFKYSGHEETFSDPLVDCKSCKSRWREDLIEDRKCPGCGSSELTAARPFNLMFKTPVGPVENEENYAYLRPETAQHIFASFKNVKDSTSRQIPFGIAQIGKAFRNEINPRNFIFRLREFEQMELEYFVKPGEDESTLEYWKKERLEWWERQGIDLSNIEIYDVPENELAHYSKRTLDIMYRFPHGLEELEGIANRTDFDLGSHTKNQKDLSLSSSVVENDESTMRLAVQDLEANAWYVPYVIEPSAGVDRGVLAILNEAYTNEDIGEGKQRVVLKLKPHLSPIKAAVIPLKKNKDELVSMAKEIKQSLQSLGLGRVFLENTGNIGKAYRRHDEVGTPVCITVDFDSLENNTVTIRDRDTMEQSRVDISELKQSYLSILK

SEQ ID NO: 186382 - protein, 452 aa, Unknown
  Bacterial polypetide isolated from the Sargasso Sea
MASNNMEDLVSLCKRRGFIFQSSEIYGGLQGIYDYGPLGVELKNNLKSSWWKSMIYDRDDVEGLDASILTSRHVLKYSGHEDTFSDPLVDCRNCKNRFRSDQATDGKCPACGSSDLTEPRPFNLMFKTTVGPVDDGSNYAYLRPETAQQIFTNFKNILDSTSKTIPFGIAQIGKAFRNEVTPGKFIFRVREFEQMELEFFVEPGKDDEWHKYWVDKRYSWWIDQGISEKRLKKLDVEDADLSHYSKATVDLMYEFPHGLEELEGIANRTDFDLGSHTKNQNDFKISADVMKNNQSTTKLSIQNLESKEWYIPYVIEPSAGVDRGVFALLNEAYKEEDLENGNKRIVLSLKPHLSPIKAAVIPLKRNNEDLVNKASKIKNDLQALGMGRVILENSGNIGKGYRRHDEIGTPICITVDFETIENDTVTVRDRDTMSQKRVSSQDLNHEYKKVFN

SEQ ID NO: 186383 - protein, 221 aa, Unknown
  Bacterial polypetide isolated from the Sargasso Sea
MSAKSMDELVSLCKRRGFIFQSSEIYGGLQGMYDFGPLGVELKNNLKNAWWKSMVYERDDIEGLDASILTNQLVLNYSGHEDTFTDPLVDCKSCKSRWRADQIEDACPNCGSKDLTDPRPFNLMFKTNVGPLEDEGSIAYLRPETAQQIFTNFKNIVDSTSRALPFGIAQIGKAFRNEITPRNFIFRVREFEQMELEFFVQPGEDNLWHEKWIEERSKWWE

SEQ ID NO: 186384 - protein, 294 aa, Unknown
  Bacterial polypetide isolated from the Sargasso Sea
MVSKKKTKNSKSFISFQDTILNLQKYWSKKGCVILQPYDLEVGAGTFHPATTLRSLGSKPWKTAYVQPSRRPTDGRYGENPNRLQHYYQFQVLIKPSPKDIKKMYLNSLSSIGIKYEEHDIRFVEDDWESPTLGAAGLGWEVWCDGMEVTQFTYFQQMAGMECNPISVEITYGLERLCMFIQGKKNVFDLIWNDEGVLYKDVFHQAEKEFSAYNFEYANTDKLFKIFDMLEEEAKSLIEKKISLPAYDQCLKSSHVFNILDARGVISVAQRAEYIARIRDLTREIGKIWVETQN

SEQ ID NO: 186385 - protein, 452 aa, Unknown
  Bacterial polypetide isolated from the Sargasso Sea
MAAKNMEELVSLCKRRGFVFQSGEVYGGLQGVYDYGPLGVELKNNLKNSWWSSMVYERDDIEGLDASILSKQELFKYSGHEETFSDPLVDCRSCKSRWREDLVKDGKCLSCGSTDLTEARAFNLMFRTPMGPVENEESFAYLRPETAQHIFTSFKNVQDSTSRQIPFGIAQIGRAFRNEINPRNFIFRLREFEQMELEYFVRPGDDEAALDYWRDQRLRWWEDQGIEPSSLEIYDVPESDLAHYSKRTLDIMYRFPHGLEELEGIANRTDFDLGSHTKNQRGLGLVSETKKNDESTMRLAVQDIEAKKWYVPYVIEPSAGVDRGVLAILNEAYTVEDLGEGKERVVLRLKSHLSPIKAAVIPLKKNKEELVALAKDIKSNLQSMGKGRVFLENTGNIGKAYRRHDEVGTPVCITVDFDSLEHGTVTLRDRDTMEQRTVAISELNQLYLDSLK

SEQ ID NO: 186386 - protein, 293 aa, Unknown
  Bacterial polypetide isolated from the Sargasso Sea
MVSKKKKIKKEPLTFQDTILTLQKYWSKQGCILLQPYDLEVGAGTFHPATTLRSLGEKPWKTAYVQPSRRPTDGRYGDNPNRLQHYYQFQVLIKPSPSNIKKLYLNSIAAIGIDYNENDIRFVEDDWESPTLGAAGLGWEVWCNGMEITQFTYFQQMAGIECKPISVEITYGLERLCMFIQNKKNVFDLTWNNDGVSYKEVFHQSEKEFSAYNFEHANTANLFKIFDMIEEEAKSLIEKEISLPAYDQCLKASHIFNILDARGVISVAQRAEYISKIRDLTKAIGKIWLESQK

SEQ ID NO: 186387 - protein, 198 aa, Unknown
  Bacterial polypetide isolated from the Sargasso Sea
MEQLVSLCKRRGFIFQTNEIYGGLQGVYDYGPLGVELKENLKKAWWTSMVYSRDDVEGLDASILTNKKVLKYSGHEETFTDPLVDCKDCKNRMRADHIKDSKCLHCGSTNLTEPRPFNLMFKTNIGPVADDESYAYLRPETAQQIFTNFKNVVDSTSKSIPFGIAQIGKAFRNEITPRNFIFRVRELNKGIRVFEKKG

SEQ ID NO: 186388 - protein, 442 aa, Unknown
  Bacterial polypetide isolated from the Sargasso Sea
MDELVALCKRRGLIYQSSDIYGGLQGVYDFGPLGVELKNNIKKAWWDSMIYQNDDIEGLDSAILTNPLVLKYSGHEDTFSDPMVDCKSCGLRFRADQVPDSCKKEDLTEPRQFNLMFKTNVGPLEDGESFAYLRPETAQQIFTNFKNVVDSTSKSLPFGIAQIGKAFRNEITPRNFIFRVREFEQMELEYFVKPGTDDDIHNSWVQKRLKWWVDQGVPMESITLYEVPTNELAHYSKRTIDLMYNFPHGVEELEGIANRTDFDLGSHSKKQNDLNIKSNITKNKDSNSKLAVQEDGEWVVPYVIEPSAGVERGFLAIINEAYSVEDLEDGKSRVVLKLKPHLSPIKAAVIPLKKNNKEIVSLSKLVKKRLQKLGLGRIIFENTGNIGKSYRKHDEIGTPLCITVDFESLDDKSVTVRDRDTMNQTRIEFEKLNDFLINTIKN

SEQ ID NO: 186389 - protein, 336 aa, Unknown
  Bacterial polypetide isolated from the Sargasso Sea
MTEPRQFNLMFKTNVGPIDDGSSFAYLRPETAQQIFTNFKNVVDSTSKQIPFGIAQIGKAFRNEITPRNFIFRVREFEQMELEYFVEPGNDEQALDEWVQKRLNWWKDQGVPIEKIELYDVPTDELAHYSKRTVDLMYMFPNGLEELEGIANRTDFDLASHSKKQDELNITSNVEKNKHSNSKMAVQDKKGDWIVPYVIEPSAGVERGILAVLNEAFVKENLGDGKTRVVLKLKPHLSPIKAAILPLKKNNEEIVTLSKEVKNSLQKLGLGRVILENTGNIGKGYRRHDEIGTPVCITVDFESIEDSSVTIRDRDSMDQVRVQISELAEIYKNKIK

SEQ ID NO: 186390 - protein, 453 aa, Unknown
  Bacterial polypetide isolated from the Sargasso Sea
MTAKSMEQLVALAKRRGFIFQSNEIYGGLQGVYDYGPLGVELKNNLKSIWWSSMVYERDDIEGLDASILTHSDVLRYSGHEETFTDPLIDCRSCKYRCRADQLVDGKCPNCGSNDLTEPRPFNLMFKTSVGPIAGDDNFVYLRPETAQQIFTNFKNILDSSSRSLPFGIAQIGKAFRNEITPRNFIFRVREFEQMELEYFVHPAKDQDYFNEWVQTRLKWWIDIGISEQNLELYEVPENDLSHYSKSTTDIMYKFPHGTEELEGIANRTDFDLGSHTKNQKDYSLSATVLSNDKSNSKLAINDPGSKEWVIPYVIEPSAGVDRGVLALLNEAYTEERLENDDTRIVLKLDPRLAPIKVAVIPLKKNNSEIVKLAHKIKDSIQSLRIGRIVIENTGNIGKSYRKHDEIGTPICITVDFDSLENEDVTIRDRDTMEQIRQPISKVSEFVKQQINK

SEQ ID NO: 186391 - protein, 378 aa, Unknown
  Bacterial polypetide isolated from the Sargasso Sea
MEELVSLCKRRGFIYQTNELYGGMQGVYDYGPLGVELKNNLKQAWWSSMVYERDDIEGLDSSILTHPNVLRYSGHEETFTDPLVDCKDCKSRFRADHIDNNKCPSCGSENLTDPRPFNLMFKTTIGPVDDGSSFAYLRPETAQQIFTNFKNVVDSTSRTLPFGIAQIGKAFRNEITPRNFIFRVREFEQMELEFFVEPGSDEEWHQKWVDERVSWWERQGVDKSKLEIIDVDKEDLSHYSKKTVDIMYEFPHGLEELEGIANRTDFDIGSHTKNQKDFEINADVIKNDDSVTKLAIQDKINNTWTIPYVIEPSAGVDRGFLAVLNEAYKVEKLENGKERTVLSLKSHLSPIKAAVIPLKRNNQDLVNKASRMKKQCSQ

SEQ ID NO: 186392 - protein, 300 aa, Unknown
  Bacterial polypetide isolated from the Sargasso Sea
MVSKNKNKNKNKKKQKPKFQTFQETILNLQKFWSKQGCIILQPYDMEVGAGTFHPATTLRSLGTQPWKTAYVQPSRRPTDGRYGENPNRLQHYYQFQVLIKPSPENIKRLYLNSLTTIGIHHNDHDIRFVEDDWESPTLGAAGLGWEVWCDGMEITQFTYFQQMAGYECKPVSVEITYGLERICMFTQQQKNVYDLLWNDEDIKYREVFHQAEKEFSAYNFEHANVEQLFKMFDMHESEAKSLVEKKISLPAYDQCLKASHVFNVLDARGAISVAQRAGYIGRIRDITKSAAGIWIDSQN

SEQ ID NO: 186393 - protein, 400 aa, Unknown
  Bacterial polypetide isolated from the Sargasso Sea
MSEEKFKKIISHAKEYGFIFQSSEIYDGLSAVYDYGQNGVLLKNNIKEYWWKSMTQFNDNIVGIDSAIFSHPTTWKASGHLDAFNDPLIDNKDSKKRYRADDLIEGFINKIEKKLSKEIEKNRKRFGESFDEEIFLSTNDRAKKYKAEINDLKSNLNKALNEENLDLLKEIIISKNISCPVSGTTNWTDVKQFNLMFNTKVGASAESATELFLRPETAQGIFLNYLNVQKTGRMKIPFGIAQIGKAFRNEIIARQFIFRMREFEQMEMQFFIKPGTQKEWYEKWKKNRMEWHLSIGINKNNYRFHDHDKLAHYADAACDIEFNFPFGFKELEGIHSRTDFDLANHEKFSSKQIKYFDPEDESKYIPYVVETSIGLDRMFLAVFSNSLSFESLEDGSQRTV

SEQ ID NO: 186394 - protein, 297 aa, Unknown
  Bacterial polypetide isolated from the Sargasso Sea
MPKKIKKKNKTLFQSFQDTILNLQKYWSKQGCVIVQPYDMEVGAGTFHPATTLRSLGPKPWKVAYAQPSRRPTDGRYGNNPNRLQHYYQFQVLIKPSPKEIKKLYLNSLNVIGISHKDHDIRFVEDDWESPTLGAAGLGWEVWCDGMEITQFTYFQQMAGMECKPVSVELTYGLERICMFTQQKKNVFDLLWNNEGIEYREVFHQAEKEFSAYNFEHANTENLFKIFDMLELEAKSLIEKKISLPAYDQCLKASHLFNILDARGVISVAQRAEYISRIRDLVKGVGQVWLESQKQNV

SEQ ID NO: 186395 - protein, 452 aa, Unknown
  Bacterial polypetide isolated from the Sargasso Sea
MTAKSMEELVALCKRRGFIFQSNEIYGGLQGLYDYGPLGVELKNNLKASWWSSMVYERDDVEGIDASILTSQDVLGQSGHEDTFSDPLIDCKDCKARWREDEIEEKKCPSCGSLNITEPRPFNLMFKTSLGPIDDGSSFAYLRPETAQNIFTNFKNVLDSSPRHLPFGIAQIGKAFRNEITPRNFIFRVREFEQMELEFFVQKGSDDEWHKKWTDLRVQWWLDQGIDKDNIELLHVKGNELAHYSKATVDIMYKFPHGLEELEGIANRTDFDLGSHTKFQEDLNISSKVKQNTKSKSRLAIQDSDNNWEIPYVIEPSAGVDRGVLAVLNEAYRKEIIDNGKERVVLSFKPHLAPIKAAVIPLKRNNESLVEAASKLKSELQKRKLGRVILENTGNIGKSYRKHDEIGTPLCITIDFDSIEKGTATIRDRDSMEQTTLNLSEIPAYYSQYIGS

SEQ ID NO: 186396 - protein, 449 aa, Unknown
  Bacterial polypetide isolated from the Sargasso Sea
MPAQSMEQLVSLCKRRGFIFQTNEIYGGLQGVYDYGPLGVELKENLKKSWWTAMVYSRDDIEGLDASILTNKKVLQYSGHEETFTDPLVDCKTCGERFRADQVPEYCKQEDLTEPRRFNLMFKTNIGPVADKEAYAYLRPETAQQIFTNFKNVIDSTSKSIPFGIAQIGKAFRNEITPRNFIFRVREFEQMELEFFVEKGQDEDWHEYWVKERINWWVDQGVSEEKIEVLRVPKEDLSHYSKATVDLMYAFPHGVEELEGIANRTDFDLGSHSKNQEDLNITAKVLKNKDSNARLAIQNIESKKWEIPYVIEPSAGVDRGVLAILNEAYKEENLENGKSRVVLALKPHLAPIKAAIIPIKKNDSTIVDFSKKIKNKLQKLGLGRIVFENTGNIGKSYRKHDEIGTPICITIDFDTLEDNTVTVRDRDSMEQKRVVVGDLENLLINLLKR

SEQ ID NO: 186397 - protein, 441 aa, Unknown
  Bacterial polypetide isolated from the Sargasso Sea
MNKTIEKIVSLCKQRGFVYQSSDIYGGFGAVYDYGPLGVELKNNIANRWWREMTQIHENIVGLDSGILMHPKIWEASGHVGEFHDPLVDCKQCKARYRADELSDNIENEEWDKMKCPNCGTTGKMTSPRQFNLMFKTQVGPVEDTGSVAYLRPETAQGIYVNYQLVQGSTRMKIPFGIAQIGKAFRNEIIARNFIFRTREFEQMEMQYFVKPGSDNESMSEWKEKRFNFYIDTLGIDKNNIRFHQHGDGELAHYAKEAWDIEYNFPFGWSEIEGIHNRTDFDLARHEEFSGKNLKYFDQVANERYLPYIIETSAGLNRMMLSVLSDAYWEDIDNNRTVMKFHPRIAPIKAVICPLVKKDGLPEKAKNIVDILRPHFNVLFDQQGSIGKRYYRQDEAGTPFGITVDHQTMDDNTVTLRHRDTQKQDRMAIDDILKTIQSSLV

SEQ ID NO: 186398 - protein, 366 aa, Unknown
  Bacterial polypetide isolated from the Sargasso Sea
KVVRPRLSDAQFFFVTDAKTKLVDRLPALSTVLFQQKLGTLLEKSERIAKVAAFIAGKIGADVQHAERAGLLSKTDLMTNMVGEFPEVQGVMGMHYARLDGEAEAVAVALNEQYKPRFAGDSLPGQLEACAVAIADKMDSLVGIFGIGQAPKGDKDPFALRRAAIGALRIMVEKQLPLDLLELIEFSKTTFGDKLTQQSVSDEVLDFMLGRFRAWYEGEGFGVDVIQAVLARRPTNPADFDRRVKAVAEFRKLDAALALAAANKRVANILAKVTEAIPQSINSALLSEEAEQALYKAIVAEQAYQATVSSYAEGLSHLAAMRDVVDQFFDKVMVNADDAAVRLNRQALLQQLRELFLRVADISVLQ

SEQ ID NO: 186399 - protein, 358 aa, Unknown
  Bacterial polypetide isolated from the Sargasso Sea
MPAQSMEQLVSLCKRRGFIFQTNEIYGGLQGVYDYGPLGVELKENLKRSWWAAMVYSRDDVEGLDASILTNRKVLKYSGHEDTFTDPLVDCKDCNNRMRADHLKDSKCLHCGSTNLTEPRPFNLMFKTNIGPVADDESYAYLRPETAQQIFTNFKNVVDSTSKSIPFGIAQIGKAFRNEITPRNFIFRVREFEQMELEFFVKKGEDEDWHKYWIEERINWWVQQGVNKEKIEILNVPREELSHYSKATIDLMYEFPHGVEELEGIANRTDFDLGSHSKNQKDLDIEADVLKNKDSNARLAIQNIDSKEWEVPYVIEPSAGVDRGVLAILNESYKEETLENGKNRVVLALKPHLSPIKA

SEQ ID NO: 186400 - protein, 699 aa, Unknown
  Bacterial polypetide isolated from the Sargasso Sea
MTHNHPAPLLVELLTEELPPKALARLGDAFAEGLAQRLAARDLIDGELVFERYATPRRLAVVVQNVRAVAPEKQVREKVLPVSVALDAEGKPTAPLAKKLAALGHPNLSIADLERAQDGKAEAFFLNYSAAGATLADGLQAALDETLEKLPIPKVMTYQRPDGSDVKFVRPVHRLTVLHDDRVVPVTAFGVDAGDTTLGHRFLSDGLVAIQHARAYADTLRDKGRVIAHFADRRETIRTQLNEHANGDTVVMPESLLDEVTSLVEWPVVYPCRFEDEFLQVPQECLILTMQTNQKYFALTDVAGKLRSRFLIVSNIETKTPGEIIEGNERVVRPRLADAKFFFEQDKKKPLADRVPQLANVVYHNKLGSALARVERLEALAGEIAPAIGADATHAKRAARLAKADLLTDMVGEFPELQGTMGTYYARHDGEADDVALACAEHYQPRFSGDALPTTPVSTAVALADKLETIVGIWGIGLAPTGEKDPFALRRHALGVLRLLLEKQLPLDLVSLLRTAHARFEGVPGVAESTDAILAFFMDRLRGLLRERGYSAGEVDAVLSLNPTRVDDLVARLDAVREFTRLAEAEALAAANKRISNILKKSEGGANGTVQPTLLVEAAEKALHEQLAAVTPHVQSQLEARAYTGALSALAALRAPVDTFFNDVMVNAEDPALRANRLALLSALHQQMNCVADISKLAA

SEQ ID NO: 186401 - protein, 334 aa, Unknown
  Bacterial polypetide isolated from the Sargasso Sea
MLTFQQIILTLQSYWDKQGCALLQPIDMEVGAGTSHVHTFLRAVGPEPWRAAYVQPSRRPKDGRYGENPNRLQHYYQYQVVLKPAPENILDLYLGSLEALGFDLQQNDVRFVEDDWENPTLGAWGLGWEVWLNGMEVTQFTYFQQVGGLDCKPVLGEITYGLERLAMYLQKVENVYDLVWTEWEEQGPNGPELRRLSYGDVYHQNEVEQSTYNFEHANVDLLFTFFNSYEAEAKKMIDAQLALPAYELVLKAGHTFNLLDARGAISVTERAAYIGRIRALSRLVAQAYYDSREKLGFPMLGNPPGVPGLTTDAQDAAQPAWAPPLKVERKIDQD

SEQ ID NO: 186402 - protein, 431 aa, Unknown
  Bacterial polypetide isolated from the Sargasso Sea
MEKPDKELFDKVVKISQARGFVFNASSIYGGLRSSYDYGPLGTILKQNISKYWWESFNDVEVNIYPVDTAIIQSSDVWKSSGHLDEFTDPMVDHKPTGERFRADQVPDDLKKEDLTEPRQFNLMFETNIGPVQDENSAVYLRPETAQGIFVNFENVLRTMRAKIPFGIANIGKSFRNEITPGQFIFRTREFEQMEIEFFCKESDEDEWMDYWINKRMDWYKSIGIKEAQLQLREHADNELAHYAKKTVDIEYLYPWGWGELEGIANRGNYDLSSHQKNSGKDLTYFDSLNDEKYLPSVIEPAGGLTRTLFALLLSVYDEEKLENDEKRTVFRFTFELAPIQIGILPLSKKDDLIQVCSEINKTLKNDYRTEVDITQSIGKRYRRQDEIGTPYCITVDFESLEDNCVTIRDRDTMEQERISIDKLSEYFEKL

SEQ ID NO: 186403 - protein, 445 aa, Unknown
  Bacterial polypetide isolated from the Sargasso Sea
MPAKNIDELIALCKRRGFIFQSNEIYGGTQGLYDYGPLGVELKNNLKDAWWKSIVYERDDVEGLDAAILTKSTVLKHSGHEDTFSDPMVDCKSCGERFRADQVPDYCKKEDLTEPRQFNLMFKTNIGPIDDGKSFAYLRPETAQNIFTNFKNVVDSTARTVPFGIAQMGKAFRNEITLKSFIFRVREFEQMELEFFVRPGDDEKWHKSWVESRVQWWKDQGISDKSLELYDVPADELAHYSKATVDIMYKFPHGVEELEGIANRTDFDLGSHSKNQKELNIKAKVSENNESNSKLALQDENNNWFVPFVIEPSAGVDRGVLAILNEAYFVEEIEGKERVVLKLKPHLAPIKAAIMPLKKNDKKIVALAKKVKDELQKLGLGRILFENSGNIGKNYRRHDEVGTPVCITVDFESLDNHTVTVRDRDSMKQERVSLDKVSEHLKKII

SEQ ID NO: 186404 - protein, 448 aa, Unknown
  Bacterial polypetide isolated from the Sargasso Sea
MTAKTMDELVALCKRRGFIYQSSDIYGGLQGVYDFGPLGVELKNNIKRAWWESMVYENDDIEGLDSSILTNPLVLKYSGHEDTFSDPMVDCKSCGLRFRADQVPDMCKKDDLTEPRQFNLMFKTNVGPIDDGESFAYLRPETAQQIFTNFKNVLDSTSRALPFGIAQMGKAFRNEITPRNFIFRVREFEQMELEYFVKPGTDEDIHSSWVQKRLSWWNDQGVPMESIELYDVPSEELAHYSKKTIDIMYKFPHGLEELEGIANRTDFDLGSHSKKQDELNIKSKVIKNEDSNSKLAIQNDNGDWEIPYVIEPSAGVERGFLAILNEAYKIEDLDDGKTRIVLNLRPHLSPVKIAVIPLKKNNDDIVMLAKNIKNNLQKLGMGRVILENTGNIGKSYRKHDEIGTPICITVDFESLENSDVTIRDRDTMKQIRIKIDKLSNFCVDKIKS

SEQ ID NO: 186405 - protein, 282 aa, Unknown
  Bacterial polypetide isolated from the Sargasso Sea
MNFQNLILNLQTFWAKKGCVILQPYDLEKGAGTFHPGTFLRCLGKTPWSAAYVEPCRRPTDGRYGENPNRLQHYYQFQVVIKPSIENIQELYLESLNHLGIDTKKHDIRFVEDDWESPTLGAWGLGWEVWLDGMEITQFTYFQQAGGFDLNPVTVEITYGTERIAMYLQEVDSVYDLQWSDEIKYHDIHHRTEYEFSKYNFEVANIDMLKDFFIKSKEECMSLIKNNLPLPAYDYCLKCSHIFNLLDARGSISVTERARYILEIRELAKESASLYLKIYETR

SEQ ID NO: 186406 - protein, 453 aa, Unknown
  Bacterial polypetide isolated from the Sargasso Sea
MTAESMDKLVALCKRRGFIFQTNEIYGGLQGVYDYGPLGVELKNNLKRSWWNAMVYERDDIEGIDSSILTNPLVLKQSGHEETFSDPLVDCRNCNARIRADHIQDGKCPECGSSDLTDPRPFNLMFKTNVGPVEDGTSFAYLRPETAQQIFTNFKNVLDSTPHHLPFGIAQIGKAFRNEITPRNFIFRVRELEQMEMEFFVVPGEDEKWHKTWTDLRVAWWEKQGINRKSLELLDVPKAELAHYSKATIDIMYKYPHGLEELEGIANRTDFDLGSHSRDQSKLGITAKVEKNTKSNAKLAVQDPETKEWVVPYVIEPAAGVERGVLAILNEAYKVEELENGKERTVLSLKPHLSPIKAAIIPLKRNNKDLVNIAKEIKNTLQGLGLGRVLLENSGNIGKSYRRHDEIGTPICITVDFESLENETITIRDRDTMEQSRLDIVAVSEYFKNTINN

SEQ ID NO: 186407 - protein, 296 aa, Unknown
  Bacterial polypetide isolated from the Sargasso Sea
MSSREKTKIDFQSIILNLQSYWANQGCVILQPYDKEVGAGTFHPATTLRSLGPEQKWNVAYVQPSRRPTDGRYGLNPNRVQHYYQFQTILKPSPENSQDLFLGSLEAIGLNINEHDIRFVEDDWESPTLGAWGLGWEVWCDGMEISQFTYFQQVGGIECSPIPLELTYGLERLAMFIQNIENIFDIEWVSINNNTVYYKDIFLRNEKEFSEYNFDRADINSLYTQFEIAQNECKNLLNNDTPLPLPAYDECLKSSHIFNLLDARGAISVSERQGFILKIRDLARGCCEAYIKSFKD

SEQ ID NO: 186408 - protein, 186 aa, Unknown
  Bacterial polypetide isolated from the Sargasso Sea
MVSKNKKKSKKITSIISFQDTILNLQKYWSKKGCVILQPYDLEVGAGTFHPATTLRSLGPKPWKTAYVQPSRRPTDGRYGNNPNRLQHYYQFQVLIKPSPKEIKKLYLNSLAAIGIDHKDHDVRFVEDDWESPTLGAAGLGWEVWCDGMEVTQFTYFQQMAGLECNPISVEITYGLERLCMFIQNK

SEQ ID NO: 186409 - protein, 364 aa, Unknown
  Bacterial polypetide isolated from the Sargasso Sea
WQSMVYENDDIEGLDASILTKSMILDYSGHTETFSDPMVDCKSCGQRFREDQVPESCAKKDLTEARQFNLMFKTNVGPVDDESSYAYLRPETAQHIFTNFKNVVDSTSRNLPFGIAQIGKAFRNEITPRNFIFRVREFEQMELEYFVAPGDDDAAHSSWVQKRLKWWEKQGVPIETIELYEVPTDELAHYSKKTVDLMYKFPHGLEELEGIANRTDFDLGSHSKKQGELNINAKVKLNKDSNSKLTIKNNDDGMVVPFVIEPSAGVERGMLAVLNEAFTIESLPDNKSRLVLKLKPHLAPIKAAIIPLKKNDKNLVGQAKKIRSTLQELGLGRIILENTGNIGKSYRKQDEIGTPLCITVDLKH

SEQ ID NO: 186410 - protein, 239 aa, Unknown
  Bacterial polypetide isolated from the Sargasso Sea
LGPKPWRSAYVQPSRRPTDGRYGENPNRLQHYYQFQVIIKPSPKNIKKLYLSSLNAIGIKHNDHDIRFVEDDWESPTLGAAGLGWEVWCDGMEITQFTYFQKMAGMDCKPISVELTYGLERLCMFTQKKKNVFDLVWNDEGIIYKDVFLQAEKEFSSYNFDFANVENLFKFFDMLEQETKSLLEKKLSLPAYDQCLKASHVFNILDARGAISVAQRAEFIARIRDLTKGVGQVWVDSQK

SEQ ID NO: 186411 - protein, 289 aa, Unknown
  Bacterial polypetide isolated from the Sargasso Sea
PKKKKLKFLSFQEIIMNLQKFWGKYGCVILQPYDLEVGAGTFHPATTLRSLGIKPWKAAYVQPSRRPTDGRYGENPNRLQHYYQYQVIIKPSPDNIKQVYLRSLSAIGIDVKDHDIRFVEDDWESPTLGASGLGWEVWCDGMEITQFTYFQQMTGIECKPVPVELTYGLERLCMFVQGKNNVFDLDWNNEGVKYKEVFLQAEKEFSAYNFEFANTDTLLKNFEASETECKSLLEKKLSLPAYDQCLKASHLFNLLDARGVIGVAERTGYINRIRELAKGCGALWLSTQM

SEQ ID NO: 186412 - protein, 186 aa, Unknown
  Bacterial polypetide isolated from the Sargasso Sea
MSSIGINHEEHDIRFVEDDWESPTLGAAGLGWEVWCDGMEVTQFTYFQQMAGVECKPVSVEITYGLERLCMFIQNKKSVFDLIWNDEGITYKDVFHQSEKEFSAYNFEYANTDNLFKIFEMLEEETKLLVEKKISLPAYDQCLKCSHVFNILDARGVISVAQRAEYIARIRELTKSIGKVWIESQS

SEQ ID NO: 186413 - protein, 339 aa, Unknown
  Bacterial polypetide isolated from the Sargasso Sea
MPAQSMEQLVSLCKRRGFIFQTNEIYGGLQGVYDYGPLGVELKENLKRSWWAAMVYSRDDVEGLDASILTNRKVLQYSGHEETFTDPLVDCKSCGERFRADQVPEYCKQEDLTEPRQFNLMFKTNIGPVADDESYAYLRPETAQQIFTNFKNVIDSTSKSIPFGIAQIGKAFRNEITPRNFIFRVREFEQMELEFFVKKGEDEDWHKYWIEERLNWWVQQGVEKDKIEVLNVPQEELSHYSKATIDLMYKFPHGVEELEGIANRTDFDLGSHSKNQEDLDITADVLNNKDSNARLAVQNIESKEWEVPYVIEPSAGVDRGVLAILNESYKEEPLEKWKK

SEQ ID NO: 186414 - protein, 293 aa, Unknown
  Bacterial polypetide isolated from the Sargasso Sea
MNFQNIIVLLKDFWIKQGFIVQEPYDYPVGAGTFHPATFLRALGPEPWATAYVQPCRRPTDGRYGDNPNRLQHYYQFQVVQKPSKPTIQKDFLESLRQIGIDHKKNDVRFIDDNWESPSLGAAGVGWEVWLNGMEIAQFTYFQQVGGLDCNPVTGELTYGLERIAMHLQDVESIFDIKWNDEINYGDLFLQNEKEFSHFNFENINEKSLNELFITNEKDIMNLIDKKLPLPAYDLLLQNSHILNLLDSSQSISVTERQSYILKLRTMSNKIAESYIEIRKDLGFPLDKKQYEK

SEQ ID NO: 186415 - protein, 301 aa, Unknown
  Bacterial polypetide isolated from the Sargasso Sea
MQKYDIKTFQGLILALQDYWARQGCVIIQPLDMEVGAGTFHPMTFLRSLGPEPMSSAYVQPCRRPTDGRYGENPNRLQHYYQFQVMLKPSPDNIQELYLGSLKELGFDPLVHDIRFVEDNWESPTLGAWGLGWEVWLNGMEVTQFTYFQQVGGLECKPVTGEITYGLERLAMYVQGVDSIYDLVWTDGPMGKVTYGDVFHQNEVEQSTYNFEHANVEALFRTFDECEAESKKLIENNLPLPAYEQVMKASHAFNLLDARHAISVTERQRYILRVRTLAKACAESYYQAREALGFPLCNKEA

SEQ ID NO: 186416 - protein, 448 aa, Unknown
  Bacterial polypetide isolated from the Sargasso Sea
MAAKNMDELVALCKRRGFIYQSAEIYGGLQGVYDYGPLGVELKNNLKSSWWKSMIYENDNIEGIDAAILTNPLILKYSGHEDTFSDPMVDCKSCNLRFRADQVPDSCKKEDLTEPRQFNLMFKTNVGPIEDGSTFAYLRPETAQQIFTNFKNVLDSTSNSLPFGIAQIGKAFRNEITPRNFIFRVREFEQMELEYFVSPGKDEEAHNLWVQNRIEWWNNQGVPTESIEIYDVPKDELAHYSKKTVDIMYKFPHGVEELEGIANRTDFDLGSHSKKQNELNIKSKVTVNKDSNSKLAVQDDNGDWVVPFVIEPSAGVERGFLAILNEAYTNEELEDGKTRIVLKLKPHLSPIKAAVIPLKKNNEELVSTAKKIKEDLQNIGLGRIFLENTGNIGKGYRRHDEIGTPVCITVDFESLEDNSVTIRDRDTMNQSRLNINELSEYLKGKIQS

SEQ ID NO: 186417 - protein, 301 aa, Unknown; identical to SEQ ID NO: 186367
  Bacterial polypetide isolated from the Sargasso Sea

SEQ ID NO: 186418 - protein, 688 aa, Unknown
  Bacterial polypetide isolated from the Sargasso Sea
MNFENLLIELGTEELPPKALRKLAESFLANFTEELTKADLAFKSAVWYAAPRRLAINVTELALAQADKVVEKRGPAVSSAFDGEGKPTKAAEGWARGNGITVDQAERLVTDKGEWLVYNAKVEGVETKSLIAAMAQRALDKLPIPKPMRWGSSKTQFIRPVHTATMLLGSELIEGELLGIKSARNVRGHRFMGTGFELDHADNYLTLLKEKGKVIADYESRKAIIKADAEKAAAKIGGTADIEDDLLEEVTSLVEWPVVLTASFEEKFLNVPSEALVYTMKGDQKYFPVFDDAGKLLPNFIFVANIESKDPAQIIAGNEKVVRPRLADAEFFFNTDKKHTLESRLPSLETVLFQQQLGTLKDKVTRISALAAFIAEQTGANAVDAARAGLLSKTDLMTNMVMEFTDTQGTMGMHYARLDGETEAVALAMEEQYKPKFSGDTVPTAAVSCAVALADKLDTLVGIFGIGQAPKGAADPFALRRAAIGVLRIIVENKLPLDLVTLIAKAQELHGTNLSNANASDEVLEFLMARFRAWYQDKGIEVDVILAVLARRPTRPADFDSRINAVSHFRSLDASSALAAANKRVSNILAKVEGELPTAINSALLAEAAEQALAAKLAELQPQLAPLFANADYQQALTLLASLRESVDQFFEDVMVMADDEALKNNRLALLNNLREQFLHVADISLLQ

SEQ ID NO: 186419 - protein, 153 aa, Unknown
  Bacterial polypetide isolated from the Sargasso Sea
MFFQDIIQNLNNFWSEEGCLIMQPYDTEKGAGTMSPHTFLRAIGPEPWSVAYAEPCRRPTDGRFGDNPNRAQHYFQYQVIIKPSPDGIQEKYLKSLESLGIEAKNHDIRFVEDNWESPTLGAWGVGWEVWLDGMEVTQFTYFQQCGGVDCQPN

SEQ ID NO: 186420 - protein, 264 aa, Unknown
  Bacterial polypetide isolated from the Sargasso Sea
MSIEKIVSLCKRRGFVFQSSEIYGGYGAVYDYGPLGIELKNKISQLWWKSMTQLHDNIVGLDSGILMHPKIWKASGHVDAFNDPLVDCKQCKARFRSDELVSEETSATDWSSLQCPKCGTKGSLTEPRQFNLMFKTHIGPIENESNTTYLRPETAQGIYVNYLLTQNAMRLKIPFGIAQIGKAFRNEIVARNFIFRTREFEQMEMQYFIKPENDDKSMEYWKNERYNFYSLIGIDSNKIRLTEHGPNELAHYAKEAWDIEYKFP

SEQ ID NO: 186421 - protein, 102 aa, Unknown
  Bacterial polypetide isolated from the Sargasso Sea
MNVAKPKSFQEIVLRLQNYWSDNGCAILQPYDMEVGAGTFHPATTLRSLGENHWAAAYVQPSRRPSDGRYGENPNRLQHYYQFQVIMKPSPEDFQELYLGSL

SEQ ID NO: 186422 - protein, 685 aa, Unknown
  Bacterial polypetide isolated from the Sargasso Sea
MSVQDFFVEIGTEELPPKALKTLATAFADNITEELAKQNLSHADVSWYAAPRRLAVRVNQLALQQQDKVVEKRGPALAAAFDADGQPTKAAAAWAASNGITADQAERLETDKGAWLIHKALIKGESTVALLPAVISTALAKLPIAKPMRWGNSTAEFIRPVHTVTLLLGDDVVPATILGKESGRVSYGHRFHAPALVEIKNADAYLSTLEQSYVIADFAKRKAIIAENVAAQAKALNGVALMDDALLEEVASLVEWPVVLVGSFEERFLQVPAEPLISTMKDNQKYFPLVDNNGKLLNKFIFVANIESKDPSQIISGNEKVVRPRLSDAQFFFVTDAKTKLVDRLPALSTVLFQQKLGTLLEKSERIAKVAAFIAGKIGADVQHTERAGLLSKTDLMTNMVGEFPEVQGVMGMHYARLDGEAEAVAVALNEQYKPRFAGDSLPSQLEACAVAIADKMDSLVGIFGIGQAPKGDKDPFALRRAAIGALRIMVEKQLPLDLLELIEFSKTTFGDKLTQASVSEEVLDFMLGRFRAWYEGEGFGVDVIQAVLARRPTNPADFDRRVKAVAEFRKLDAALALAAANKRVANILAKVTEAIPESINSALLSEEAEQALHKAIVAEQAYQATVSSYAEGLSHLAAMREVVDQFFDKVMVNADDAAVRLNRQALLQQLRELFLRVADISVLQ

SEQ ID NO: 186423 - protein, 327 aa, Unknown
  Bacterial polypetide isolated from the Sargasso Sea
AAQIGILFSHFYQQVRLMQKYDMKTFQGLILALQDYWARQGCVIVQPLDMEVGAGTFHPMTFLRSLGPEPTNVAYVQPCRRPTDGRYGENPNRLQHYYQFQVILKPSPANIQELYLGSLRELGIDTLVHDIRFVEDNWESPTLGAWGLGWEVWLNGMEVTQFTYFQQVGGLECRPVTGEITYGLERLAMYIQGVDSIYDLVWADGPLGRVTYGDVFHQNEVEQSTYNFEYADVPALFTYFDQCEAESQKLIEAGLALPAYEKVMKASHAFNLLDARHAISVTERQRYILRVRTLAKACAEAYFAAREKLGFPLCSDSKSRNQSTQEA

SEQ ID NO: 186424 - protein, 445 aa, Unknown
  Bacterial polypetide isolated from the Sargasso Sea
MSESSLDKIISLCKRRGFIFQSSEIYGGFGAVYDYGPLGVELKNNISHSWWKFMTHNHENIVGLDSGIFMHPKIWEASGHVDAFNDPLVDCKQCKARYRADELIKEDFMNANWAEIQCPKCGTTGNLTNPRQFNLMFKTNIGPIESESETAYLRPETAQGIYVNYLLVQGTMRQKVPFGIAQIGKAFRNEIVARNFIFRTREFEQMEMQYFVKPGDDDNAMIDWKEKRYNFYIDELGISEDKIRFQQHGKDELAHYAKEAWDIEYEFPFGWSEVEGVHNRTDFDLKRHQEFSGKNMQYSDQLLNEKYFPYIIETSAGLNRMLLTVLCDAYWDDSENNRIVMKIHPKLAPIKAVVCPLVKKDGLPEIGHKIVSDLMKNFNVLYDQQGSIGKRYYRQDEAGTPFCITVDHESKENNTVTLRNRDDQNQDRVKISDLVSIIQNRMDIV

SEQ ID NO: 186425 - protein, 293 aa, Unknown
  Bacterial polypetide isolated from the Sargasso Sea
MVSKKKIKKLKHQSFQDTILNLQKYWSRHGCVILQPYDLEVGAGTFHPATTLRSLGSKPWRTAYVQPSRRPTDGRYGENPNRLQHYYQFQVLIKPSPKNIKKLYLNSLSAIGIKHKEHDIRFVEDDWESPTLGAAGLGWEVWCDGMEVTQFTYFQQMTGIECNPISVELTYGLERLCMFTQGKKNVFDLEWNNDGVLYRDVFHQSEKEFSKYNFELANTDNLFTIFDMTEKESKSLIENKLSLPAYDQCLKASHIFNILDARGVISVAQRAKYIARIRDLAKDVGQIWLESQK

SEQ ID NO: 186426 - protein, 411 aa, Unknown
  Bacterial polypetide isolated from the Sargasso Sea
MDSSIEKIVSLCKRRGFIFQSSEIYGGFSAIYDYGPLGIELKNQISQLWWREMTHAHENIVGLDSGILMHPRIWEASGHVNAFNDPLIDCKHCKARFRADDFEKDSKSTIWKDIQCPRCGTVGSLTEPRQFNLMFKTNIGPVAEKGTEAYLRPETAQGIYVNYLLVQGAMRLKVPFGIAQIGKAFRNEIIARNFIFRTREFEQLEMQYFVKPGSDDKTFQEWKEERMAFYIDFLDIDKSSLRFYKHGEEDLAHYAKEACDIEYKFPFGWSEIEGVHNRTNFDLSQHEKFSGKKMSYFDQQKNERYLPYIIETSAGLNRMLLTVLTNAYWDDKENNRIVLKLSPKIAPIKAAICPLTKKDGLPEKARKIMDILKPKFKVIFDQQGSIGKRYYRQDEAGTPFGITIDHQTYRR

SEQ ID NO: 186427 - protein, 202 aa, Unknown
  Bacterial polypetide isolated from the Sargasso Sea
MIKPSPENIKRLYLNSLTTIGIHQNDHDIRFVEDDWESPTLGAAGLGWEVWCDGMEITQFTYFQQMAGYECKPVSVEITYGLERICMFTQQQKNVYDLLWNDEDIKYREVFHQAEKEFSAYNFEHANVEQLFKMFDMHESEAKSLVEKKVSLPAYDQCLKASHVFNILDARGAISVAQRAGYIGRIRDITKSAAGIWIDSQN

SEQ ID NO: 186428 - protein, 210 aa, Unknown
  Bacterial polypetide isolated from the Sargasso Sea
KKTKKPRLQSFQDTILNLQKYWSKQGCVIVQPYDMEVGAGTFHPATTLRSLGPKPWKVAYVQPSRRPTDGRYGDNPNRLQHYYQFQVLIKPSPDNIKKLFLNSLSSLGIKHEEHDIRFVEDDWESPTLGAAGLGWEVWCDGMEITQFTYFQQMAGVECNPVSVEITYGLERLCMFIQNKKNVFELNWNNQEVLYKDVFLSIRKRIFSLQF

SEQ ID NO: 186429 - protein, 290 aa, Unknown
  Bacterial polypetide isolated from the Sargasso Sea
MASKKNLKIQTFQDTILNLQKFWAKNGCVILQPYDIEVGAGTFHPATTLRSLGPKPWRSAYVQPSRRPTDGRYGENPNRLQHYYQFQVIIKPSPKNIKRLYLSSLNAIGIKHNDHDIRFVEDDWESPTLGAAGLGWEVWCDGMEITQFTYFQKMAGMDCKPISVELTYGLERLCMFTQKKKNVFDLIWNDEGILYKDVFLQAEKEFSSYNFDFANVENLFKFFDMLEQETKSLLEKKLSLPAYDQCLKASHVFNILDARGAISVAQRAEFIARIRDLTKGVGQVWVDSQK

SEQ ID NO: 186430 - protein, 446 aa, Unknown
  Bacterial polypetide isolated from the Sargasso Sea
MEELVSLCKRRGFIYQTNELYGGMQGVYDYGPLGVELKNNLKQAWWSSMVYERDDVEGLDSSILTHPNVLKYSGHEDTFTDPLVDCKDCKSRWRADHIDDGKCPSCGSENLTDPRPFNLMFKTTIGPVDDGSSFAYLRPETAQQIFTNFKNVVDSTSRTLPFGIAQIGKAFRNEITPRNFIFRVREFEQMELEFFVEPGSDEEWHQKWVDERVKWWERQGVDKNNLEIIDVDQEELSHYSKKTVDIMYKFPHGLEELEGIANRTDFDIGSHTKNQKDFEIKSDVMKNDDSVTKLAIQNKINNSWTIPYVIEPSAGVDRGFLAVLNESYKIEKLENGKERTVLSLKSHLSPIKAAVIPLKRNNQDLVDRAIELKSQLQSIGLGRVVLDNAGNIGKSYRRHDEVGTPMCITIDFETLDDNSVTVRDRDTMEQKRIKLDEISNFFVKNL

SEQ ID NO: 186431 - protein, 307 aa, Unknown
  Bacterial polypetide isolated from the Sargasso Sea
MVANAPQSFQDIILRLQNYWVAQGCALMQPYDMEVGAGTFHPATTLRSLGPKSWSVAYVQPSRRPTDGRYGENPNRLQHYYQFQVLMKPSPPDFQDLYLGSLDAIGIDSQLHDIRFVEDDWESPTLGAWGLGWEVWCDGMEVSQFTYFQQVGGHDCNPTSGELTYGLERLAMYILGVDHVMDMPFNNPKANIPLKYGDIFKQTEEEYSRWNFDVANTETLFRHFDEAEQSCIEILSQDELDSKSGKNITMVHPAYDQCIKASHIFNILDARGVISVTERQAYIGRVRGLAKQCADAFVLTAAGGNVN

SEQ ID NO: 186432 - protein, 369 aa, Unknown
  Bacterial polypetide isolated from the Sargasso Sea
DPLVDCKDCKARHRADHISDATCPNCGSTNLTAPRAFNLMFKTNVGPIDDGSSYAFLRPETAQSIFTNFKNVVDSTSRKLPFGIAQIGKSFRNEITPRNFIFRVREFEQMELEYFVKPGVDEEAHESWVQSRVNWWIEQGINSNNLELYKVPQEELAHYSKATVDLMYRFPHGLEELEGIANRTDFDLGSHTKNQEDYKIQAIVETNTESNAKLAIENTEEKTWQIPYVIEPSAGVDRGVLAIMNEAFNVEQLDNDKSRTVMAFKPHLAPIKAAILPLKKNNLEIVNKAKNLKANLQKLGLGKISYEDTGNIGKGYRRHDEIGTPFCFTVDFQTIEEDSSVTARNRDTMEQERVNIENLPTFLASQLKP

SEQ ID NO: 186433 - protein, 298 aa, Unknown
  Bacterial polypetide isolated from the Sargasso Sea
MVSKNKNKNKKKQKPKFLTFQETILNLQKFWSKQGCIILQPYDMEVGAGTFHPATTLRSLGIQPWKTAYVQPSRRPTDGRYGENPNRLQHYYQFQVLIKPSPENIKRLYLNSLTTIGIHHNDHDIRFVEDDWESPTLGAAGLGWEVWCDGMEITQFTYFQQMAGYECKPVSVEITYGLERICMFIQQKKNVYDLLWNDENVKYREVFHQAEKEFSAYNFEHANVEQLFKMFDMHELEAKSLVEKKVSLPAYDQCLKASHVFNVLDARGAISVAERAGYIGRIRDITKSAAGIWIDSQN

SEQ ID NO: 186434 - protein, 367 aa, Unknown
  Bacterial polypetide isolated from the Sargasso Sea
VDCKVCKARFRADQLENSECPRGGSLTNCKFKDLTEARPFNLMFKTAIGPVDDGSSFAYLRPETAQQIFVNFKNVVDSTSRVPPFGIAQIGKAFRNEITPRNFIFRVREFEQMELEYFVKPGSDEDWHKYWLDKRLNWWAEQGVKSEKLKLLEVEKKDLSHYSKATFDIMYDFPHGLEELEGIANRTDFDLGSHSKNQKDFNIKANIQENKNSTTKLAIQDLENKEWFIPFVIEPSAGVERGVLAVLNEAYTIEEANKRTLLKLQPHLSPIKAAVIPLKRNNSDLVNTANNVKSELQSLGLGRVIVENTGNIGKNYRRHDEIGTPLCITIDFETLENQTVTIRDRDTMKQEKVSLSEVANYYSKYFR

SEQ ID NO: 186435 - protein, 504 aa, Unknown
  Bacterial polypetide isolated from the Sargasso Sea
EIISHSKEYGFIFPSSEIYEGLNAIYDYGHNGVLLKNNIREYWWRSMVQLNENIVGIDSAIFMHPKTWVASGHVDAFNDPLIDNKDSKKRYRADVLIEEFIEKLNSKIQKEVQKAEKRFKEKFDKVQFLNTSPKILEITNQINELKSRMISAFEKDDLVEVKKIIDDMEIKCPISGTCNWTEVRQFNLMFSTKLGASEESSMDLYLRPETAQGIFLNYLNVQKTSRMKIPFGIAQTGKAFRNEIVARQFIFRMREFEQMEMQFFIKPGTQENWFNHWKDKRLNWHLNLGIDPSLFRYHDHDKLAHYADAACDIEFNFPFGFKELEGIHSRTDFDLKSHEELSGKKIQYFDPELDKNYTPYVLETSIGLDRMFLAIISNSFKLETLEDGSTRNVMSIPKQIAPNKLAVLPLLKKDGLPEYARKVMNEFSHKINLVYDEKDAIGRRYRRQDAIGTPYCITIDHQTIEDDSFTIRDRDSMEQKRINIEDLKSIVDSELTLKSLLKKL

SEQ ID NO: 186436 - protein, 688 aa, Unknown
  Bacterial polypetide isolated from the Sargasso Sea
MNFENLLIELGTEELPPKALRKLAESFLANFTEELIKADLAFKSAVWYAAPRRLAINVTELAIAQADKIVEKRGPAVSSAFDAEGKPTKAAEGWARGNGITVDQAERLVTDKGEWLVYNAKVEGVETKSLIAAMAQRALDKLPIPKPMRWGSSKTQFIRPVHTATMLLGSELIEGELLGIKSARNVRGHRFMGTGFELDHADNYLTLLKEKGKVIANYESRKALIKADAEKAAAKIGGTADIEDDLLEEVTSLVEWPVVSTASFEEKFLNVPSEALVYTMKGDQKYFPVFDDAGKLLPNFIFVANIESKDPAQIIAGNEKVVRPRLADAEFFFNTDKKHTLESRLPSLETVLFQQQLGTLKDKVTRISALAAFIAEQTGANAVDAARAGLLSKTDLMTNMVMEFTDTQGTMGMHYARLDGETEAVALAMEEQYKPKFSGDTVPTAAVSCAVALADKLDTLVGIFGIGQAPKGAADPFALRRAAIGVLRIIVENKLPLDLVTLIAKAQELHGTNLSNANASDEVLEFLMARFRAWYQDKGIDVDVILAVLARRPTRPADFDSRINAVSHFRSLEASSALAAANKRVSNILAKVEGKLPTAINSALLAEAAEQALAAKLAELQPLLAPLFANADYQQALTLLASLRESVDQFFEDVMVMADDEALKNNRLALLNNLREQFLHVADISLLQ

SEQ ID NO: 186437 - protein, 290 aa, Unknown
  Bacterial polypetide isolated from the Sargasso Sea
MPTKKKFKSLSFQEIIMNLQKFWGRYGCVILQPYDLEVGAGTFHPATTLRSLGPKPWKAAYVQPSRRPTDGRYGENPNRLQHYYQYQVIIKPSPENIKQTYLKSLSAIGIDVKNHDIRFVEDDWESPTLGAAGLGWEVWCDGMEITQFTYFQQMTGLECKPVPVEMTYGLERLCMFVQGKKNVFDLDWNNEGVKYKDVFFQAEKEFSAYNFEFANTENLLKNFESTEIECKSLLDKKLSLPAYDQCLKASHIFNLLDARGVIGVAERTGYINRIRELAKGCGALWLSTQI

SEQ ID NO: 186438 - protein, 329 aa, Unknown
  Bacterial polypetide isolated from the Sargasso Sea
MPAQSMEQLVSLCKRRGFIFQTNEIYGGLQGVYDYGPLGVELKENLKRSWWAAMVYSRDDVEGLDASILTNRKVLKYSGHEDTFTDPLVDCKDCNNRMRADHLKDSKCLHCGSTNLTKPRPFNLMFKTNIGPVADDESYAYLRPETAQQIFTNFKNVVDATSKSIPFGIAQIGKAFRNEITPRNFIFRVREFEQMELEFFVKKGEDEDWHKYWIEERINWWVQQGVNKEKIEILNVPQEELSHYSKATIDLMYEFPHGVEELEGIANRTDFDLGSHSKNQQDLDIEADVLKNKDSNARLAIQNIDSKEWEVPYVIEPSAGVDRGVLAIL

SEQ ID NO: 186439 - protein, 285 aa, Unknown
  Bacterial polypetide isolated from the Sargasso Sea
MILRLQAYWADQGCVVLQPYDMEVGAGTFHTATFLAAVGPEPLRAAYVQPSRRPTDGRYGENPNRLQHYFQFQVLLKPSPDDFQDLYLGSLESLGISFQKDDVRFVEDNWESPTLGAWGLGWEIWLNGMEISQFTYFQQVGGLDCRPVTGEITYGLERIALYLQGVDSVFDLKWNAHFSYGDLYHQNEVEQSAYNFEHADVDVLLRQFENCESACEHLLGQRLPLPAYEQVLKASHTFNLLDARHAISVTERARYIGRVRNLARGVAQSYFEAREALGFPRGRSS

SEQ ID NO: 186440 - protein, 445 aa, Unknown
  Bacterial polypetide isolated from the Sargasso Sea
MPAKNIDELIALCKRRGFIFQSNEIYGGTQGLYDYGPLGVELKNNLKNAWWKSIVYERDDIEGLDAAILTKSTVLKHSGHEDTFSDPMVDCKSCGERFRADQVPDYCKKEDLTEPRQFNLMFKTNIGPVDDGKSFAYLRPETAQNIFTNFKNVVDSTARTVPFGIAQMGKAFRNEITLKSFIFRVREFEQMELEFFVHPGDDEKWHKSWVESRVQWWKDQGISDKSLELYDVPADELAHYSKATVDIMYKFPHGVEELEGIANRTDFDLGSHSKSQKELNIKAKVLENNESNSKLALQDENNNWFVPFVIEPSAGVDRGVLAILNEAYFVEEIEGKERVVLKLKPHLAPIKAAVMPLKKNDEKIVALAKKVKDELQKLGLGRILFENSGNIGKNYRRHDEVGTPVCITVDFESLDNQTVTVRDRDSMKQERISLDKVSEHLKKII

SEQ ID NO: 186441 - protein, 477 aa, Unknown
  Bacterial polypetide isolated from the Sargasso Sea
MILFKGLYFHKKERYNFFITFRGAFLAAKNMDELVSLCKRRGFVFQSGEVYGGLQGVYDYGPLGVELKNNLKNSWWSAMVFERDDIEGLDASILSKKELFKYSGHEDTFSDPLVDCKSCKSRWREDLIEDGKCPGCGSSELTEARPFNLMFKTPVGPVQNEESFAYLRPETAQHIFASFKNVKDSTSRQVPFGIAQIGKAFRNEINPRNFIFRLREFEQMELEYFVKPGEDETALEYWKKERLGWWERQGIDLSNIEIYDVPENELAHYSKRTLDIMYRFPHGLEELEGIANRTDFDLGSHTKNQKDLSLSSSVVENDESTMRLAVQDLEAKEWYVPYVIEPSAGVDRGVLAILNEAYTNEDIGEGKQRVVLKLKPHLSPIKAAVIPLKKNKDELVSMAKEIKQSLQSLGLGRVFLENTGNIGKAYRRHDEVGTPICITVDFDSLENNSVTIRDRDTMEQSRVDISELKQSYLSILK

SEQ ID NO: 186442 - protein, 400 aa, Unknown
  Bacterial polypetide isolated from the Sargasso Sea
RLVGSMVYENDDIEGLDSSILTNPLVLGYSGHEDTFSDPMVDCKSCGLRFRADQVPKECKTEDLTEPRQFNLMFKTNVGPIDDGSSFAYLRPETAQQIFTNFKNVIDSTSKPIPFGIAQIGKAFRNEITPRNFIFRVREFEQMELEYFVMPGEDEKCHDIWVQKRLEWWKNQGVPIESIELYDVPSEELAHYSKKTIDLMYKFPHGLEELEGIANRTDFDLGSHSKKQNELSIGSSVKENKHSNSKMAVQDNSGKWVVPFVIEPSAGVERGFLAILNEAYFVEELENDKTRVVLRLKPHLSPIKAAVIPLKKNNTELVEAAKKIKNELQKIGLGRVIFENTGNIGKSYRKHDEIGTPVCITVDFQTLEDESVTIRDRDSMDQKRLDINDLNNYLINLINH

SEQ ID NO: 186443 - protein, 427 aa, Unknown
  Bacterial polypetide isolated from the Sargasso Sea
MPEEIFDKVVKIAQSRGFVFNASSIYGGLRSSYDYGPLGVLLKNNIEKMWWKSISNLEVEIYPIDTAIIQSSDVWKASGHVGEFTDPMVDHKPTGERFRADQVPDHIKKEDLTEPRQFNLMFQTNIGPVENENSTVYLRPETAQGIFVNFENVLRTMRAKIPFGIGNIGKSFRNEITPGQFIFRTREFEQMEIEFFCDESEEDKWFDYWIENRLNWYKNLGIPENKLRIREHDESELAHYAKKTSDIEFEYPWGWGELEGIANRGNYDLNAHQESSGKDLRYFDPNSDNKFTPSVIEPAGGLTRTLFAVLLSLYEEEELEKEVRTLFKFKFDLAPIQIGILPLSKKDELIEVCNSIKSELSPYFRTEIDVTQSIGKRYRRQDEIGTPYCITVDFDTLEDKAVTVRDRDSMSQERIKIEDIKSYFDKM

SEQ ID NO: 186444 - protein, 292 aa, Unknown
  Bacterial polypetide isolated from the Sargasso Sea
SKKKTKNPKSFISFQDTILNLQKYWSKKGCVILQPYDLEVGAGTFHPATTLRSLGSKPWKTAYVQPSRRPTDGRYGENPNRLQHYYQFQVLIKPSPKDIKKMYLNSLSSVGIKYEEHDIRFVEDDWESPTLGASGLGWEVWCDGMEVTQFTYFQQMAGMECNPISVEITYGLERLCMFIQGKKNVFDLIWNDEGVLYKDVFHQAEKEFSAYNFEYANTDKLFKIFDMLEEEAKSLIEKKISLPAYDQCLKSSHVFNILDARGVISVAQRAEYIARIRDLTREIGKIWGETQN

SEQ ID NO: 186445 - protein, 293 aa, Unknown
  Bacterial polypetide isolated from the Sargasso Sea
MVSKKKKKQPKFQTFQDTILNLQKYWSKQGCIILQPYDIEVGAGTFHPATTLRSLGPKPWKAAYVQPSRRPTDGRYGDNPNRLQHYYQFQVIIKPSPKNIKKLYLNSLNTIGINHKEHDIRFVEDDWESPTLGAAGLGWEVWCDGMEITQFTYFQQMAGFECKPVSVELTYGLERLCMFTQQKKNVYDLIWNNEDVKYRDVFHQAEKEFSTYNFELANTENLFKIFDMIEKEAKMLTENDVSLPAYDQCLKASHIFNILDARGVISVAQRAEYISRIREITKGAAEIWLKSQT

SEQ ID NO: 186446 - protein, 293 aa, Unknown
  Bacterial polypetide isolated from the Sargasso Sea
MPKKTKEKNKVLSFQNLIFNLQKFWDKQGCIILQPYDLEVGAGTFHPATTLRSLGPKPWKAAYVQPSRRPTDGRYGKNPNRLQHYYQYQVIIKPSPKDIKQLYLKSLVAIGIDPKDHDVRFVEDDWESPTLGAAGLGWEVWCDGMEITQFTYFQKMTGLECKPISVELTYGLERICMFVQKKKNVFDIDWNDNGVKYRDVYLQSEKEFSAYNFDHANTESLLKNFDIAEQECKNLLEQKLPLPAYDQCLKASHIFNLLDARGVIAVAERTGYINRIRELAKGAGSGWLENQDK

SEQ ID NO: 186447 - protein, 419 aa, Unknown
  Bacterial polypetide isolated from the Sargasso Sea
PVPAEALLHTMKVTQKYFPVYDKNGKLLPKFIFVTNIESKDPSQIISGNEKVVRPRLSDAEFFFKTDLKQTLASRLPRLETVLFQQQLGTVKAKVERIETVAGFIAERIGADVAQAKRAGLLSKCDLMTNMVGEFTDTQGVMGMHYARHDGEDEAVAVALNEQYMPRFAGDALPSGLVACAVALADKFDTLAGIFGIGMLPKGDKDPFALRRAAIGALRIMTEKQLDLDLVELVEEAVRVYGDKLTNKTVVTDVVDFMLGRFRAAYQDEGIGADVVLAVLARRPTRPLDFDRRVKAVSHFRTLDAALALAAANKRVSNILAKVEGELPTAVKPELLVDAAEKALATQVAELQAELAPLFAAGDYQAALTRLAALREPVDTFFNEVMVMADDEALKANRLALLNNLRNLFLQVADISLLQ

SEQ ID NO: 186448 - protein, 269 aa, Unknown
  Bacterial polypetide isolated from the Sargasso Sea
MTAENMEDLVSLCKRRGFIFQSNDIYGGMKGLYDFGPMGVELKLNLKSAWWKSIVYERDDVEGLDSTILTSPTVLKYSGHEDTFSDPLVDCKVCKARFRADQLEQSECPRGGSLNNCKSKDLTDPRPFNLMFKTAIGPVDDGSSFAYLRPETAQQIFVNFKNIVDSTSRVPPFGIAQIGKAFRNEITPRNFIFRVREFEQMELEYFVKPGSDENWHKYWVDKRLNWWADQGVKSEKLKLLEVEKKDERCGRQPVGRGRHPVKADGTRRP

SEQ ID NO: 186449 - protein, 294 aa, Unknown
  Bacterial polypetide isolated from the Sargasso Sea
MVSKKLKTKKPKFQTFQDTILNLQKYWSKHGCTILQPYDMEVGAGTFHPATTLRSLGPKPWKTAYVQPSRRPTDGRYGENPNRLQHYYQFQVLIKPSPKNIKKLYLNSLSSIGIKYQDHDIRFVEDDWESPTLGAAGLGWEVWCDGMEVTQFTYFQQMAGIDCDPISVELTYGLERLCMFTQQKKNVFDLVWNNEGILYKEVFHQAEKEFSKYNFEVANTENLFKIFDMLESESKSLTETKLSLPAYDQCLKASHVFNILDARGVISVAQRAEYIGRIRDLVKGVGQIWLESQK

SEQ ID NO: 186450 - protein, 293 aa, Unknown
  Bacterial polypetide isolated from the Sargasso Sea
MVSKAKKEKKKIQTFQDTILNLQKFWSKKGCIILQPYDMEVGAGTFHPATTLRSLGTKPWKAAYVQPSRRPTDGRYGDNPNRLQHYYQFQVLIKPSPENIKKLYLNSLSTIGIDHNDHDIRFVEDDWESPTLGAAGLGWEVWCDGMEITQFTYFQQMAGFDCKPVSVEITYGLERICMFTQKEKNVYDLLWNDEGVKYHEVFHQAEKEFSAYNFEHANVETLLKMFEMHESEAKDLVEKKISLPAYDQCLKASHVFNILDARGAISVAQRAGYIARIRDITKSAAGVWLDSQK

SEQ ID NO: 186451 - protein, 382 aa, Unknown
  Bacterial polypetide isolated from the Sargasso Sea
MKNTSMEDLVSLCKRRGFIFQSNEIYGGLQGLYDYGPLGVELKNNLKKSWWKSMIYERDDIEGIDSSILTNPLVLKYSGHENTFTDPLVDCKSCGERFREDQVPDYCKKEDLTEPRQFNLMFKTNVGPIEDGNSFAYLRPETAQNIFTNFKNVLDSNPHPLPFGIAQMGKAFRNEITPRNFIFRVREFEQMELEFFVKPGEDEEWHKKWTDLRLQWWEDQGVSKDSLELYHVPSDELAHYSKATVDIMYNFPHGLEELEGIANRTDFDLGSHTRGQKELNIDATVAENTQSNAKLAVQDLETKKWVVPYVIEPSAGVDRGLLAILNEAYKVESLENNKERTVLSLKPHLAPIKIAVIPLKRNENSIVQTSIDLKNDLQRTIE

SEQ ID NO: 186452 - protein, 225 aa, Unknown
  Bacterial polypetide isolated from the Sargasso Sea
EWMDYWINKRMDWYKSLGIKESQLQLREHADNELAHYAKKTVDIEYLYPWGWGELEGIANRGNYDLSSHQKNSGKDLTYFDSLNDEKYLPSVIEPAGGLTRTLFALLLSVYDEEKLENDEKRTLFRFTFELAPIQIGILPLSKKDDLIQVCSEINKTLKNHYRTEVDITQSIGKRYRRQDEIGTPYCITVDFESLEDNCVTIRDRDTMKQERISIDKLSEYFEKL

SEQ ID NO: 186453 - protein, 452 aa, Unknown
  Bacterial polypetide isolated from the Sargasso Sea
MASKNMEDLVSLCKRRGFIFQSSEIYGGLQGIYDYGPLGVELKNNLKSSWWKSMIYDRDDVEGLDASILTSRHVLKYSGHEDTFSDPLVDCRNCKNRFRSDQATDGKCPACGSSDLTEPRPFNLMFKTTVGPVDDGSNYAYLRPETAQQIFTNFKNILDSTSKTIPFGIAQIGKAFRNEVTPGKFIFRVREFEQMELEFFVEPGKDDEWHKYWVDKRYSWWIDQGISEKRLKKLDVEDADLSHYSKATVDLMYEFPHGLEELEGIANRTDFDLGSHTKNQNDFKISADVMKNNQSTTKLSIQNLESKEWYIPYVIEPSAGVDRGVFALLNEAYKEEDLENGNKRIVLSLKPHLSPIKAAIIPLKRNNEDLVNKASKIKNDLQALGMGRVILENSGNIGKGYRRHDEIGTPICITVDFETIENDTVTIRDRDTMSQKRVSSQDLKHEYKKVFN

SEQ ID NO: 186454 - protein, 264 aa, Unknown
  Bacterial polypetide isolated from the Sargasso Sea
MKHSMSLQNIIMALHDYWNRHGCLLMNPYDVETGAGTMNPMTTLRAVGPEEWNVAYVEPSRRPADGRYGENPNRLYQHLQYQVILKPSPDNVEELYLKSLEELGVDPLQHDIRFVEDNWEAPTLGAWGLGWEIWLDGMEITQFTYFQQVGGLECHPVSAELTYGLERLAMYLQQVENVFDLEYTKGVSYGAIFKQPEYEHSKYTFEIADTGKLFDWFNEFEIESRKALDADLVFPAYDYVLKCSHVFNQLDATNAISVSARASY

SEQ ID NO: 186455 - protein, 399 aa, Unknown
  Bacterial polypetide isolated from the Sargasso Sea
MPAQSMEQLVSLCKRRGFIFQTNEIYGGLQGVYDYGPLGVELKENLKKSWWAAMVYSRDDVEGLDASILTNKKVLKYSGHEDTFTDPLVDCRDCKNRMRADHIKDSKCLHCGSTNLTDPRPFNLMFKTNIGPVADDESYAYLRPETAQQIFTNFKNVVDSTSKSIPFGIAQIGKAFRNEITPRNFIFRVREFEQMELEFFVKKGEDEDWHKYWIEERINWWVQQGVKKEKIEVLNVPQEELSHYSKATIDLMYEFPHGVEELEGIANRTDFDLGSHSKNQEDIDITADVLKNKDSNARLAVQNINSKEWEVPYVIEPSAGVDRGVLAILNESYNEETLENGKNRIVLALKPHLSPIKAAIIPIKKNDSTIVDFSKQIKDNLQKLGLGRVVLENTGNIGK

SEQ ID NO: 186456 - protein, 125 aa, Unknown
  Bacterial polypetide isolated from the Sargasso Sea
RQVTYGDVFHQNEVEQSTYYFEHANVDKLFELFDFYESEAKRLIELDQPLPLPSYEMVLKASHTFNLLDARRAISVTARQQYILRVRTLARSVAQAYLLARAKLGFPMATPDLRDEVLAKLEAAQ

SEQ ID NO: 186457 - protein, 386 aa, Unknown
  Bacterial polypetide isolated from the Sargasso Sea
MTASSMEELVSLCKRRGFIFQSNDIYGGIKGLYDYGPMGVELKNNLKQAWWKSMVYERDDIEGLDASILSAPVVLQQSGHEDTFSDPLVDCKKCKARFRADQLESSKCPKGGSLINCKSKDLTEPRAFNLMFKTAIGPVDDGSSFAYLRPETCQQIFTNFKNITDSTSRVIPFGIAQIGKAFRNEITPRNFIFRVREFEQMELEFFVKPGSDDEWHKYWVDKRIEWWETQGISKKNLYPMEVEESELSHYSKATVDIMYEFPHGKEELEGIANRTDFDLGSHTKNQKDYNISSDVKKNEHSTTKLGVQNLEEKTSYIPYVIEPSAGVDRGLLAILNEAYTIETLDDDNTRTVLKLKPHLSPIKAAVIPLKKNNEQIVSKAKAIKNQ

SEQ ID NO: 186458 - protein, 186 aa, Unknown
  Bacterial polypetide isolated from the Sargasso Sea
LSSIGIKHQEHDIRFVEDDWESPTLGAAGLGWEVWCDGMEITQFTYFQQMAGLECNPISVELTYGLERLCMFTQEKKNVFDLVWNSDGVLYKDVFHQAEIEFSKYNFDLANTSNLFKIFDMTEEEAKNLTENKISLPAYDQCLKASHIFNILDARGVISVAQRAEYISRIREMVKAVGKVWLESQK

SEQ ID NO: 186459 - protein, 367 aa, Unknown
  Bacterial polypetide isolated from the Sargasso Sea
GHVGAFNDPLVDCKQCKARYRADELGDIENEKISWNEIQCPKCGTKGNLTEPRQFNLMFKTYVGAVEEDSSATFLRPETAQGIYVNYLLVQNAMRLKLPFGIAQIGKAFRNEIVARNFIFRTREFEQMEMQYFVKPGQDDETLGNWKKERMAFYAQLGIDKDKLRFKEHGPGELAHYAKEAWDIEYDFSFGWSEIEGIHNRTDFDLKRHQEFSGKKMEYFETETNERFLPYIIETSAGLNRMLLAVLNDAYWEDEENKRVVMKLDPKIAPVMAVVCPLVKKDGLPEIGRKIMEILKPEFKVIYDQQGSIGKRYYRQDEAGTPFGITVDHQSKDDQSVTLRHRDTQQQDRIAIDQLVDAINNKLENYS

SEQ ID NO: 186460 - protein, 293 aa, Unknown
  Bacterial polypetide isolated from the Sargasso Sea
MVSKAKKEKKKIQTFQDTILNLQKFWSKKGCIILQPYDMEVGAGTFHPATTLRSLGNKPWKAAYVQPSRRPTDGRYGDNPNRLQHYYQFQVLIKPSPENIKKLYLNSLSTIGIDHNDHDIRFVEDDWESPTLGAAGLGWEVWCDGMEITQFTYFQQMAGFDCKPVSVEITYGLERICMFTQKEKNVYNLLWNDEGVKYHEVFHQAEKEFSAYNFEHANVETLLKMFEMHESEAKDLVEKKISLPAYDQCLKASHVFNILDARGAISVAQRAGYISRIRDITKSAAGVWLDSQK

SEQ ID NO: 186461 - protein, 186 aa, Unknown
  Bacterial polypetide isolated from the Sargasso Sea
MSSIGIYHEEHDIRFVEDDWESPTLGAAGLGWEVWCDGMEVTQFTYFQQMAGVECKPVSVEITYGLERLCMFIQNKKSVFDLIWNDEGITYKDIFFQSEKEFSAYNFEYANTVNLFKIFEILEEETKLLVEKKISLPAYDQCLKCSHVFNILDARGVISVAQRAEYIARIRELTKSIGKVWIESQS

SEQ ID NO: 186462 - protein, 290 aa, Unknown
  Bacterial polypetide isolated from the Sargasso Sea
MVYKTKKKTLSFQDTIFNLQKYWSKKGCVILQPYDLEVGAGTFHPATTLRSLGPKPWKTAYVQPSRRPTDGRYGDNPNRLQHYYQFQVLIKPSPKEIKKMYLNSLSSIGINYEEHDIRFVEDDWESPTLGAAGLGWEVWCDGMEVTQFTYFQQMAGVECKPVSVEITYGLERLCMFIQNKKSVFDLIWNDEGITYKDVFHKSEKEFSAYNFEYANTDNLFKIFEMLEEETKLLVEKKISLPAYDQCLKCSHVFNILDARGVISVAQRAEYIARIRELTKSIGKVWIESQS

SEQ ID NO: 186463 - protein, 336 aa, Unknown
  Bacterial polypetide isolated from the Sargasso Sea
LTDPRPFNLMFKTTIGPVDDGSSFVYLRPETAQQIFTNFKNVVDSTSRTLPFGIAQIGKAFRNEITPRNFIFRVREFEQMELEFFVEPGSDEEWHQKWVDERVSWWERQGVDKSKLEIIDVDKEDLSHYSKKTVDIMYEFPHGLEELEGIANRTDFDIGSHTKNQKDFEINADVIKNDDSVTKLAIQDKINNTWTIPYVIEPSAGVDRGFLAVLNEAYKVEKLENGKERTVLSLKSHLSPIKAAVIPLKRNNQDLVNKAVELKKQLQSIGLGRVVLDNAGNIGKSYRRHDEVGTPMCITIDFETLDDNSVTVRDRDTMEQKRIKLDEISNFFVKNL

SEQ ID NO: 186464 - protein, 288 aa, Unknown
  Bacterial polypetide isolated from the Sargasso Sea
MFFQDIIQNLNNFWSKEGCLIMQPYDTEKGAGTMSPHTFLRAIGPEPWSVAYAEPCRRPTDGRFGDNPNRAQHYFQYQVIIKPSPDGIQEKYLKSLESLGIEAKNHDIRFVEDNWESPTLGAWGVGWEVWLDGMEVTQFTYFQQCGGVDCQPIPIEITYGLERIAMFLQDKESIWDLNWNKDLKYSDIWLQFEKGQCSYNFSESNPENLRKLFEIYQDEANSLIEKKLTYPALDYVLKCSHSFNLLDARGVISVTDRAQYIEKIRKLAREVASSWILERERMGFPLVK

SEQ ID NO: 186465 - protein, 143 aa, Unknown
  Bacterial polypetide isolated from the Sargasso Sea
MPAKKKVKKKNNSLSFQDIIMNLQKFWGRNGCVILQPYDLEVGAGTFHPATTLRSLGPKPWKAAYVQPSRRPTDGRYGENPNRLQHYYQYQVIIKPSPSNIKQTYLKSLAAIGIDVKNHDIRFVEDDWESPTLGAAGLGWEVW

SEQ ID NO: 186466 - protein, 201 aa, Unknown
  Bacterial polypetide isolated from the Sargasso Sea
MVSKKKRKQPKFQTFQDTILNLQKYWSKHGCIILQPYDMEVGAGTFHPATTLRSLGPKPWKAAYVQPSRRPTDGRYGDNPNRLQHYYQFQVIIKPSPKNIKKLYLSSLNTIGINHNEHDIRFVEDDWESPTLGAAGLGWEVWCDGMEITQFTYFQQMAGFECKPVSVEITYGLERLCMFTQQKKNVYDLIWNSEDVKYGDV

SEQ ID NO: 186467 - protein, 458 aa, Unknown
  Bacterial polypetide isolated from the Sargasso Sea
MTAKTMEELVSLCKRRGFLFQSNDIYGGIKGLYDYGPMGVELKNNLKQAWWKSMVYERDDTEGLDASILSAPVVLKHSGHEDTFSDPLVDCKICKARFRADQLENSECPRGGLLPDCKVKDLTEPRPFNLMFKTAIGPVDDGSSFAYLRPETCQQIFTNFKNILDSTSRTVPFGIAQMGKAFRNEITPRNFIFRVREFEQMELEFFVKPGTDDEWHEYWINKRIEWWVNQGIKKENLKKIEVEKNELAHYSKRTVDINYVFPHGEEELEGVANRTDFDLGSHTKNQNDFKITSEVMKNSSSTTKLAVQDLEEKKWYIPYVIEPSAGVDRGVLALLNEAYREENVDKDNKRILLSLKPHLSPIKAAVIPLKKNNEELVNLSKEIKSNLQKLGLGRVVLENSGNIGKNYRRHDEIGTPICLTVDFETLEDKSVTVRDRDTMKQERVSIENLSEYYKKYFN

SEQ ID NO: 186468 - protein, 355 aa, Unknown
  Bacterial polypetide isolated from the Sargasso Sea
MADGFKNNNLNDIENLINEFEIKCPVSGTSNWTEVRQFNLMFKTNLGASSDSNMELYLRPETAQGIFLNYLTLQKTSRMKIPFGIAQIGKAFRNEIVARQFIFRMREFEQMEMQFFIKPGTQDKWYKHWKEKRMEWHLSLGIEKNNYRFHDHEKLAHYADAASDIEFKFPFGFKELEGIHSRTDFDLKSHEKLSGKKIQYFDTEKNESYTPFVIETSIGLDRMFLSVLSSSYTNENLEDGSSRIVLKIPKQIAPVKIAVLPLLKKDGLPEIAKELLNELSSEVNLSYDEKDAIGRRYRRQDAIGTPYCITIDHKTLEDNTFTLRDRDSMEQKRINKDELINIVKDELTINNLLNN

SEQ ID NO: 186469 - protein, 440 aa, Unknown
  Bacterial polypetide isolated from the Sargasso Sea
MNKTIEKIVSLCKRRGFIFQSSDIYGGFSAVYDYGPLGIELKNNISQLWWKEMTQTHENIVGLDSGILMHPKIWEASGHVGAFNDPLVDCKQCKARYRADEFSEDFNSLDWTEIKCPNCGTTGKMTEPRQFNLMFKTHVGPVEETGTEAFLRPETAQGIYVNYQLVQGAMRMKIPFGIAQIGKAFRNEIIARNFIFRTREFEQMEMQYFVKPGTDDSIMKEWKEKRFQFYLDQLCIVEKKLRYKEHGENELAHYAKEAWDIEYEFPFGWSEIEGIHNRTDYDLSRHEEFSGKNLNYFDQPNNERFLPYIIETSAGLNRMLLTVLADAYWEDEENNRVVMKLHPRLAPVKAVVCPLVKKDGLPEKAREIMDILKPHFKIVYDQQGSIGKRYYRQDEAGTPFGITVDHQSSEDNTVTLRHRDTQKQDRVSIDKLVNTIQENI

SEQ ID NO: 186470 - protein, 250 aa, Unknown
  Bacterial polypetide isolated from the Sargasso Sea
MPAKSMDELVALCKRRGFIFQSSDIYGGLQGVYDYGPLGVELKNNLKATWWSSMVYERDDIEGLDAAILTNPVTLKYSGHVDTFTDPLVDCKDCKARHRADHISDATCPNCGSTNLTAPRAFNLMFKTNVGPIDDGSSYAFLRPETAQSIFTNFKNVVDSTSRKLPFGIAQIGKSFRNEITPRNFIFRVREFEQMELEYFVKPGVDEEAHESWVQSRVNWWIEQGINSNNLELYKVPQEELAHYSKATVD

SEQ ID NO: 186471 - protein, 330 aa, Unknown
  Bacterial polypetide isolated from the Sargasso Sea
LLNVKTNVGPVDDGSSFAYLRPETAQQIFTNFKNVIDSTSKPVPFGIAQIGKAFRNEITPRNFIFRVREFEQMELEYFVMPGEDEKSHDIWVQKRLEWWKKQGVPTESIELYDVPTEELAHYSKKTIDLMYKFPHGLEELEGIANRTDFDLGSHSKKQNELSIGSSVKENKHSNSKMAVQDDTGKWVVPFVIEPSAGVERGFLAILNEAYFVEELENDKTRVVLRLKPHLSPIKAAVIPLKKNNTELVDAAKNIKNELQKIGLGRVIFENTGNIGKSYRKHDEIGTPVCITVDFQTLEDDSVTIRDRDSMEQKRLDIDDLNNYLINLINH

SEQ ID NO: 186472 - protein, 308 aa, Unknown
  Bacterial polypetide isolated from the Sargasso Sea
MTAKTMDELVALCKRRGFIFQSNEIYGGLQGLYDYGPLGIELKNNLKQSWWTSMVYDRDDVEGLDASILTHPDVLKYSGHEETFTDPLVDCKSCGLRFREDQIPEQCIGEELTEPRDFNLMFKTNVGPIDDGSSYAYLRPETAQQIFTNFKNVVDSTSRTLPFGIAQIGKAFRNEITPRNFIFRVREFEQMELEYFVTPGTDEKWHKKWVDTRIKWWIDQGIDASKIKRLNVPDDDLAHYSKSTVDLMYEFPHGIEELEGIANRTDFDLGSHSKNQDQLNINATTITNKSSNSKLAVQDISDNTFIVP

SEQ ID NO: 186473 - protein, 293 aa, Unknown
  Bacterial polypetide isolated from the Sargasso Sea
MVSKKKKNKKEPLTFQDTILTLQKYWSKQGCVLLQPYDLEVGAGTFHPATTLRSLGEKPWKTAYVQPSRRPTDGRYGDNPNRLQHYYQFQVLIKPSPSNIKKLYLNSLASIGVDHNTNDIRFVEDDWESPTLGAAGLGWEVWCNGMEITQFTYFQQMAGIECKPISVEITYGLERLCMFIQNKKNVFDLIWNNDGILYKDVFHQSEKEFSAYNFEYANTVNLFKIFDMVESEAKYLIEKEISLPAYDQCLKASHIFNILDARGVISVAQRAEYISKIRDLTKAIGKIWLESQK

SEQ ID NO: 186474 - protein, 297 aa, Unknown
  Bacterial polypetide isolated from the Sargasso Sea
MSIDKIVSLCKRRGFIFQSSDIYGGFRAVYDYGPLGIALKNNISQLWWKSMTQLHENIVGLDSAILMDPKIWEASGHVGAFNDPLVDCKQCKARYRADELGDIENEKISWNEIQCPKCGTKGNLTEPRQFNLMFKTYVGAVEEDSNATFLRPETAQGIYVNYLLVQNAMRLKLPFGIAQIGKAFRNEIVARNFIFRTREFEQMEMQYFVKPGQDDETLENWKKERMAFYAQLGIDKDKLRFKEHGPGELAHYAKEAWDIEYDFSFGWSEIEGIHNRTDFDLNRHQEFSGKKMGIFET

SEQ ID NO: 186475 - protein, 293 aa, Unknown
  Bacterial polypetide isolated from the Sargasso Sea
MAFKKIKKKPKFQTFQDTIINLQKFWSKNGCVILQPYDMEVGAGTFHPATTLRSLGPKPWKAAYVQPSRRPTDGRYGDNPNRLQHYYQFQVIIKPSPINIKKLYLNSLSVIGINHKEHDIRFVEDDWESPTLGAAGLGWEVWCDGMEISQFTYFQQMAGFECKPVSVEITYGLERICMFTQQKKNVYDLVWNDEGIDYREVFHQSEKEFSAYNFEHANTENLFKIFDMHESEAKSLVEKNISLPAYDQCLKASHIFNVLDARGAISVAQRAEYIGRIREITKQAATIWVQSQT

SEQ ID NO: 186476 - protein, 431 aa, Unknown
  Bacterial polypetide isolated from the Sargasso Sea
FIFQSSEIYGGLQGTYDFGPLGVELKNNIKDAWWEAMVYENDDIEGLDSSILTNPLVLGYSGHEDTFSDPMVDCKSCGLRFRADQVPKECKPEDLTEPRQFNLMFKTNVGPIDDGSNFAYLRPETAQQIFTNFKNVIDATSKPIPFGIAQIGKAFRNEITPRNFIFRVREFEQMELEYFVMPGEDETSHDIWVQKRLEWWKKQGVPTESIELYDVPTEELAHYSKKTIDLMYKFPHGLEELEGIANRTDFDLGSHSKKQNELSIGSSVKENKHSNSKMAVQDDSGKWVVPFVIEPSAGVERGFLAILNEAYFVEELENDKTRVVLRLKPHLSPIKAAVIPLKKNNTELVEAAKNIKNELQKIGLGRVIFENTGNIGKSYRKHDEIGTPVCITVDFQTLEDDSVTIRDRDSMEQKRLDIDDLNNYLINLINH

SEQ ID NO: 186477 - protein, 290 aa, Unknown
  Bacterial polypetide isolated from the Sargasso Sea
MVSKIKKKTLSFQDTIFNLQKYWSKKGCVILQPYDLEVGAGTFHPATTLRSLGPKPWKTAYVQPSRRPTDGRYGDNPNRLQHYYQFQVLIKPSPKEIKKMYLNSLSSIGINHEEHDIRFVEDDWESPTLGAAGLGWEVWCDGMEVTQFTYFQQMAGVECKPVSVEITYGLERLCMFIQNKKSVFDLIWNDEGITYKDVFHQSEKEFSAYNFEYANTDNLFKIFEMLEEETKLLVEKKISLPAYDQCLKCSHVFNILDARGVISVAQRAEYIARIRELTKSIGKVWIESQS

SEQ ID NO: 186478 - protein, 427 aa, Unknown
  Bacterial polypetide isolated from the Sargasso Sea
MPEEIFDKVVKIAQSRGFVFNASSIYGGLRSSYDYGPLGVLLKNNISSMWWSSLNNLDVEIYPIDTAIIQSSEVWKASGHLAEFTDPMVDHKPTGERFRADQVPKDLKKEDLTEPRQFNLMFETSIGPVENENSAVYLRPETAQGIFVNFENVLRTMRAKIPFGIGNIGKSFRNEITPGQFIFRTREFEQMEIEFFCDESEEDKWFDYWVENRLNWYKNLGIPEKNLRIRNHEKSELAHYAKKTSDIEFEYPWGWGELEGIANRGNFDLNAHQESSGKDLEYFDPVTESKFTPSVIEPAGGLTRTLFAVLLSLYEEEELENETRTLFKFNFDLAPIQIGILPLSKKEELITVCNQINSSLRSNFRTEIDITQSIGKRYRRQDEIGTPYCITVDFDTLEDNSVTVRSRDTMEQERIKIEELRDYFNNF

SEQ ID NO: 186479 - protein, 397 aa, Unknown
  Bacterial polypetide isolated from the Sargasso Sea
LWFMKRDDIEGIDSSILTSAIVLKYSGHEDTFTDPLVDCKSCGERFRADQVPDYCKKEDLTEPRHFNLMFKTNVGPIEDGDSFAYLRPETAQSIFTNFKNVIDSTPHSLPFGIAQMGKAFRNEITPRNFIFRVREFEQMELEFFVKPGEDEKWHKEWTDLRLKWWENQGVSKESIELYHVPSEELAHYSKATVDIMYKFPHGLEELEGIANRTDFDLGSHSREQSELNLTAKVDVNTHSNAKLAIQDTKTGDWFVPYVIEPSAGVERGFLAILNEAYNVEKLKDGKERTVLRLKPHLAPIKAAVIPLKRNNKDLVERAKDIKNELQSLALGRVLLENSGNIGKSYRKHDEIGTPMCITVDFQSLEDGTVTIRDRDTMKQERLEKKSISDYFKNALNN

SEQ ID NO: 186480 - protein, 183 aa, Unknown
  Bacterial polypetide isolated from the Sargasso Sea
MASKKNKKKPKFQTFQDTIINLQKFWSKHGCVVLQPYDMEVGAGTFHPATTLRSLGPKPWKAAYVQPSRRPTDGRYGNNPNRLQHYYQFQVIIKPSPLNIKKIYLNSLSVIGINHKEHDIRFVEDDWESPTLGAAGLGWEVWCDGMEISQFTYFQQMAGFECKPVSVEITYGLERICMFTQQK

SEQ ID NO: 186481 - protein, 290 aa, Unknown
  Bacterial polypetide isolated from the Sargasso Sea
MASKIKKNNFSFQDTILNLQKFWAKKGCLILQPYDLEVGAGTFHPATTLRSLGQKPWKTAYVQPSRRPTDGRYGDNPNRLQHYYQFQVLIKPSPKDIKKMYLNSLNSIGINHEDHDIRFVEDDWESPTLGAAGLGWEVWCDGMEVTQFTYFQQMAGIECNPVSVEITYGLERLCMFIQDKKNVFDLNWNNEGILYRDVFHQSEKEFSAYNFEYANTDNLFKIFDMLEEETKLLVEKKISLPAYDQCLKCSHVFNILDARGVISVAQRAEYIARIRELTKSIGKVWIESQS

SEQ ID NO: 186482 - protein, 107 aa, Unknown
  Bacterial polypetide isolated from the Sargasso Sea
MPAKKKVKKKNNSLSFQDIIMNLQKFWGRNGCMILQPYDLEVGAGTFHPATTLRSLGPKPWKAAYVQPSRRPTDGRYGENPNRLQHYYQYQVIIKPSPSNIKQTYLK

SEQ ID NO: 186483 - protein, 293 aa, Unknown
  Bacterial polypetide isolated from the Sargasso Sea
MQKLSFQEIILKLLNFWSKQGCIILQPYDMEVGAGTFHPATALNVLGPNRLWKVAYVQPCRRPTDGRYGENPNRLQHYYQFQVIIQPSPDNIQDLYLKSLKEINLDHLKHDIRFVEDDWESPTLGAAGLGWEVWCDGMEVTQFTYFQQVGGFEVRPVAVEITYGLERLAMFIQELDDVYSIDFNGLPKSSGGKSYGDIFKDAEKEYSEYNFEKANVDKLFNEFENCVKECNDLMSLEKSLVKPAYDQCIKASHIFNLLDARGVISVSERQAFILKVRNMSKTCCSEWIKRHEN

SEQ ID NO: 186484 - protein, 250 aa, Unknown
  Bacterial polypetide isolated from the Sargasso Sea
MPTKLKNKKKSLLTFQDLIFNLQKFWGKYGCVILQPYDIEVGAGTFHPATTLRSLGPKPWKAAYVQPSRRPTDGRYGKNPNRLQHYYQYQVIIKPSPENIKQVYLKSLAAIGIQSKDHDIRFVEDDWESPTLGAAGLGWEVWCDGMEITQFTYFQKMTGIDCKPVSVELTYGLERICMFVQGKKSVFDIDWNSDGVKYGDVFLESEKEFSAYNFDHANTDSLLKNFEIAENESKSLLEKKLPLPAYDQCL

SEQ ID NO: 186485 - protein, 383 aa, Unknown
  Bacterial polypetide isolated from the Sargasso Sea
MSAQSMEQLVSLCKRRGFIYQTNEIYGGLQGIYDFGPYGVELKNNLKNAWWSEMVYQRDDVEGIDASILTNKLVLKHSGHEDTFSDPLVDCKDCKNRMRADHIKNSKCSLCGSSNLTKPREFNLMFKTNVGPIEDENNYAYLRPETAQQIFTNFKNVLNSNPKKIPFGIAQIGKAFRNEITPRNFIFRVREFEQMELEFFVKKGDDEEWHKYWLEKRIEWWGKQGVAKDKIKILNVPEDELSHYSKGTYDLMYEFPHGVEELEGIANRTDFDLGSHSKNQEDYQIDAKVIKNNESNEKLVFTDSETNETYIPYVIEPSAGVERGMLAILNEAYNEEVLENGKTRTLLKLKPHLSPVKVAVIPLKKNDEKIVSYAKEIKRKIQG

SEQ ID NO: 186486 - protein, 343 aa, Unknown
  Bacterial polypetide isolated from the Sargasso Sea
MPAQSMEQLVSLCKRRGFIFQTNEIYGGLQGVYDYGPLGVELKENLKRSWWTAMVYSRDDIEGLDASILTNKKVLQYSGHEETFTDPMVDCKSCGERFRADQVPEYCKQEDLTEPRQFNLMFKTNIGPIADEESYAYLRPETAQQIFTNFKNVVDSTSKSIPFGIAQIGKAFRNEITPRNFIFRVREFEQMELEFFVEKGQDEGWHEYWVKERISWWADQGVRKEKIEVLHVPKEDLSHYSKATVDLMYAFPHGVEELEGIANRTDFDLGSHSKNQEDLNITAKVLKNKDSNARLAIQNIESKKWQIPYVIEPSAGVDRGVLAILNEAYKEENLENGKNRVVL

SEQ ID NO: 186487 - protein, 482 aa, Unknown
  Bacterial polypetide isolated from the Sargasso Sea
MSKNNYRLEELEKLVSLAKRRGIIFPSSEIYGGLSSVWDYGPIGVEIKRNVKNLWWKSFVSERDDIFGIDASILMHPDVWKASGHLESFSDPLVECSLTGKRYREDHIFILEIETKKENKIIAIEASDKNEAEKLVKEKIISIIPLIESESKENPSPDGGTLSDPRNFNLMFKTFIGPVEDSSSTVYLRPETAQAMFVNFLNVLNSSRKKIPFGIAQQGKSFRNEITPGNFTFRTREFEQMEMEFFCSPDDDEKWHDYWIQFSLDWFKKYGIREENLMIRKHESEELPHYSKASSDIDYLFPWSWGELETISNRTDYDLKAHSELSGKDLSYFDQENNKRFTPYVIEPAMGADRSVLAFLCDAYCEEKTEKETRTLLKLHPEIAPIKIAVLPLSRNEKLSEYSRNIFDRLNSLYTTQYDDTQSIGRRYRRQDEVGTPLCVTIDFESVEEDDSVTIRNRDTMEQIRVSSDKLLEAINDQLKSF

SEQ ID NO: 186488 - protein, 136 aa, Unknown
  Bacterial polypetide isolated from the Sargasso Sea
MVSKKKIKKKPKFQTFQDTIINLQKYWSKNGCVILQPYDMEVGAGTFHPATTLRSLGPKHWKAAYVQPSRRPTDGRYGDNPNRLQHYYQFQVLIKPSPKNIKKLYLNSLKTIGINYKDHDIRFVEDDWESPTLGAA

SEQ ID NO: 186489 - protein, 219 aa, Unknown
  Bacterial polypetide isolated from the Sargasso Sea
MVSKKKNKKKSFQSFQDTILNLQKYWSKQGCTLLQPYDMEVGAGTFHPATTLRSLGPKPWKTAYVQPSRRPTDGRYGENPNRLQHYYQFQVLIKPSPNNIKKLYLNSLASLGIKHQDHDIRFIEDDWESPTLGAAGLGWEVWCDGMEITQFTYFQQMAGIECKPISVELTYGLERLCMFIQSKKNVFDLIWNNEGILYRDVYYQSEKEFSKYNFELANT

SEQ ID NO: 186490 - protein, 290 aa, Unknown
  Bacterial polypetide isolated from the Sargasso Sea
MVSKSKDKILTFQDTILNLQKFWSKKGCVVLQPYDMEVGAGTFHPATTLRSLGTKPWKTAYVQPSRRPTDGRYGDNPNRLQHYYQFQVLIKPSPENIKKLYLNSLSSIGIDHSDHDIRFVEDDWESPTLGAAGLGWEVWCDGMEITQFTYFQQMAGFECKPVSVEITYGLERICMFIQQQKNVYDLLWNDDGVKYKEVFHQAEREFSAYNFEHANVESLFKMFDMHESEAKSLVEKKISLPAYDQCLKASHVFNILDARGAISVAQRAGYIARIRDITKSAASIWLDSQK

SEQ ID NO: 186491 - protein, 144 aa, Unknown
  Bacterial polypetide isolated from the Sargasso Sea
EVPYVIEPSAGVDRGVLAILNESYKEETLENGKNRVVLALKPHLSPIKAAVIPIKKNDSTIVDFSKQIKDNLQKLGLGRVVLENTGNIGKSYRKHDEIGTPICITIDFDTLEDSTVTVRDRDSMEQKRVKVENLDDLLKNLLVK

SEQ ID NO: 186492 - protein, 421 aa, Unknown
  Bacterial polypetide isolated from the Sargasso Sea
FLAVPQECLILTMQTNQKYFALTDAQGHLRNRFLIVSNIATDTPEAIIQGNERVVRPRLADARFFFEQDKKKPLADRVPLLSRVVYHNKIGTQLERVSRLQAIAGQLAEKLGADVAHASRGALLAKADLLTDMVGEFPELQGTMGTYYARHDGEPDDVALACSEHYQPRFAGDALPSTATGTVVALADKFETLVGIWGIGLQPTGEKDPFALRRHALGILRMLIEKPLALTIDDALQIAAASFDGIAAVKPNLAAITDFLYDRLRGYLKDKGYSTNEVEAVVSQRPQRLDDIVARLEAVRAFAALPQAEALAAANKRITNILKKTDVAIGAVQPPLLKEDAERALHQSVVAAEPQVHDAFARGDFTTALKTLAGLREAVDTFFDGVMVMADDTALRDNRLALLAELHGLMNRVADISKLAA

SEQ ID NO: 186493 - protein, 534 aa, Unknown
  Bacterial polypetide isolated from the Sargasso Sea
MSEKTFLVEIGTEELPPKALRSLAESFAANFTAELDNAGLAHGNVEWFAAPRRLALKVANLAAAQPDREVEKRGPAVSAAFDAEGKPSKAAEGWARGCGITVDQAERMVTDKGEWLLYRAHVKGESAEALLPNMVATSLAKLPIPKLMRWGASDVQFVRPVHTVTLLLGDKVVPATILGIASDRVIRGHRFMGEPEFTIDNADQYPQILLERGKVIADYEQRKAKIKADAEEAARKIGGNADLSESLLEEVASLVEWPVVLTAKFEEKFLAVPAEALVYTMKGDQKYFPVYGNDGKLLPNFIFVTNIESKDPLQIISGNEKVVRPRLADAEFFFNTDRKKRLEDHLPRLQTVLFQQQLGTLRDKTDRIQALAGWIAGQIGADVNHATRAGLLSKCDLMTNMVFEFTDTQGIMGMHYARHDGEAEDVAVALNEQYQPRFAGDDLPSNPVACAVAIADKMDTLAGIFGIGQHPKGDKDPFALRRAALGVLRIIVEKNLNLDLQTLTEEAARLYGDKLTNANVVDDVIDFMLGRFRA

SEQ ID NO: 186494 - protein, 127 aa, Unknown
  Bacterial polypetide isolated from the Sargasso Sea
MVSKAKKEKKKIQTFQETILNLQKFWSKKGCIILQPYDMEVGAGTFHPATTLRSLGNKPWKAAYVQPSRRPTDGRYGDNPNRLQHYYQFQVLIKPSPENIKKLYLNSLSTIGIDHNDHDIRFVEDDW

SEQ ID NO: 186495 - protein, 290 aa, Unknown
  Bacterial polypetide isolated from the Sargasso Sea
MPTKKKLKSLSFQEIIMNLQKFWGKYGCVILQPYDLEVGAGTFHPATTLRSLGPKPWKAAYVQPSRRPTDGRYGKNPNRLQHYYQYQVIIKPSPDNIKQTYLKSLSAIGIDVKNHDVRFVEDDWESPTLGAAGLGWEVWCDGMEITQFTYFQQMTGLECKPIPVEMTYGLERLCMFVQGKKNVFDLDWNNEGVKYKDVFFQAEKEFSAYNFEFANTETLLKNFESTEIECKSLLDKKLSLPAYDQCLKASHIFNLLDARGVIGVAERTGYINRIRELAKGCGALWLSTQI

SEQ ID NO: 186496 - protein, 340 aa, Unknown
  Bacterial polypetide isolated from the Sargasso Sea
YCKKEDLTEPRQFNLMFKTNIGPVDDGKSFAYLRPETAQNIFTNFKNVVDSTARTVPFGIAQMGKAFRNEITLKSFIFRVREFEQMELEFFVRPGDDDKWHKSWVESRVQWWKDQGISDKSLELYDVPADELAHYSKATVDIMYKFPHGVEELEGIANRTDFDLGSHSKSQKELNIKAKVLENNESNSKLALQDENNNWFVPFVIEPSAGVDRGVLAILNEAYFVEEIEGKERVVLKLKPHLAPIKAAVMPLKKNDEKIVALAKKVKDELQKLGLGRILFENSGNIGKNYRRHDEVGTPVCITVDFESLDNQTVTIRDRDSMKQERISLDKISEYLKKII

SEQ ID NO: 186497 - protein, 176 aa, Unknown
  Bacterial polypetide isolated from the Sargasso Sea
HDIRFVEDDWESPTLGAAGLGWEVWCDGMEITQFTYFQQMAGFECKPVSVELTYGLERLCMFTQQKKNVYDLIWNSEDIKYRDVFHQAEKEFSTYNFELANTENLFKIFDMTEKEAKMLTENNVSLPAYDQCLKASHIFNILDARGVISVAQRAEYISRIRDITKGAAEIWLKNQT

SEQ ID NO: 186498 - protein, 317 aa, Unknown
  Bacterial polypetide isolated from the Sargasso Sea
PRQFNLMFKTSIGPVEDDSNIAYLRPETAQGIYVNYLLVQNAMRLKVPFGIAQIGKAFRNEIVARNFIFRTREFEQMEMQYFVQPDQDDQSLNEWKDKRLSFYSQLGIDKSKLRFKEHGPDELAHYAKEAWDIEYEFPFGWSEIEGIHNRTDFDLKQHQEFSGKKMEYFDPVENTRYLPYIIETSAGLNRMLLAVLSDAYWEDNENNRVVMKLDPKIAPVLAVVCPLTKKDGLPEIGRNIMDILKKEFKVIYDQQGSIGKRYYRQDEAGTPFGITVDHQSKDDQSVTLRHRDTQHQDRIAIDQLVNAIKNKLENFNE

SEQ ID NO: 186499 - protein, 338 aa, Unknown
  Bacterial polypetide isolated from the Sargasso Sea
ELTEPRPFNLMFKTAIGPVDDGSSFAYLRPETCQQIFTNFKNILDSTSRTVPFGIAQIGKAFRNEITPRNFIFRVREFEQMELEFFVKPGSDDKWHEYWIEKRIQWWVDQGIKKENLKKNEVNKEDLSHYSKRTVDINYLFPHGEEELEGIANRTDFDLGSHTKNQKDFEIKSEVMQNSSSTTKLAVQDLEEKKWYIPFVIEPSAGVDSGILALLNEAYKEESTDSENKRTLLSLKPHLSPIKAAVIPLKKNNEEIVNLSKQIKSNLQKLGLGRVVLENSGNIGKNYRRHDEIGTPICLTVDFETLEDKSVTVRDRDSMKQERVSIESLADYYKSYFK

SEQ ID NO: 186500 - protein, 293 aa, Unknown
  Bacterial polypetide isolated from the Sargasso Sea
MPKKTKKKNTILSFQNLIFNLQKFWDKQGCIILQPYDLEVGAGTFHPATTLRSLGPKPWKAAYVQPSRRPTDGRYGKNPNRLQHYYQFQVIIKPSPKDIKQLYLKSLMTIGIDSKEHDIRFVEDDWESPTLGAAGLGWEVWCDGMEITQFTYFQKMTGIECKPISVELTYGLERICMFVQEKKNVFDIDWNDNGVKYGDVYLQSEKEFSTYNFDQANTDSLLKNFEIAEQECKNLLEQKLPLPAYDQCLKASHIFNLLDARGVIAVAERTGYINRIRELAKGAGSGWLENQQR

SEQ ID NO: 186501 - protein, 424 aa, Unknown
  Bacterial polypetide isolated from the Sargasso Sea
MKASHLILGTQRENPADAEIISHQLMIRAGLIRQVSSGIYNWLPLGKKVLQKIENIIRKGMNDAGAQEILMPMVQPASLWEESGRIDQYGQELLVFFDRHENKFCLGPTHEEIITDLCKNLITSYKQLPLNLYQIQTKFRDEIRPRFGVMRSREFIMKDAYSFDLDKEGMDKSYSIMKEAYIQIFDALGLDYRIVKADSGAIGGSDSEEFHVLADSGEDLLAFSDKSDYAINAELLAELQEGQDPASLEGMPSPDGKGLLKLKRGIEVGHIFKLGRKYSEVLNLRIQGEDKDIYPEMGCYGIGASRIVAAAIEQNYDDKGIIWPKSLAPFEVAIVEVNQKNKDEIKKKCLEIYQLLKDNNIDVLWDDRDKRPGVKFADMEVTGIPFIIIIGERTIETGEIELKERKDEKPKLVSHQDLVSIIKS

SEQ ID NO: 186502 - protein, 593 aa, Unknown
  Bacterial polypetide isolated from the Sargasso Sea
MRVSRLMLVTLRDVPAEAEITSHQLLLRGGFIRRVGSGIYAYLPMMWKVLQRITTIIREEMNRAGALETLLPQLHPSELWQRSGRWQGYTAGEGIMFHLEDRQGRELGLGPTHEEVITSLAGELLRSYRQLPVNIYQVQTKFRDEIRPRFGLMRGREFIMKDAYSFHANEADLQATYAVMDQAYRRIFERCGLEAVPVDADSGAIGGAASQEFMVTAEAGEDLILISDDGAYAANQEKAVSIPDAVAPLPPAALTRLETPGQTTIEEVCTAQGWQPGQLVKVLLLLARLEDGQQQPVLVCLRGDQELNEVKLVNAVSRRSEQGVLDCRPISPDDLQRQGINTIPFGSIGPDLADEVLADAASWTTSFLRLADTTATELMQFHCGANAEDQHRSHCSWGDLGGAPVGEDLRKARAGERCVHNPDARLQEKRGIEVGHIFQLGRKYSQALDCCFTNENGRDEPFWMGCYGIGVSRLAQAAAEQHHDDAGIRWPAAIAPYELIVVIANIQDDAQTDLGDTIYTTLLEKGIDVLLDDRKERAGVKFKDADLIGIPWRLVIGRDAAEGTVELVQRSNREMRKLPHREAIGELLKALRP

SEQ ID NO: 186503 - protein, 289 aa, Unknown
  Bacterial polypetide isolated from the Sargasso Sea
RPIVVFDILFKIFKKNYPKVTYVRNITDVDDKIIKSSKENNISISELTSEVTKSFSEDCKYLNCEEPTHQPKATENIDLMIEMISELIKKGFAYENNKHVYFEVKKFKDYGQLSNKKLEDLIAGSRVEVSGNKKNSEDFVLWKPAGDDEPSWESPWGKGRPGWHLECSAMSKKFLGDEFDVHGGGIDLLFPHHENEIAQSRCANDTKIFAKFWMHNAFITMSNEKMAKSQGNILKIKDFRNKISGQVLRLALLSAHYKQPLDWNDKLLENCQNTINKWYNSYLEIDNNS

SEQ ID NO: 186504 - protein, 211 aa, Unknown
  Bacterial polypetide isolated from the Sargasso Sea
FPHHENEIAQSTCCHDKKMSNFWLHNGFINFKGEKMSKSLGNTSIVNDLLSKHDPAVLKYSLLTTHYRQPLDFSNDLISYSENIINKWREHIKEVNSKELDSEFVNALLDDLNTPKALMRLQQIIANIKKDKNNDDLLAHFNNGLSLLGLNPSFNKTDLNLDKEFIENMISRRQEAKKNKDFELADKIRDELFKQGIVLEDTKNGTTWKKN

SEQ ID NO: 186505 - protein, 301 aa, Unknown
  Bacterial polypetide isolated from the Sargasso Sea
MPLQIHNSLSGKKEDFNPVHEGKASLYVCGPTVYGDSHLGHAKAYVSFDIILRYLRYSGLKTFYVQNITDVGHLMGDGDEGEDKLLKRARELEQEPMAVAEYFSRRHFEAMDRLAVIRPDISPRATGHITEQLEAIEKLIEQGLAYESNGSVYFEIKKDPKYGELSNREIDQMLGGARVDVRKEKRHPGDFALWKRAEPGHLMRWRDPFSGWGYPGWHTECVVMSTRYLGDEFDIHGGGMDLKFPHHECEISQARGLNKPFARKWIHTNMLTIDGQKMSKSSGNFVSLPELFKNFDPLMVA

SEQ ID NO: 186506 - protein, 175 aa, Unknown
  Bacterial polypetide isolated from the Sargasso Sea
MLHLYNTRTREKAKFVPLQEGKVGLYVCGITVYDLSHMGHARTYLSFDVLVRYMRHLGLDVKYVRNITDIDDKIIARANENGESFEALTARTIAMMHEDFAAINLLEPDVEPTVSGHMDEIIEIIQRLMDKGYAYQAASGDVLFDVSKYEDYGKLSKQDLDQLKAGARVEIAAGK

SEQ ID NO: 186507 - protein, 264 aa, Unknown
  Bacterial polypetide isolated from the Sargasso Sea
PSNESEPSWESPWGKGRPGWHLECSVMSKKFLGDKFDIHGGGMDLIFPHHENEIAQSRCANQNEVFANYWIHNGFITISSEKMSKSQGNILKISDFKNKISGQVLRLALVSAHYKQPLDWNEKLLSECEKTINKWYDSYIKIKKPVLIPNEYLDPLYDDLNTPGYIANLHKLFEKSQKGSAKDKEIFVSACNFIGLLNENRSSWDKFKKNKSKISEEEIKLKINERNNARKNKDYKTADKIRNELLDKGVLIEDKDDKTQWKFK

SEQ ID NO: 186508 - protein, 344 aa, Unknown
  Bacterial polypetide isolated from the Sargasso Sea
VTQRFTKIYQEDMNALGVEKPDLEPLATEHIPEMIEMIEGLIIKGHAYENQGHVFFSVETFDDYGFLSNRTEDEQISGTRIKSSEIKNNQRDFVLWKPSTGQTPGWESPWGYGRPGWHLECSAMAKKYLGRTLDIHGGGSDLLFPHHENECAQSMCSHSGEPLANYWVHNGMIDFDNVKMSKSEGNLLLIRDLLKEIRPEVIRMAFLTTHYRKPINWNDALINDSEKKLDRLYGSIRQLGKISPGEPSEEVMNAIADDINTPKALSELFAIVKNINNAKSDEESRQLASILIGSAHLLGLMNQDAENWFENIDVDEELIDRLLTEREAARSNRNLNELIKLDKR

SEQ ID NO: 186509 - protein, 308 aa, Unknown
  Bacterial polypetide isolated from the Sargasso Sea
CGPLVYDDPHIGNARPLVVFDILFKILKNQYSKVTYVRNITDVDDKIIKSSKENNITILDLTKKITQNFNEDCIYLNCEKPSHEPKATDHISEMIEMITELIKKGFAYENKKHVYFEVKKFNDYGKLSNKKLDELVAGSRIEVSENKKNPEDFVLWKPSETNEPSWDSPWGKGRPGWHLECSAMSKKYLGNEFDVHGGGVDLLFPHHENEIAQSRCANDSKVFANYWLHNAFITMSNEKMSKSQGNILKIKDFRSIKSGQVLRLALMSAHYRQPLDWNDKLLEDCENTISKWYNVFLNIETKLKISDE

SEQ ID NO: 186510 - protein, 305 aa, Unknown
  Bacterial polypetide isolated from the Sargasso Sea
QEVVPFEPGKIVRIYTCGITPYDATHIGHAATYMTYDILQRRLRDLGHETRCVRNITDVDDDILRKARELGVHYLDLAAKETARFDEDMKALGMLPSWSEPRATSAIAEIRKFIGQVLTSGHAYEVDGSVYFEVKSFAKFGSLSGLDRETMLELAAERGGNPEDPKKRDPLDFVLWQPSADDEPSWESRWGYGRPGWHIECSVLAMRDLGTATIDLHGGGADLIFPHHECESAQSEAATGKQFSRHWMHQAMVRMEGEKMSKSLGNLVFISDLPKKFHPNVIRLGLLNFSYRDSWEWNDEIMASA

SEQ ID NO: 186511 - protein, 192 aa, Unknown
  Bacterial polypetide isolated from the Sargasso Sea
MDIYLTNNLTNKKERFVPRNNKEVGMYVCGPTVYDDPHIGNARPLVIFDILFRILKNKFKKVKYVRNITDIDDKIIKSSQDQNISTKELTEKITKSFLEDCSYLNCENPSHQPKATEHIDLMIEMISELLKKGFAYENNKHIYFEVKKFSDYGKLSNKKLEDLIAGSRVEISDNKQNSEDFVLWKPSKYDEP

SEQ ID NO: 186512 - protein, 279 aa, Unknown
  Bacterial polypetide isolated from the Sargasso Sea
MIEIYDSYTKSYKEVTNKNINMYVCGITTSDFCHLGHAFSSVSFEILDRFLTSKGYKVTRVQNFTDVDDKIITKSISENLTPEEVSEKYINAFFEDMDALGVKRANSYPKATDEIGNIISFIEKLEKKDFTYQIDGSVYFRVSKFKNYGKLSSRKLSDSISGTRVNENLKKESDEDFALWKSSKSGEPFWDSPWGKGRPGWHIECSSMVLNSIGNSVDIHGGGIDLIFPHHENEIAQSESLNEKKFADIWMHNGMVKIAGEKMSKSLGNLIKLKDAIKI

SEQ ID NO: 186513 - protein, 201 aa, Unknown
  Bacterial polypetide isolated from the Sargasso Sea
MDIFLTNNLTNQKEQFVPKDKKNVGMYVCGPTVYDDPHIGNARPLVIFDILFKLLKNTFSKVTYVRNITDIDDKIIKSSQDQKISTKELTEKVTSNFFQDCKFLNCENPTHQPKATEHIDLMIEMINELIKKGFAYENNKHVYFEVQKFSEYGKLSNKKLEDLIAGSRVEISENKKNSEDFVLWKPSNIDEPSWDSPWGKR

SEQ ID NO: 186514 - protein, 333 aa, Unknown
  Bacterial polypetide isolated from the Sargasso Sea
VTLEEGKVGLYACGITPYSPSHIGHARQAISFDIIVRWLRKRGFEVNYVTNFTDVDDKIISAANEEGVDFLEISNRYIDDYFESMDALNVIRADAYPRVTETIPEIIEMVESLIEKGNAYLAEDGVYFEIDTSPEKYGQLTGQTLEMVRSGAGGRVDKTGSGKRDHRDFALWKMAKPGEPSWESPWGEGRPGWHIECSAMSLKHLGERFDIHGGGSDLIFPHHEAEIFQSECCLGHDPVVQYWIHNGMVNVDGEKMSKSLGNFWTISEALENVDPLVLRYTLINAPYRQPVDFNQIMIDDSKIHHHRLVACYGEGLAKKGSVDWRGFSWWKKL

SEQ ID NO: 186515 - protein, 247 aa, Unknown
  Bacterial polypetide isolated from the Sargasso Sea
GRPGWHLECSAMSKKFLGNEFDIHGGGIDLIFPHHENEIAQSRCANDTKVFANFWVHNAFITMSNEKMSKSQGNILKIKDFRNKISGQIIRLALMSAHYKQPLDWNDKLLSDCESTLDKWYKVYSSDLKSVKVSDEILRPLYDDLNTPGYIANLHKLFEKASKGENIDLFVSACKFIGLMNETGEQWNEFKKKRVSITESEIKNMLSLRDKARENKNYKEADRIRDELLDKGVLIEDKDGKTLWKFK

SEQ ID NO: 186516 - protein, 289 aa, Unknown
  Bacterial polypetide isolated from the Sargasso Sea
PPDLQPRATEHIPEMIDQIKALIKNGHAYEAEGHVLFSVNTFPGYGSLSGRDKEEQIAGSRVEVAPYKKDPIDFILWKPSIEDQPGWDSPWGFGRPGWHLECSAMSEKTLGVPFDIHTGGQDLLFPHHENELAQCCGVQNKLDDISSYARYWIHNGMIRFDGDKMSKSLGNIQFINDLLNDHNGETLRLVLMSTHYRQPLNWSAKTIDQSKKTLDRLYRTIKSLNISLDNTNAKPAREVIDALCDDLNTPEALGQFNLLIKDLEDGEESQKEEKLAIIISTARMLGMLQ

SEQ ID NO: 186517 - protein, 281 aa, Unknown
  Bacterial polypetide isolated from the Sargasso Sea
MLYDTFTNSKKKFEPIDPNNVRMYVCGPTVYDYAHVGNARPVIVFDILFRLLQKIYGSENVTYVRNITDVDDKIIHAANDQKEDIGILTEKTINYFHDDAKYIGALKPTFEPRATEHIPEMIELIEKLISKEFAYEADGNVLFSSNKFKEYGKLSGKNLDQMVAGSRVGVESYKKEESDFVLWKPSKEDEPSWKSPWGDGRPGWHIECSAMSEKLLGENFDIHGGGQDLIFPHHENEIAQSECANNNKFANYWVHNGFVTVEGNKMSKSDGNFVTVNELKD

SEQ ID NO: 186518 - protein, 298 aa, Unknown
  Bacterial polypetide isolated from the Sargasso Sea
MSEIYLYDSLSNKKRKFEPIDQNHVRIYACGPTVYNYAHIGNARMAVVFDSFVRLFRNKYSNVTYVSNITDIDDKIIEAANESNIPINELTKKYTDIYNADMSNLNVLPPDIQPKATEYVEDMINFIDKLILNDKAYEKDGHVFFNVPSYGGYGKLSNREIDQQLAGSRVQVSDIKKNQQDFVLWKPSSGNQPGWESPWGIGRPGWHTECCVMSEVNLKIPFDIHGGGQDLLFPHHENEIAQSCASVNSDNPEDYAKYWIHNGFVTIDGEKMSKSLNNIILLNDLLKEHDGETIRLAL

SEQ ID NO: 186519 - protein, 161 aa, Unknown
  Bacterial polypetide isolated from the Sargasso Sea
MDIFLTNNLTNKKEQFIPKNKEKIGMYVCGPTVYDDPHIGNARPLVVFDILFKLLKNNFSKVTYVRNITDIDDKIIKSSQEQKISTKELTEKVTSSFLKDCEFLNCENPTHQPKATEHIDLMIEMIAELIKKGFAYENQKHVYFEVKKFSDYGKLSNKNWT

SEQ ID NO: 186520 - protein, 191 aa, Unknown
  Bacterial polypetide isolated from the Sargasso Sea
MKNNQLNLSNTITGKKETFVPINPKKIGMYVCGPTVYDFPHVGNARPLVVFDVLYRVLSKIFGKTNVTYVRNITDIDDKIIESSKNKKISIEELTKTITKSFHDDCKYLNCLKPTSEPKATEHIKGMITMTENLLKNNHAYEKDNHVYFSINSFKNYGKLSKKDPGELVAGSRVEVSKLKKHPLDFVLWKP

SEQ ID NO: 186521 - protein, 300 aa, Unknown
  Bacterial polypetide isolated from the Sargasso Sea
LKCKFGENNVTYVRNITDIDDKIIKSSIEKKISTNKLTEDITKIFHQDCSYLICEKPTYEPKATENISLMIEMISKLVQNGHAYLNNQHVYFEVKKFKDYGKLSNKNLDDLIAGSRVEVSENKKNPEDFVLWKPSKENEPSWESPWGKGRPGWHLECSVMSKKYLGDKFDIHGGGRDLIFPHHENEIAQSRCANKNETFANYWVHNGFITMSNEKMAKSQGNILKISELRNKLNGQVLRLALISAHYKQALDWNDKLIKESQNTINKWYECYVELKKKVLIPEEILSPLYDDLNTPRLYS

SEQ ID NO: 186522 - protein, 95 aa, Unknown
  Bacterial polypetide isolated from the Sargasso Sea
MSKDIFLTNNLTNKKEKFVPLDKSNIRMYVCGPTVYDDPHIGNARPIVVFDILFKIFKKNYPKVTYVRNITDVDDKIITSSKENNILISELTNKV

SEQ ID NO: 186523 - protein, 166 aa, Unknown
  Bacterial polypetide isolated from the Sargasso Sea
MKNNQLNLSNTITGKRETFVPINPKKIGMYVCGPTVYDFPHVGNARPLVVFDVLYRVLSKLFGKSNVTYVRNITDIDDKIIESSKNKKISTDELTLSITKSFHDDCVYLNCLKPNLEPKATEHIKGMITMTENLLQNNHAYEKDKHVYFSINSFKNYGKISKKNPE

SEQ ID NO: 186524 - protein, 237 aa, Unknown
  Bacterial polypetide isolated from the Sargasso Sea
SKKLLGNEFDIHGGGIDLLFPHHENEIAQSRCANDTKVFANYWLHNAFITMSNEKMAKSQGNILKIKDFRNKISGQVLRLALMSAHYKQPLDWNDKLLNDCQNTISKWYNVYSSDNQKEEVDDDILKPLYDDLNTPGYIANLHKLYEKAQKGNSTDKALFTSACNFVGLLNETEIEWLEFKKNKLSINEAEILDKIKQRNKAREDKNYKEADKIRDELFNKGVLIEDKDGKTTWKFK

SEQ ID NO: 186525 - protein, 122 aa, Unknown
  Bacterial polypetide isolated from the Sargasso Sea
MIKLFNTLSKKVEVFKPIDDVVKIYCCGVTVYDLCHLGHARSYIAWDVLRRFLIYSDFKVKYVQNFTDIDDKILKRAKEESSSMKEVSEKNIIEFHKDMDSLGIMRPDSMPRATNHICNICS

SEQ ID NO: 186526 - protein, 296 aa, Unknown
  Bacterial polypetide isolated from the Sargasso Sea
DEMIDGARVEVAEYKKSPRDFVLWKPSDNDSFGWDSPWGYGRPGWHIECTSMIKKIIGDDCTLDIHGGGNDLIFPHHENEIAQGSCISTSKYCNYWFHNGIVLVNKKKMSKSLGNVILLDDLLKEHSSSVIRLALLSAHYRQPLNWTEQTIINAKNLYKKLVSAVGIITEDMSYYKAGTTQLPFSQCDEIQDILSDDLNTPEVINYLSRLAKTARNNSDDAMKLAQSMKFIGLDLAKPSYKNFPDDKDIINLIKQRDEYRIKKDFKSADEVRDKLLDMGVELRDSDGKTTWKYSED

SEQ ID NO: 186527 - protein, 187 aa, Unknown
  Bacterial polypetide isolated from the Sargasso Sea
MNKDIFLSNTLGGKKEKFVPMNEGKIGMYVCGPTVYDDPHIGNARPLVVFDLLFKILKCKYGKKSVTYVRNITDVDDKIIKASVEKKISISDLTNKISKNFHDDCVYLNCEAPTHEPRATENINLMIEMIKELIKNGFAYENEKNVYFKVREYKEYGKLSNKNLEDLIAGSRVEVSQNKTNPEDFVL

SEQ ID NO: 186528 - protein, 244 aa, Unknown
  Bacterial polypetide isolated from the Sargasso Sea
KEIFVPIDDKKIRMYVCGPTVYDDPHIGNARPLVIFDILFKVLKCKYGNKNVTYVRNITDIDDKIIEASKNKKISIKELTEDIINRFHQDCDYLNCDKPTFEPKATENIALMINMIENLINKNVAYESNQHVYFEVSKFEDYGKLSNKKLDELITGSRVEESENKKKQEDFVLWKPSTEDEPGWKSPWGRGRPGWHLECSVMSKKYLGDKFDIHGGGRDLIFPHHENEIAQSKCANDTDVFSNY

SEQ ID NO: 186529 - protein, 128 aa, Unknown
  Bacterial polypetide isolated from the Sargasso Sea
MSLRIYNTLSRALEDFSPLEPGHVRMYVCGMTIYDLCHIGHARMMMAFDVVQRWLKASGLRVTYVRNITDIDDKIIKRALERGITIRQLTDEMIAAMHKDIGLLGIEPPSVEPRATEYVPQMLSLIGQ

SEQ ID NO: 186530 - protein, 249 aa, Unknown
  Bacterial polypetide isolated from the Sargasso Sea
MPELRLHNTFTGAKEVFTPRDRERVTMYVCGPTVYNYVHIGNARPVLVFDCLYRLLSALYPQVVYARNITDIDDKIIDVASQRGTDITAVSKEFTQKYREDMAALNALAPTIEPMATEHIEDMIVLTERLIADGHAYEADGHVLFAVESMPTYGELSGRKLEDMMAGARVEVADYKRHPGDFVLWKPSTDQEPGWDGPWGYGRPGWHLECSAMIRAHLGEAIDIHGGGREIIFPHHENERAQSCCAYGG

SEQ ID NO: 186531 - protein, 260 aa, Unknown
  Bacterial polypetide isolated from the Sargasso Sea
NYLNCDNPSHQPKATEHIDIMIEMISELIKKGFAYEENHHVYFEVNKFKDYGKLSNKNLNELIAGSRVEVSDNKKNSQDFVLWKPSKDDEPSWESPWGKGRPGWHLECSAMSKKLLGNEFDIHGGGIDLLFPHHENEIAQSRCANDTKVFANYWVHNAFITMSNEKMAKSQGNILKIKDFRNRVSGQVLRLALMSAHYKQPLDWNDKLLNDCQNIISKWYNVYSSDYQKEEVDDEILKPLYDDLNTPGYIANLHKLYEKA

SEQ ID NO: 186532 - protein, 261 aa, Unknown
  Bacterial polypetide isolated from the Sargasso Sea
KKNQKDFVLWKPSTGDTPGWESPWGFGRPGWHLECSAMAKKYLGKTLDIHGGGSDLLFPHHENECAQSMCSHSGKPLANYWIHNGMIDFDNVKMSKSEGNLLLIRDLLKQIGPEVIRMAFLTTHYRKPINWNDALITDSEKKLDRLYGSIRKLGKVSPAEPTEEMINALADDINTPKALSELFAIAKRVNNAKSENESKQLASTLVGSANLLGLMNEDAEKWFENIDVDEKLIDRLLNEREAARSDKDFEKADQIRQEIES

SEQ ID NO: 186533 - protein, 257 aa, Unknown
  Bacterial polypetide isolated from the Sargasso Sea
MIKLYNSLTQKKEEFVPIQKGKVGLYTCGPTVYDFSHIGNFRTFLFEDLLKRVLLAFDYKVHHVMNITDVDDKTIKKANDEKKELNEITNKYTNAFLNDSKSLRILEADDYPKATDHIAEMIQMIEVLVSKKFAYISKDGSVFFKISKYSDYGRLVNLSNSTILNVQQLSDEYDLDSVNDFALWKSHKNNDGKVAWDSPWGKGRPGWHIECSAMSTKFLGAHFDIHCGGVDNKFPHHENELAQSTCSLNTPFVNYWL

SEQ ID NO: 186534 - protein, 183 aa, Unknown
  Bacterial polypetide isolated from the Sargasso Sea
MNKDIFLTNSLGNKKDKFIPIDPKKIGMYVCGPTVYDNPHIGNARPLVVFDILFKILKCKYGKNSVSYVRNITDIDDKIISSSIEKNVSIGDLTKNITNIFHQDCKYLNCEAPTKEPKATENILLMIEMINKLIQNKFAYEIKNHVYFEVKKFKDYGKLSNKNLDQLIAGARVEVSENKKKSS

SEQ ID NO: 186535 - protein, 300 aa, Unknown
  Bacterial polypetide isolated from the Sargasso Sea
VSSFKDYGKLSNKNVDELFAGARVEVSENKKRPEDFVLWKPSTEDEPGWDSPWGRGRPGWHIECSAMSKKFLGDTFDIHGGGRDLLFPHHENEIAQSRCANENKPLSNYWIHNGFITVSNEKMAKSQGNVFKIKDFYEKYNGQVLRLALMSTHYRQAMDWNENLLTQSKKTLDKWYECQKKPEGKVLIPDDDLAPLYDDLNTPGYISNIHKLYDKAAKGSEKDKEIFTTACNFIGLLTEPKSKWLEFKKNILEISEEEILQKIKDRNTARDNKNYQLADEIRNELLDKGILIEDKDDKTT

SEQ ID NO: 186536 - protein, 192 aa, Unknown
  Bacterial polypetide isolated from the Sargasso Sea
MALYLYNTLSRSSELFEPADPASVTMYVCGPTVYSFPHIGNARPAVVFDVLARILRRKYKLIYARNVTDVDDKIFAAAKAEKIEIGVLTARYLASYLEDMALLGVQPPDVSPRVTEHIPQIINFIERLVASGHAYEAEKHVLFSVASYSDYGHLSGRALDELIAGVRVDIAPYKREPADFVLWKPSAPDVVG

SEQ ID NO: 186537 - protein, 276 aa, Unknown
  Bacterial polypetide isolated from the Sargasso Sea
SSKEKFKPLRKNSVGMYVCGPTVYSDVHLGNCRTFISFDIIFRYLEHIGYNVRYVRNITDVGHLEDTGEDKISKKAKIEQLEPMEIAQKYTNSFKDVLKKFNVLNPSIEPIASGHITEQISIIEDLLEKNLAYISNGSVYFDISKYNEIDSYGKLSGRDLDKIKSNSRNLNSQDDKINEFDFALWKKADKNHLMKWNSPWSIGFPGWHLECTAMSNKYLGDEFDIHGGGIDLKFPHHDCEIAQAVGYTGKQPAKFWIHTNMLTLNSKKMSKSLDNN

SEQ ID NO: 186538 - protein, 228 aa, Unknown
  Bacterial polypetide isolated from the Sargasso Sea
MTNKKEHFVPFNKKNVGMYVCGPTVYDDPHIGNARPLVIFDILYKLLKNNFTKVIYVRNITDIDDKIIKSSKEQKISVKELTKKVTKSFLEDCKFLNCENPTYQPKATEHIDLMIEMINNLIIKGYAYENKGHVYFEVKKFSDYGNLSNKKIEDLIAGSRVEISENKKNSEDFVLWKPSNENEPSWESPWGKGRPGWHLECSAMSKKFLGNEFDIHGGGIDLIFPHHE

SEQ ID NO: 186539 - protein, 306 aa, Unknown
  Bacterial polypetide isolated from the Sargasso Sea
ALGVNLPDIQPRATDHIKEMIELIKRLVDENKAYEKEGHVLFHVPSFDNYGILSKRNRDEQIAGSRVEVAPFKKDPADFILWKPSPSPLPGWDSPWGFGRPGWHLECSVMSEKSLGLPFDIHSGGIDLVFPHHENEIAQTCSISENKDPKDFATYWFHNGFVNVEGEKMSKSIGNIKLVHDLNKKYKGEVLRLTLLSAHYKQPLNWTEEIIEQNSKMIDRLYRVLLELSEVKADFKLPSDSIMESFLDDLNTPKVIAKLNEEANDASSASDERKKEIKKNLLSAGKILGILEDDPGNWLGYYQKNT

SEQ ID NO: 186540 - protein, 282 aa, Unknown
  Bacterial polypetide isolated from the Sargasso Sea
IIKLIDDLIENGYAYATQSGVYFEVGKYKDYLKLSGRNKDEVISGTRIDLESDKKNTEDFALWKISKKNEPSWNSPWGDGRPGWHIECSAMIHKIFNSGIDIHCGGNDLIFPHHENELAQSAAAFENQLFVKYWLHNGMINLSGQKMSKSEGNIKLLNEYIDKFGGNVIRFFFLRSHYRKPQEFSEGLLEESKTTFKRIQDFTSSVEANPSDVSVIEIFKNSMNDDLNSPKFLGEIFEKMNNLSNFDEYEEKNLKETIKFIFEVLGFNFDIQDSKKINHEDF

SEQ ID NO: 186541 - protein, 188 aa, Unknown
  Bacterial polypetide isolated from the Sargasso Sea
MNSLKLTNSLTKKKEVFKPNNLKKISLYACGPTVYENPHVGNARTLVVFDVLFRVLKILYNSNVTYVRNITDVDDKIIESSQKNKKDIDVITNDVIKIFHKNCKSLNCLKPTVEPKATEHIKEMIEMTSSLIKKGFAYENKNHVYFAVSKFKNYGKLSNKNLDELKAGSRVEISDLKKNPMDFVLWKP

SEQ ID NO: 186542 - protein, 242 aa, Unknown
  Bacterial polypetide isolated from the Sargasso Sea
MRLTNTLTRRTESFTPLTPGKVSIYCCGVTVYDLCHLGHARSYINWDVLRRFLIWRGLEVTFVQNFTDIDDKILKRAAEQDSSMTEVSERNIDAFHQDMDALGILRPNRMPRATQCLDGIRSLIGELESKGAAYSADGDVYFAVMKHAGYGKLSGRDLSEQQDNAAGRVADAEEARKQHPFDFALWKGAKPGEPSFPSPWGEGRPGWHIECSAMVRAELGDTIDIHLGGADLVFPITKMKSP

SEQ ID NO: 186543 - protein, 77 aa, Unknown
  Bacterial polypetide isolated from the Sargasso Sea
MDIFLTNNLSNKKELFTPKDKKNVGMYVCGPTVYDDPHIGNARPLVIFDILFKLLKNNFSKVTYVRNITDIDDKIIK

SEQ ID NO: 186544 - protein, 222 aa, Unknown
  Bacterial polypetide isolated from the Sargasso Sea
RDLIFPHHENEIAQSRCANKNESFSNYWIHNGFITIANEKMAKSQGNIFKIKDFYQKYNGQVLRLALISTHYKQAMDWSEDLLIQSKKTLDKWYECQKKPEGKVLIPDDDLAPLYDDLNTPGFISNIHKLYDKAAKGSDKDKEIFTTACNFIGLLTEPKSKWQEFKKNILEISEEEILQKIKDRNTARDNKNYQLADEIRNELLDKGILIEDKDDKTTWKIK

SEQ ID NO: 186545 - protein, 297 aa, Unknown
  Bacterial polypetide isolated from the Sargasso Sea
VDHVTYVRNITDVDDKIIEAANSNKEDISSLTSRTIQYFHEDASYIGALVPTIEPKATEHINEMVEMIETLIAKGFAYEVDGNVLFSSSKFDQYGKLSGKNIDELIAGARVNIEDFKKEASDFILWKPSKDNEPGWESPWGKGRPGWHIECSAMSKKYLGDTFDIHGGGQDLIFPHHENEIAQSECCHEKKFANYWLHNGFLTVEGNKMAKSDGNFITVNELKDRYHGEVIRLAMLMTHYRQPLNWTENNLLESKKILNKWFSFFLDIEISKDDAEIVDENILSALKDDINTPKSNQ

SEQ ID NO: 186546 - protein, 92 aa, Unknown
  Bacterial polypetide isolated from the Sargasso Sea
MRLTNTLTRRTEPFTPLTPGKASIYCCGVTVYDLCHLGHARSYINWDVLRRYLIWRGLEVTFVQNFTDIDDKILKRAGEENSSMTEVSERNM

SEQ ID NO: 186547 - protein, 245 aa, Unknown
  Bacterial polypetide isolated from the Sargasso Sea
MYGFGGPTVYDDPHIGYARPLVIFDILFKILKNKFTSVTYVRNITDIDDKIIKSSKEQNISSKELTDKITKNFFSDCSYLNCESPTHQPKATEHINLMIEMINELLKKGFAYENNKHVYFEVKKFSDYGKLSNKKLEDLIAGSRVEISDDKKNSEDFVLWKPSNEGEPSWVSPWGKGRPGWHLECSAMSKKFLGNEFDIHGGGIDLIFPHHENEIAQSRCVNGTKNFANYWIHNAFITMSNEKMA

SEQ ID NO: 186548 - protein, 289 aa, Unknown
  Bacterial polypetide isolated from the Sargasso Sea
MIKLNLYNTIQRRFSIFQPIDTKNVRIYACGPTVYDFIHIGNARPLVVFDVLVRLLRKIYPKVTYVRNITDIDDKINKRAIEKKINISELTNETIKNFHKDAHALGNLKPDFEPKATDHISEMIEMIETLISNGFAYVASGNVLFAVEKYNNYGALSGRSLDEMISGSRVEVAEYKKNPGDFILWKPSSKKLPGWDSPWGRGRPGWHIECSAMSKKYLGTQFDIHAGGLDLIFPHHENEIAQSCCANKSDIMANYWLHNGYVTSDGEKMSKSLGNFTTINNLLLNFRGE

SEQ ID NO: 186549 - protein, 319 aa, Unknown
  Bacterial polypetide isolated from the Sargasso Sea
RTISEMIEMISELIKKGFAYENKNHVYFEVKKFKDYGQLSNKKLDELVAGSRIEVSDKKKNPEDFVLWKPSETDEPSWDSPWGKGRPGWHLECSAMSKKYLGKEFDVHGGGVDLLFPHHENEIAQSRCANDTKVFANYWLHNAFITISNEKMAKSQGNILKIKDFRNNKSGQVLRLALMSAHYRQPLDWNDKLLEDCENTISKWYNVYSNNTSNVKISYQILKPLFDDLNTPGYIANLHKLYDDASKGSDEDKRLFVSACNFVGLLNETKEDWLKFKKSNVSISENEILININKRNQARLNKNYKEADKIRDELLDKGV

SEQ ID NO: 186550 - protein, 306 aa, Unknown
  Bacterial polypetide isolated from the Sargasso Sea
AFHEDCKYLNCLNPTFEPKATEHINGMIDMVSNLVKNNHAYENEKHVYFSVSSFKKYGKLSNKNSEQLVAGSRVEVSKYKKDPLDFVLWKPSEDKDPGWNSPWGRGRPGWHLECSVMSEKYLGKQFDIHGGGLDLVFPHHENEIAQSCCANKTENFAKYWLHNGFVTFDKEKMSKSIGNIVAINKLRKNVNGQVVRLALLSSHYKQPLDWNEKLIKESQNTLDKWYGQFEKIKLEELNQDILQPLQDDLNTPEYITKLHSLFEESSKGNKSSKLKFLSACQQIGLLEDKESWDNFKKSKAKVDENF

SEQ ID NO: 186551 - protein, 79 aa, Unknown
  Bacterial polypetide isolated from the Sargasso Sea
MNKDIFLTNNLTNKKEKFIPKNEQNIGMYVCGPTVYDDPHIGNARPIVVFDILYKVFKSKFKKVTYVRNITDVDDKIIN

SEQ ID NO: 186552 - protein, 214 aa, Unknown
  Bacterial polypetide isolated from the Sargasso Sea
MILYNTLTKQKEQLDKSEITMYVCGVTVYDRPHLGHALSTITFDVLHRYLEYIGRKVTRVQNFTDVDDKIIARSKELNITPKDVAEKYIKAFFEDMDSLGVRRADVHPRATEDMKEIIDLIQDLINKNAAYELNGSVYFNVEFSDDYGKLSRRNISDLIEGNRIENEPDKKNPGDFALWKHAEESETHWDSPWGKGRPGWHIECSAMVKKHLEM

SEQ ID NO: 186553 - protein, 225 aa, Unknown
  Bacterial polypetide isolated from the Sargasso Sea
MIEIYDSYTKSYKEVVNKNINMYVCGITTSDFCHLGHAFSSVSFEILDRFLTSKGYIVTRVQNFTDVDDKIITKSISENMTPEEVSEKYINAFFEDMDALGVKRANSYPKATDEIGNIINFIEKLEEKEFTYQIDGSVYFRVSKFKNYGKLSSRKLTDSMSGTRVNENLKKESDEDFALWKSSKSGEPFWDSPWGKGRPGWHIECSSMVLNSIGNSVDHSWRRYR

SEQ ID NO: 186554 - protein, 266 aa, Unknown
  Bacterial polypetide isolated from the Sargasso Sea
MLNLYNSYTKQQEEVNLNQEDVRIYLCGPTVQSSPHLGHGRSAVVFDFFIRYLKFLNYSVLYVRNITDIDDKIIQKSQEKNINYRELAESVWEEFVQAHENLNCLVPDIEPRATAYVPEIVQYIDQLIKNGFGYITKSGVYYDVSKFDDYLKLSGRSTEEVKTGTRIETEEDKKSPEDFALWKFSKEGEPSWDSPWGVGRPGWHIECSTMINQTLGKTIDFHCGGIDLIFPHHENEIAQSKGVEKNENFVNYWLHNGMLNLSGKKM

SEQ ID NO: 186555 - protein, 148 aa, Unknown
  Bacterial polypetide isolated from the Sargasso Sea
MSKDIFLTNNLSNKKEKFVPLDKSNIRMYVCGPTVYDDPHIGNARPIVVFDILFKIFKKNYSKVTYVRNITDVDDKIIKSSKENNISISELTSKVTKSFSEDCHYLNCEEPTHQPKATENIYLMIEMISELIKKGFAYENNKHVYFEV

SEQ ID NO: 186556 - protein, 187 aa, Unknown
  Bacterial polypetide isolated from the Sargasso Sea
MNNLHLTSSLTNKKEIFNPINKEKVSLYACGPTVYDNPHVGNARALVVFDLLFRILIELYGEKKVTYVRNITDIDDKIIEASKIKKIDISDLTKNVTKKFHRDCENLFCLNPSKEPKATDHVDGMINMTKKLIEKNAAYEKEGHVFFSVASFKKYGNLSNKNTDDLKAGARVEVSKLKKDPLDFVLW

SEQ ID NO: 186557 - protein, 243 aa, Unknown
  Bacterial polypetide isolated from the Sargasso Sea
MDIFLTNNLTNKKEQFVPRNTKNIGMYVCGPTVYDDPHIGNARPLIIFDILFRLLKNSFSKVTYVRNITDIDDKIIQSSQEQNISIKDLTEKVTQNFLDDCKFLNCENPTHQPKATEHIDLMIEMINQLIKNGFAYENNKHIYFEVKKFSDYGKLSNKKLEDLIAGSRVEISDNKKNSEDFVLWKPSVKDEPSWDSPWGKGRPGWHLECSAMSKKFLGNEFDIHGGGIDLIFPHHENEIAQSR

SEQ ID NO: 186558 - protein, 218 aa, Unknown
  Bacterial polypetide isolated from the Sargasso Sea
MALNLYDTFSNSKKKFEPINPKNIRMYVCGPTVYDYPHVGNARPVIVFDILFRILQNIYGTEHVTYVRNITDVDDKIINASQENNEDINELTSRTINYFHADAKYIGAMEPSFEPRATDHIAEMINIIETLIEKNYAYVAENNVLFSSTKFSKYGSLSGKNLEEMIAGSRVDVESYKQEASDFILWKPSKDNEPGWDSPWGKGRPGWHIECSAMSENY

SEQ ID NO: 186559 - protein, 296 aa, Unknown
  Bacterial polypetide isolated from the Sargasso Sea
IGNARPLVVFDILYKLLKNNFSNVTYVRNITDIDDKIIKSSQEQKISTKELTEKVTSSFLKDCEFLNCENPTHQPKATEHIDLMIEMITELIEKGFAYENQKHVYFEVKKFADYGKLSNKNLDELIAGSRIEISENKKNSEDFVLWKPSNDDEPFWDSPWGKGRPGWHLECSAMSKKFLGNEFDIHGGGIDLIFPHHENEIAQSRCANETKVFAKYWIHNAFITMSNEKMAKSQGNILKIKDFRNKISGQIIRLALISTHYKQPLDWNAKLLSDCENTLDKWYRVYSSDFKSIKVP

SEQ ID NO: 186560 - protein, 271 aa, Unknown
  Bacterial polypetide isolated from the Sargasso Sea
NKKIPIDKLTNYITKNFHEDCEYLNCLKPNFEPRATEHIKGMISMTENLLNNKHAYEKDKHVYFSVNSFKNYGKLSNKKPDELEAGSRVEISKLKNNPLDFVLWKPSSTDDPGWDSPWGRGRPGWHLECSVMSEKYLGKNFDIHGGGLDLVFPHHENEIAQSCCANKTDKFANYWLHNGYVTYNKEKMSKSLGNIVTMQKMKNKINGQVIRLALLSSHYKQPLDWNEKLVNESQSTLDKWYSLYEPVKESNLDENLIGPLLEDLNTPRVYS

SEQ ID NO: 186561 - protein, 211 aa, Unknown
  Bacterial polypetide isolated from the Sargasso Sea
AHGTSHMAKYWLHNGFVTMNDEKMSKSLGNIITVEEATSRYRPEVVRAALLSAHYRAPLDLSESTMQDAHNSLDRLYRAAGTAEVSGDHVDDGLLACLCDDLNTPAAIARLHELARRANKGDVGAATALKSSASLLGLLQQRADAWAKGGAGVSGSDDQQLDDAAIDAEIAARNAARAARDFAKADAIRDKLAAAGIMLEDRQDGTIWRRS

SEQ ID NO: 186562 - protein, 86 aa, Unknown
  Bacterial polypetide isolated from the Sargasso Sea
MDLMLYDTFTNSKKKFEPIDPNNVRMYVCGPTVYDYAHVGNARPVIVFDILFRLLQKIYGSENVTYVRNITDVDDKIIHAANDQKE

SEQ ID NO: 186563 - protein, 105 aa, Unknown
  Bacterial polypetide isolated from the Sargasso Sea
EEDVYFSTDSFLGYGKLSHRNLEDLIAGSRIDVDEEKKIPADFVLWKPAEEGLAWDSPWGRGRPGWHIECSAMSMDALGNNFDIHGGGIVLKFPHHENEIAHSVC

SEQ ID NO: 186564 - protein, 290 aa, Unknown
  Bacterial polypetide isolated from the Sargasso Sea
MKNNQLNLSNTITGKKEIFVPINPKKIGMYVCGPTVYDFPHVGNARPLVVFDVLYRVLSKIFGKTNVTYVRNITDIDDKIIESSKIKKISTEELTSTITKSFHEDCRYLNCLEPSSEPKATEHIKGMITMTENLLKNNHAYEKDKHVYFSISSFKNYGKLSKRNPEELVAGARVEISKLKKHPLDFVLWKPSSTEDPGWDSPWGRGRPGWHLECSVMSEKFLGKNFDIHGGGLDLIFPHHENEIAQSCCANKANKFANYWLHNGYVTFNKEKMSKSLGNIITIEKMRKTN

SEQ ID NO: 186565 - protein, 229 aa, Unknown
  Bacterial polypetide isolated from the Sargasso Sea
GPTLYSNPHIGNFRPIIIFDVLFRILRLTFGEDRVNYVRNITDIDDKIIDKANELNITTDQLVELTQKTYHQNLNSLSILSPTHEPKATNYISKMIEMITLLIDKKFAYISNGHVLFEAKKYKDYGSLSKFSLKDIISGARVEVAEYKKNPEDFVLWKPSKTNEPSWDSPWGGGRPGWHIECSAMISELLGETIDIHAGGIDLIFPHHENEIAQSTCCHDKKNVKLLAP

SEQ ID NO: 186566 - protein, 280 aa, Unknown
  Bacterial polypetide isolated from the Sargasso Sea
LQNTLSGKKEFFKPVNPDHVRIYACGPTVYNFAHIGNARMAVVNDLLVRVLKTQFKQVTYVSNITDIDDKIIEASKETGEDISVITNKYTEIYNNDMSALGVNLPDIQPRATDHIKEMIELIKRLIDENKAYEKDGHVLFHVPSFDNYGILSKRNRDEQIAGSRVEVAPFKKDPADFILWKPSPSPLPGWDSPWGFGRPGWHLECSVMSEKSLGLPFDIHSGGIDLVFPHHENEIAQTCSISENKDPKDFATYWFHNGFVNVEGEKMSKSIGNIRLVHDL

SEQ ID NO: 186567 - protein, 186 aa, Unknown
  Bacterial polypetide isolated from the Sargasso Sea
MKNNHLNVSNTITGKKEAFVPIDPKKIGMYVCGPTVYDFPHIGNARPLVVFDVLYRVLSKVFGKTNITYVRNITDIDDKIIESSKNKKISIDELTTSITKSFHDDCKYLNCLKPSFEPKATEHIKGMIDMTENLLKNNYAYEKDKHVYFSINTFKNYGKLSKKNPEELVAGARVEVSKSKKHPLDF

SEQ ID NO: 186568 - protein, 308 aa, Unknown
  Bacterial polypetide isolated from the Sargasso Sea
PTHQPKATEHIALMIEMINELIKKGYAYEKKNHVYFEVKKFSDYGKLSNKKLDELIAGSRVEISENKKNSEDFVLWKPSNNNEPSWDSPWGKGRPGWHLECSAMSKKFLGEEFDIHGGGIDLIFPHHENEIAQSRCANDTKVFANYWVHNAFITMSNEKMAKSQGNILKIKDFRKKMSGQVIRLALMSAHYKQPLDWNEKLINDCQNTLDKWYRIYSPEIKNADIPEVILKPLYEDLNTPGYIANLHQLFDKANKGQDLDIFISACKFIGLFNEDSKQWDSFKKNKASISEEEIKKMIDSRNKARENK

SEQ ID NO: 186569 - protein, 245 aa, Unknown
  Bacterial polypetide isolated from the Sargasso Sea
MNSKQPFQLFNTLSGIKERLEAIDPKHLKIYACGPTVYNYAHIGNARMAVVFDTLVRTLRLIYPKVTYVSNITDIDDKIIEAAKEQNVEITSITEKYTKIYNDDMLKLNVLAPDIQPKATEYIPEMIELIVELIEKDFAYEKEGHVLFHVPTYQNYGKLSKRNRDEQIAGSRVEVAPFKKDPADFVLWKPSTDEQPGWESPWGVGRPGWHTECSAMSKKTLGLPFDIHGGGRDLIFPHHENEMLK

SEQ ID NO: 186570 - protein, 268 aa, Unknown
  Bacterial polypetide isolated from the Sargasso Sea
RNKEDQIAGSRVEVADYKNNSGDFVLWKPSNEDQPGWDSPWGRGRPGWHIECSAMSEKTLSLPFDIHGGGVDLTFPHHENEIAQSCAAHKFKDPKEYAKYWIHNGFVTMDGEKMSKSLGNIFLVNDLIKKYPGETLRLALISTHYRQPLNWNSKIIDQAQKNLDRIYRVLKDNENITINNKISASEKIIEALSDDLNSSQALYEMNLLADQLSKCDPSQKQRLKSELIASGNILGILQDSPSSWLKYGTNANNIDSNIIEELIEKRKQ

SEQ ID NO: 186571 - protein, 144 aa, Unknown
  Bacterial polypetide isolated from the Sargasso Sea
MNKQLNIFNTLSGKKEKFIPINKGNVGMYVCGPTVYDFPHIGNARPLVVFDVLFRLLKKLNGNDKVTYVRNITDIDDKIIEASKNKKIPIDKLTNEITKNFHEDCKYLNCLKPNFEPKATEHIKGMIRMTENLLNNKHAYEKDK

SEQ ID NO: 186572 - protein, 229 aa, Unknown
  Bacterial polypetide isolated from the Sargasso Sea
GGGRDLIFPHHENEIAQSCCSSANIDEPDSYAKYWMHNGFVTIDGEKMSKSLGNIILVNDLIQDHHGEVIRLALLSTHYRKGLDWNEKIIHQAKKLLNKIYIILDDLKNINITSSDNEAIATLLDDLNTPGLIAELNKIAKEYSSDAKDKEQIKSKLMLIGSVLGIFQDKSFNQVSDEMQQKIEELIIKRENAKKDKNFDMADQIRNELNELGIEIKDTSDGTSWNVKS

SEQ ID NO: 186573 - protein, 220 aa, Unknown
  Bacterial polypetide isolated from the Sargasso Sea
MTVYDDTHIGHARTFLCFDLIVRYLRNTGYKVNYVRNITDVDDKIIARAKELNMDATELTDKYIASMQDDFNDLGMISPDLEPRATDNIDSIISLIEGLIDKGHAYIGEKDVYFSTDSFKEYGKLSNRNTKDLIAGARIDVDEEKKNPTDFVLWKQAEDGLAWDSPWGRGRPGWHIECSAMSMDALGNNFDIHGGGIDLKFPHHENEIAQSVCATGEEFA

SEQ ID NO: 186574 - protein, 315 aa, Unknown
  Bacterial polypetide isolated from the Sargasso Sea
KNIRMYVCGPTVYDDPHIGNARPLVVFDTLYKIFKKKYPKVTYVRNITDVDDKIINSSKDKNISISELTKNVNKSFQKDCSYLNCDIPTHQPKATEHIDLMIEMISYLINKGFAYEENQHVYFEVKKFKDYGKLSNKNLDELIAGSRVEVSDNKKNSQDFVLWKPSKDDEPSWASPWGKGRPGWHLECSAMSKKFLGNEFDVHGGGIDLLFPHHENEIAQSRCANETKVFANYWLHNAFITMSNEKMAKSQGNILKIKDFRNKVSGQVLRLAIMSAHYRQPLDWNDKLLNDCQNTINKWYKVYASNYKAEEIDDE

SEQ ID NO: 186575 - protein, 301 aa, Unknown
  Bacterial polypetide isolated from the Sargasso Sea
NNLKFTNSLSNKKEIFKPINPKKISLYACGPTVYDSPHVGNARTLVVFDMLFRVLKFVYKDQVNYVRNITDVDDKIIEASKKKKKSIDEITSKVTKIFHKDCESLNCLKPSHEPKATEHIQEMIEMTSSLIEKKYAYVKDGHVYFSVSKFKNYGQLSNKNLDELKSGTRIEISGLKKNPIDFVLWKPSSNEDPGWNSPWGRGRPGWHLECSVMSEKYLGKEFDIHGGGLDLIFPHHENEIAQSCCNNSTNNFANYWIHNGFVTINKEKMSKSLGNIITISDAVNKYTGQVVRLALLSAHYS

SEQ ID NO: 186576 - protein, 155 aa, Unknown
  Bacterial polypetide isolated from the Sargasso Sea
MSLDIFLTNNLTKKKEKFIPQDKNNVRMYVCGPTVYDDPHIGNARPIVIFDILFKILKKQYPNVTYVRNITDVDDKIIKSAKENEITILDLTKKITQNFNEDCIYLNCEKPNHEPKATEHIAEMIEMISELIKKEFAYENKKHVYFEVKKFKDYG

SEQ ID NO: 186577 - protein, 271 aa, Unknown
  Bacterial polypetide isolated from the Sargasso Sea
LTNSYGGKKEKFQPIDENNIKMYVCGPTVYDDPHIGNARPLVVFDLLFKVLKCKYGNDKVTYVRNITDIDDKIIQSAKENKISIKNLTSKINNNFQEDCNYLICEKPSFQPKATEHIKEMIEMISILVKKGFAYESENHVYFEVNKFKDYGKLSNKKIDDLISGSRVEVSSNKRNAEDFVLWKPSKEDEPSWTSPWGKGRPGWHLECSAMSKKYLGDKFDIHGGGRDLLFPHHENEIAQSCCANGTEAFSNYWVHNGFITQSNEKMSKSQG

SEQ ID NO: 186578 - protein, 164 aa, Unknown
  Bacterial polypetide isolated from the Sargasso Sea
MNKDIFLTNSYGGKKEHFKPIDENNIKMYVCGPTVYDDPHIGNARPLVVFDILYKVLKCKYGIDRVTYVRNITDIDDKIIQTAKDKKISIAELTNKININFQEDCNYLNCETPNFQPKATENIDEMIEMISGLIKKGFAYESNKHIYFEVKKFNDYGKLSNKKI

SEQ ID NO: 186579 - protein, 200 aa, Unknown
  Bacterial polypetide isolated from the Sargasso Sea
FVLWKPSVAEDPGWDSPWGRGRPGWHLECSVMSEKFLGKNFDIHGGGLDLVFPHHENEIAQSCCANKVDKFANYWLHNGYVTFNKEKMSKSLGNVISIEKMRGTINGQVIRLALLSTHYKQPLDWNENLINESQNTLDKWYTQFEKTTQGDLDDDLLKPLLEDINTPGYISKLHLLYDKASKGDKSSKKLFLSGCKLIGL

SEQ ID NO: 186580 - protein, 301 aa, Unknown
  Bacterial polypetide isolated from the Sargasso Sea
YVRNITDVDDKIIHAANDQNEDIGMLTEKTINYFHDDAKYVGALKPTFEPRATEHIPEMIELIEKLISKEFAYVADGNVLFSSNKFKEYGKLSGKNLDEMVAGSRVGVESYKKEESDFVLWKPSKEDEPSWKSPWGDGRPGWHIECSAMSEKLLGENFDIHGGGQDLIFPHHENEIAQSECANNNKFANYWVHNGFVTVEGNKMSKSDGNFVTVNELKDSFQGEVIRLTMISTHYRQPLNWTKDNLNESKKTLDKWYTFLSNFNGDELKDANNDNEIMETLLDDMNTPKAISVLHQKFKDC

SEQ ID NO: 186581 - protein, 228 aa, Unknown
  Bacterial polypetide isolated from the Sargasso Sea
FLNCENPTHQPKATEHIDLMIQMINGLIKKGYAYENNKHVYFEVKKFPDYGKLSNKKLEDLIAGSRVEISDNKKNSEDFVLWKPSSKDEPYWDSPWGPGRPGWHLECSAMSKKILGDEFDIHGGGIDLIFPHHENEIAQSRCANDTRSFANYWIHNAFITMSNEKMAKSQGNILKIKEFRKKMSGQVIRLALMSAHYRQPLDWNDKLLIDCENTLDKWYQISLDNFNS

SEQ ID NO: 186582 - protein, 253 aa, Unknown
  Bacterial polypetide isolated from the Sargasso Sea
TFEVKKFKDYGKLSNKNLDELIAGSRVEISDNKKNPEDFVLWKPSKDNEPYWDSPWGKGRPGWHLECSVMSKKYLGDKFDIHGGGIDLIFPHHENEIAQSRCANENTVFANYWIHNGFITLSNEKMAKSQGNILKISNFKNSINGQVLRLALMSAHYKQPLDWNDKLIDECQSTLNKWYESYEELKKPVIIPEEYLTPLYDDLNTPGYIANLHKLFEKSQKGELKDKEIFTSACNFVGLLTTTKKEWIEFKKS

SEQ ID NO: 186583 - protein, 284 aa, Unknown
  Bacterial polypetide isolated from the Sargasso Sea
TMDEIIEMIQGLIDKEKAYVLEGEVFFHVPSFKEYGKLSRKKLDELQHGRRVQVDKRKKNGADFVLWKPAKEGEPFWDSPWGKGRPGWHIECSAMAKKYLGETIDLHHGGVDLMFPHHENEIAQSECANGCEFSKNWCHNEFLNFGLEKMSKSLGNVITIRSFVESFGGEVLRHVLSSVHYRSKMDWSQEVIEKAISEMERIHVFVQNMEETVENEVDEESEKHLLEVNSLLDKMKKELSDDFNVPGALSCLFSLIRMINREYFGAKKEGDKIFVGKSLRNKVM

SEQ ID NO: 186584 - protein, 286 aa, Unknown
  Bacterial polypetide isolated from the Sargasso Sea
MHGGPTVYNYAHIANARMAVVFDTFVRTLRIFYPKVTYVSNITDIDDKIIEAAHEQKVEISSITKKYTKIYNDDMAELNVLMPDIQPKATEYIPEMIELIQDLISKDFAYEKEGHVLFHVPNYVNYGKLSKRNRDEQIAGSRVEIAPLKKDPADFVLWKPSDKSQPGWDSPWGVGRPGWHTECSAMSKKTLGLPFDIHGGGRDLIFPHHENEIAQSCCSSANIEDPTSYAKYWMHNGFVTIDGEKMSKSLGNIILVNELTESHHGEVIRLALLSSHYRQGLDWNEK

SEQ ID NO: 186585 - protein, 272 aa, Unknown
  Bacterial polypetide isolated from the Sargasso Sea
FVLWKPSSEAQPGWDNPFSDTPGRPGWHIECSAMAKHYLGPTFDIHAGGLDLVFPHHENEIAQSCCAHGTDIMAAYWLHNGYVTMGDEKMSKSLGNILAAHEAISEHRGETVRAALLAAHYRAPVVLSDDALAEARNVLDRLYRTVGDAEASKDAVDDVFLAALADDLNTPAAMARLHELAGAANRGEAGAATALKSSAALLGLLEQSAGDWARGDTGADGMDDAAIEAAIEARKAARANRDFAAADRIRGDLAANGILLEDGPDGTVWRRS

SEQ ID NO: 186586 - protein, 275 aa, Unknown
  Bacterial polypetide isolated from the Sargasso Sea
ETIKYFHDDCLSLQNILPDIEPKATDHINEMIEMIKVLIEKDFAYESSGNVLFKVNRYKDYGLLSKRTLEEMIAGSRVEIADYKENPGDFILWKPSSNDLPGWVSPWGRGRPGWHIECSAMSKKYLGKTFDIHGGGIDLVFPHHENEIAQSCCANETEIMAKYWIHNGYVNFEHKKMSKSLKNFVTISELLEKFNGEIIRYFLLQTHYRAPLNYRYEYLNESKASLSRLYRAVQGLEVNGIPDEEIIKCLKNDLNTPKAIARSHYLAENANKGSK

SEQ ID NO: 186587 - protein, 136 aa, Unknown
  Bacterial polypetide isolated from the Sargasso Sea
MSKDIFLTNNLTNKKEKFVPLDKNNIRMYVCGPTVYDDPHIGNARPIVVFDILFKIFKKNYPKVTYVRNITDVDDKIIKSSKENNISISELTSKVTKSFSEDCNYLNCEEPTHQPKATENIDLMVEMISELLKKGF

SEQ ID NO: 186588 - protein, 148 aa, Unknown
  Bacterial polypetide isolated from the Sargasso Sea
MTLTLYNTLSRDKEEFVPIEPDRVTMYVCGPTVYSYAHIGNARPAVVFDVLVRLLRHQWPRVIFARNITDIDDKINAAAAEQGVDIGEITAKFEKIYLEDMASLGVAPPDIDPHATDHIPEMIAMMERLIEEGHAYAAEGHVLFNVPS

SEQ ID NO: 186589 - protein, 254 aa, Unknown
  Bacterial polypetide isolated from the Sargasso Sea
NDENSKKLNPQDFALWKKAKDDEPFFDSPWGKGRPGWHIECSAMVKDELGDTIDIHLGGSDLIFPHHENEIAQSEAANGKKLANYWLHNGMVNVNGQKMSKSLKNFKTIRELIKSGISPMTLRYFVMTVNYRKPLDFTEEALRSASEAWKNINVALSFIDLTKGAFKSIDINESIEEEYKEKISFELSQKKISFSEALGNDLNTAGAIAIIYDLAKPLKNFLNQFQRIEDFKIDLNEKFFLLENFKTLKKLTEV

SEQ ID NO: 186590 - protein, 259 aa, Unknown
  Bacterial polypetide isolated from the Sargasso Sea
FKPINPKNIGMYVCGPTVYDDPHIGNARPLIIFDILFKVLKCKYGNKSVTYVRNITDIDDKIIKSSEEKKISITELTSNIIKKFHEDCKYLNCETPTHEPKATDNIELMISMINDLIKGEFAYESEHHVYFRVKKFKNYGMLSNKNVDDLIAGARVELSDNKQNPEDFVLWKPSIDTEPSWDSPWGKGRPGWHLECSVMSKKYLGNTFDIHGGGRDLIFPHHENEIAQSLCANKTKKFANYWVHNKIITMSKEKMSKSQ

SEQ ID NO: 186591 - protein, 274 aa, Unknown
  Bacterial polypetide isolated from the Sargasso Sea
MNNLYLYNTLEKKTSVFNPIDKNNVRMYACGPTVYDFIHIGNARPLVVFDVLVRLLRKMYPKVTYVRNITDIDDKINKRATEKEIQISELTKETIKNFHYDCKSLGNLNPDFEPRATDHINEIIEMIEILISKRFAYVSSGNVLFSVGKFKKYGMLSGRSLKDMISGSRVDIAEYKDKPGDFILWKPSTEDLPGWDSPWGRGRPGWHIECSAMSKKYLGEQFDIHAGGLDLIFPHHENEIAQSCCANDSEVMANFWLHNGYVTSDGEKMSKSLE

SEQ ID NO: 186592 - protein, 234 aa, Unknown
  Bacterial polypetide isolated from the Sargasso Sea
VNYWMHNGFVRINHEKMSKSKGNFFTLKKIYETFHPEIVRFFILGTHYRNPIDFSYEVMSDASKGLDRLYNLLLKLNTTSKKKDQKLFSLIQKCTTEFRELFSEAMDDDFNSARALGYFFDYSKKINAILNDKEILITEDAALLVKEQFEVIEQVLGILSHNPEEWFKLRLNRDQFGKEDTELKPEEIEKLILLRNEARNNKDYELADKIRHQLGDSGISVEDSSDGTIWKIIR

SEQ ID NO: 186593 - protein, 277 aa, Unknown
  Bacterial polypetide isolated from the Sargasso Sea
RNITDIDDKIIKSSQEQKISTKELTEKVTSSFLKDCKFLNCENPTHQPKATEHIDLMIEMIAELIKKGFAYENQKHVYFEVKKFSDYGKLSNKNLDDLIPGSRIEISENKKNSEDFVLWKPSINDEPYWDSPWGKGRPGWHLECSAMSKKFLGSEFDIHGGGIDLIFPHHENEIAQSRCANETKTFAKYWVHNAFITMSNEKMAKSQGNILKIKDFRNKISGQIIRLALMSAHYKQPLDWNDKLLSDCENTLDKWYRVYSSDLKSVKIPDEILKPTI

SEQ ID NO: 186594 - protein, 232 aa, Unknown
  Bacterial polypetide isolated from the Sargasso Sea
MSKDIYLTNNLTNKKEKFVPLDKNNIRMYVCGPTVYDDPHIGNARPIVVFDILFKIFKKNYPKVTYVRNITDVDDKIIKSSKENKISISELTNNVTKSFGEDCNYLNCEEPTHQPKATENIDLMIEMISELITKGFAYENNKHVYFEVKKFKDYGQLSNKKLDELIAGSRVEVSENKKNSEDFVLWKPSEDDEPSWESPWGKGRPGWHLECSAMSKKFLGDEFDVHGGGIDL

SEQ ID NO: 186595 - protein, 290 aa, Unknown
  Bacterial polypetide isolated from the Sargasso Sea
IMNKDIFLLNSLGGKKEKFNPIDKKKVGMYVCGPTVYDEPHIGNARPLVVFDLLFKVLKCKYGNKSVTYVRNITDIDDKIIQSSKQKNISINELTSSVTKKFHDDCNYLNCEVPTHEPKATDNIELMVKMIKELIKNEFAYENEKHVYFKVKKYEGYGKLSNKNIDDLIAGSRVELSDYKENPEDFVLWKPSTDDEPSWDSPWGRGRPGWHLECSVMSKKYLGNTFDIHGGGRDLIFPHHENEIAQSVCANKTQSFANYWVHNGFITMSKEKMAKSQGNILKISDFKKKV

SEQ ID NO: 186596 - protein, 46 aa, Unknown
  Bacterial polypetide isolated from the Sargasso Sea
YKRYLGEEFDIHGGGRDLIFPHHENEIAQSRCANETNSFANYWVHN

SEQ ID NO: 186597 - protein, 210 aa, Unknown
  Bacterial polypetide isolated from the Sargasso Sea
MNKDIFLTNSFSGKKVEFQPIDENNIKMYVCGPTVYDDPHIGNARPLVVFDLLFKVLKCKYGNDKVTYVRNITDIDDKIIQSAKDKKISIKDLTVKINNNFQKDCNYLICEKPSFQPKATENIKEMIEMISILIEKGFAYESNNHIYFEVNKFKDYGKLSNKKIDDLISGSRVEISSNKKNAEDFVLWKPSNRDEPSWESPWGKADQGGI

SEQ ID NO: 186598 - protein, 275 aa, Unknown
  Bacterial polypetide isolated from the Sargasso Sea
QAGARVDVVDVKRNPMDFVLWKMSKEGEPSWPSPWGNGRPGWHIECSAMNCKQLGNHFDIHGGGSDLMFPHHENEIAQSTCAHDGEYVNYWMHSGMVMVDREKMSKSLGNFFTVRDVLKYYDAETIRYFLMSGHYRSQLNYSEENLKQARSALERLYTALRGTDKSAEPAGGDAFEARFIEAMDDDFNTPEAYSVLFDMAREVNRLKTEDVAAANAMAAHMRKLSGVLGLLEQEPDVFLQSGAQADDGEVAEIEQLIQQRLDARKAKDWAAADAA

SEQ ID NO: 186599 - protein, 189 aa, Unknown
  Bacterial polypetide isolated from the Sargasso Sea
LGNFFTIRDVLGHYDAETVRYFLLSGHYRSQINYSEENLKQARAALERLYTAIKDVDLTVTAAPAEEFVAKFKAAMDDDFNTPEAYSVLFDMVREINRLKTTDMAQASAMAVAMKQLADVLGLLHQTPDSFFKGEGSDDEVAEIEALIVERNRARAEKDWPAADVARNRLNELGVVLEDGPSGTTWRKK

SEQ ID NO: 186600 - protein, 190 aa, Unknown
  Bacterial polypetide isolated from the Sargasso Sea
MNNDIFLTNNLTNKKEKFVPIDEENVRMYVCGPTVYDDPHIGNARPIVVFDILYKIFKKKYSKVTYVRNITDVDDKIIKSSKENNISISELTNKVTKSFGEDCSYLNCETPNHQPKATENIDLMIEMISKLIKNGFAYENNNHVYFEVKKFKDYGQLSNKKLEDLIAGSRIEVSDNKKNSEDFVLWKPSA

SEQ ID NO: 186601 - protein, 198 aa, Unknown
  Bacterial polypetide isolated from the Sargasso Sea
PKATESISIMIEMIEVLLKNGFAYESDKHVYFEVSKFKDYGKLSNKQLDELIAGARIEVSKNKKNPADFVLWKPSTKEEPSWNSPWGSGRPGWHIECSAMSKKFLGDTFDIHGGGRDLIFPHHENEIAQSRCANQKNVFANYWIHNGFITISNEKMSKSQGNILKISDFKNKINGQVLRLALISSHYKQPLDWNEKLF

SEQ ID NO: 186602 - protein, 253 aa, Unknown
  Bacterial polypetide isolated from the Sargasso Sea
IKGMINMAKNLLKNNHAYEKDKHVYFSINSFKNYGKLSKKNPKELVAGARVEVSKSKNHPLDFVLWKPSATGDPGWDSPWGRGRPGWHLECSVMSEKFLGKNFDIHGGGLDLVFPHHENEIAQSCCANQVDKFANYWLHNGYVTFNKEKMSKSLGNIVTIEKMRGTINGQVVRFALLSTHYKQPLDWNENLIKESQNTLDKWYTQFENTKQEDLNEDLLQPLLEDINTPGYISKLHSLYDKSSKGDVTAKKLF

SEQ ID NO: 186603 - protein, 271 aa, Unknown
  Bacterial polypetide isolated from the Sargasso Sea
SNSGEPFWDSPWGKGRPGWHIECSAMVKKHLGDQIDIHGGGMDLIFPHHENEIAQSECFSSKKPFVKYWMHNGMLRVKGAEMSKSLGNTFSINEALKRFSSDAIRLWILQTHYRTNPLLDLDSIKSTEKSLTRLRLINSEVKSKPELKKMNFISFKQRFIESMDDDLNTPKAIATVFDLAKMINKSSSTHDVSEGLILFRELSNILGLNYKKLIKDKVANDVNINEIELMIEERNQARLDKNWKEADLIRDKLFELGIEITDTSEGTTWKN

SEQ ID NO: 186604 - protein, 254 aa, Unknown
  Bacterial polypetide isolated from the Sargasso Sea
TNEPSWDSPWGGGRPGWHIECSAMISELLGETIDIHAGGIDLIFPHHENEIAQSTCCHDKKMSNFWLHNGFINFKGEKMSKSLGNTTIVNDLLAKHDPTVLKYSLLTTHYRQPIDFSNDLLTYSQNIINKWENYIQEVKSSELDTEFVSALLDDLNTPKALMRLQQIIANLKKDSNKEVLLAHFNNGLSLLGLNPSFLKKDLDLDKEYIENMISRRQIAKSNKDFELADKIRDELFKQGIVLEDTKNETTWKKN

SEQ ID NO: 186605 - protein, 232 aa, Unknown
  Bacterial polypetide isolated from the Sargasso Sea
GNTFDIHGGGRDLMFPHHENEIAQSVCANKTKSFANYWIHNGFITMSKEKMAKSQGNILKINDFKNKFNGQVLRLALISAHYSQPLDWNDKLMDECYRTLDKWYGCYVPINKKILIEDDDLKPLYDDLNTPGYIAVLHKLYEKAKEGSISDKEVFTTACNFIGLLNETTEQWNYFKKGKLTLTDEQILQKIEHRNKARDEKNYKLADEIRNELLDKGILIEDKDGKTIWKIK

SEQ ID NO: 186606 - protein, 281 aa, Unknown
  Bacterial polypetide isolated from the Sargasso Sea
MLYDTFTNSKKKFEPIDPNNVRMYVCGPTVYDYAHVGNARPVIVFDILFRLLQRIYGSENVTYVRNITDVDDKIIHAANDQNEDIGILTEKTINYFHDDAKYLGALKPTFEPRATEHIPEMIELIEKLISKEFAYIANGNVLFSSNKFKEYGKLSGKNLNEMVAGSRVGVESYKKEESDFVLWKPSKEDEPSWKSPWGDGRPGWHIECSAMSEKLLGENFDIHGGGQDLIFPHHENEIAQSECANNNKFANYWVHNGFVTVEGNKMSKSDGNFVTVNELKD

SEQ ID NO: 186607 - protein, 236 aa, Unknown
  Bacterial polypetide isolated from the Sargasso Sea
MSKKYLGETFDIHGGGRDLIFPHHENEIAQSVCANNKKFANYWVHNGFITISKEKMSKSQGNILKINSLKNKYNGQVLRLALMSSHYKQPLDWNDQLMEECYKTLDKWYSCYLKLEKKVLIDDDDLMPLYDDLNTPGYISVLHKLFDKAKSGNQQDKEKFIAGCNFVGLLQESKDDWLSFKKSKMDISEAEINILIDKRNEARANKNYSLADKIRKELLDKGVLIEDKDGKTIWKI

SEQ ID NO: 186608 - protein, 258 aa, Unknown
  Bacterial polypetide isolated from the Sargasso Sea
PFWDSPWGKGRPGWHLECSVMSKKFLGDKFDIHGGGMDLIFPHHENEIAQSRCSNENDTFANYWVHNGFITISNEKMSKSQGNILKIGDFKNKVSGQVLRLALISAHYKQPLDWNDKLLTECEKTINKWYESYTDIKKQVLIPEDYLSPLYDDLNTPGYIANLHKLFEKSQKGSSNDKEIFVSACNFIGLLNETKNSWDQFKQKKSKISEEEIKQKIAERNNARKNKDYKAADKIRNELLDKGVLIEDKDDKTLWKFK

SEQ ID NO: 186609 - protein, 259 aa, Unknown
  Bacterial polypetide isolated from the Sargasso Sea
SKHVKIYACGPTVYNYAHIGNARMAVVFDTFVRTLKAVYPKVTYVSNITDIDDKIIEAAKEQEVEISQITDKYTKIYNEDMARLNVLPPDVQPKATEFIPEMINLIEDLISKDFAYEKEGHVLFHVPLYLNYGKLSNRNREEQIAGSRVEVAPFKKDPADFILWKPSDDTQPGWDSPWGIGRPGWHTECSAMSEKTLGLPFDIHGGGRDLIFPHHENEIAQSCCSSASIDDPTSYARYWMHNGFVTIDGEKMSKSLGNI

SEQ ID NO: 186610 - protein, 120 aa, Unknown
  Bacterial polypetide isolated from the Sargasso Sea
MKLRIYDTFKRAKVDFTPNNSSHVKIYVCGPTVYDFAHIGNARPVIIFDVLVRLLRHLYPKVTYVRNITDIDDKINARSLETGESINLITDRTTRAFEEDMSALNSQKPDYEPRATDHVK

SEQ ID NO: 186611 - protein, 132 aa, Unknown
  Bacterial polypetide isolated from the Sargasso Sea
VEFYVCGPTVYDYAHIGNARPIVVFDVLYRLLQCLYPKVTYVRNITDIDDKINARSAESGEPINEITARTTAQFHEDIAALGALPPDIEPRATNHVAEMVEMIEGLIEKGHAYAAEGHVLFNVPSWEAYGRL

SEQ ID NO: 186612 - protein, 88 aa, Unknown
  Bacterial polypetide isolated from the Sargasso Sea
MSKDIFLTNSFGNKKEKFIPINPKKIGMYVCGPTVYDDPHIGNARPLVVFDILFKILKSIYGNDAVTYVRNITDIDDKIITSSIEKKI

SEQ ID NO: 186613 - protein, 230 aa, Unknown
  Bacterial polypetide isolated from the Sargasso Sea
KKTIFQFQNLTKKITQSFNEDCIYLNCEKPNHEPKATEHISEMVEMISELIKKEFAYENKNHVYFEVKKFKDYGQLSNKNLDELVAGSRIEVSENKKNPEDFVLWKPSEIDEPSWDSPWGKGRPGWHLECSAMSKKYLGKEFDIHGGGVDLLFPHHENEIAQSRCANDSKVFAHYWLHNAFITMSNEKMAKSQGNILKIKDFRNTKSGQVLRLALLSAHYRQPLDGTISF

SEQ ID NO: 186614 - protein, 258 aa, Unknown
  Bacterial polypetide isolated from the Sargasso Sea
MDIFLTNNLTNKKEQFIPIQKENIGMYVCGPTVYDDPHIGNARPLVIFDILFKILKNNFSKVTYVRNITDIDDKIILSSQKLKISTKELTEKITKSFFEDCKFLNCENPTHQPKATEYIDIMIQMINDLILKGYAYENNKHVYFEVKKFSEYGKLSNKKLEDLIAGSRVEISDNKKNSEDFVLWKPSIKDEPSWDSPWGPGRPGWHLECSAMSKKLLGNEFDIHGGGIDLIFPHHENEIAQSRCANDTEVFSNFWIHN

SEQ ID NO: 186615 - protein, 76 aa, Unknown
  Bacterial polypetide isolated from the Sargasso Sea
MSKDIFLTNNLTNKKEKFVPIDKSNIRMYVCGPTVYDDPHIGNARPIVVFDILFKIFKKNYPKVTYVRNITDVDDK

SEQ ID NO: 186616 - protein, 224 aa, Unknown
  Bacterial polypetide isolated from the Sargasso Sea
MKWPSPWGIGFPGWHLECSAMGAKYLGDQFDIHGGGMDLKFPHHECEIAQCVSAHKKNPVNYWMHANMLTLNGKRMSKSTGNTLLPEDIFSGENAILNKAFSPMVVRFFMLQAHYRSILDFSSEALSASEKGFNKLMQANLLLQKAIYSKATLDKQLETKVVDLINGCYKHMNDDFNTPLTIATLFELVAIINTLNSTNSFGTLSEKVFNSLQNTMNGFIIDVL

SEQ ID NO: 186617 - protein, 299 aa, Unknown
  Bacterial polypetide isolated from the Sargasso Sea
MVTIRFTYIRNITDIDDKIIQAAKEKKISIKDLTNNTNKNFQDDCKYLNCEDPTFQPRATENINEMIEMIKSLISKNYAYESNNHIYFEVKKFKEYGKLSNKKIDDLMSGSRVEVSSFKKNAEDFVLWKPSKDDEPSWPSPWGKGRPGWHLECSAMSKKYLGLKFDIHGGGRDLIFPHHENEIAQSRCANETDVFSNYWVHNGFITLSNEKMAKSQGNILKISDFKKTINGQALRLALISTHYKQPLDWNEKLLEESQKTIDKWYKSYVKIDKQKLISDEDLYPLYDDLNTPKVYSQSS

SEQ ID NO: 186618 - protein, 157 aa, Unknown
  Bacterial polypetide isolated from the Sargasso Sea
LSNSLGNKKEKFIPINVNKIGMYVCGPTVYDDPHIGNARPLVVFDILYKILKCKFGVSKVTYVRNITDIDDKIIEASIEKKISIKNLTKDITQKFHEDCSYLNCEKPSYEPMATENISLMIEMIGKLLKKGFAYENNNHVYFQVKKFNKYGDLSNKN

SEQ ID NO: 186619 - protein, 284 aa, Unknown
  Bacterial polypetide isolated from the Sargasso Sea
ADFALWKISSDEASCNSPWGKGRPGWHIECSAMSRDYLGKNFDIHGGGLDLKFPHHENENAQSKCNHDGLFANFWLHTGPLTIEEEKMSKSLGNFVTIKDILKKYHPEVIRFFLFSTHYRNPLNFSFHGLEESKKTLDKFYDALRKVDLSDTKNIPLDEGVIESLKDDFNSPKLISFLHKILDKLNQSFLNNKNESKSTADLLISSGSVMGLFQSKPDEYFKFISSEVLVTEEEIEDLITERNLARNQKDFIKSDKIRDDLKAKGINLEDFGEKTIWKRMTLDE

SEQ ID NO: 186620 - protein, 275 aa, Unknown
  Bacterial polypetide isolated from the Sargasso Sea
EPKATENISLMIEMINKLIKNKFAYEINNHVYFEVKKFKDYGKLSNKNLDELIAGARVEVSENKKNPADFVLWKPSTENEPSWDSPWGKGRPGWHLECSVMSKKFLGDKFDIHGGGMDLIFPHHENEIAQSRCANENETFANYWVHNGFITIASEKMSKSQGNILKIGDFKNKVSGQVLRLALISAHYKQPLDWNEKLLSECEKTINKWYESYTDIKKQVLIPEDYLSPLYDDLNTPGYIANLHKLFDKSQKGSIKDKEIFVSACNFIGLLNENK

SEQ ID NO: 186621 - protein, 248 aa, Unknown
  Bacterial polypetide isolated from the Sargasso Sea
MIENLIEGEFAYESEGHVLFHVPSDPNYGSLSKRSLEDMLAGARVEIASYKKDPKDFILWKPSSSDLPGWDSPWGRGRPGWHIECSAMIQKHLGVHIDIHGGGSDLTFPHHENEAAQSRCANRSKDYVNYWLHNGMITLANEKMSKSLGNILGIRALLKKHSGEVLRYALLSGHYRSSLSWSDDLIQQAKSSLDSLYQTLRDHSQTAALRSVPIDSSLECDHEFELALCDDLNTPKALAALHRISDET

SEQ ID NO: 186622 - protein, 275 aa, Unknown
  Bacterial polypetide isolated from the Sargasso Sea
MRPDSMPRATNHICNICSFITILEDKGYAYSRDGDVYYSVFKNKNYGKLSNQNIQEQNINQQGRMANDENSKKLNPQDFALWKKAKDDEPFFDSPWGKGRPGWHIECSAMVKDELGDTIDIHLGGSDLIFPHHENEIAQSEAANGKKLANYWLHNGMVNVNGQKMSKSLKNFKTIRELINSGISPMTLRYFVMTVNYRKPLDFTEEALRSASEAWKNINVALSFMDLTKGAFRSIDKNEYIEEEYKEKISFELSQKKLKFSEALENDLNTAGAIA

SEQ ID NO: 186623 - protein, 283 aa, Unknown
  Bacterial polypetide isolated from the Sargasso Sea
VFDFLIRYLAFLDYEVNFVRNITDIEDKIIERAVEEGITTKELADRVTKEFQDAYASLNCLHPDREPKATETIDHIINFIEVLIENGYAYATQSGVYFEVTKFKDYLKLSGRNKEEVISGTRVDLESDKKNTEDFALWKISKENEPKWNSPWGDGRPGWHIECSAMIDKIFDSGIDIHCGGNDLIFPHHENELAQSSAAFENQVFVKYWLHNGMINLSGQKMSKSEGNIKLLNEYIDKFGGNVIRFFFLRSHYRKPQEFSEDLLEESKTTFKRIQDFTSSVEA

SEQ ID NO: 186624 - protein, 209 aa, Unknown
  Bacterial polypetide isolated from the Sargasso Sea
MTKNLNFFNTLSNKKEKFIPINNDKVGMYVCGPTVYDFPHIGNARPLVVFDVLFRLLKNLYGKNKVTYVRNITDIDDKIIQSSKKNKKSIKELTETITKSFHEDCKYLNCLSPTFEPKATQHIKEMINMVSNLLKNNHAYENEKHVYFSVSSFKNYGKLSNKNSEQLVAGSRVEVSKYKKDPLDFVLWKPSDENDPGWDSPWGRGRPGW

SEQ ID NO: 186625 - protein, 258 aa, Unknown
  Bacterial polypetide isolated from the Sargasso Sea
MIKFYNTIDRKKVNFMPMVDGKISLYTCGPTVYNFAHIGNFRAYIFEDLLRRTLEFCDYEVLHVMNLTDIDDKTINKANLEKIPLKEFTDKYIAAFYEDVEALNILPAHHYPRATEFIDGMIGMIQDLESKGYTYTTEDGSVFFKISQYKDYGRLANLQVEDLLLGERVENDEYEKEEMRDFALWKSYKKEEGDIFWESPWGKGRPGWHIECSVMSTHYLGNHFDIHCGGVDNIFPHHENEIAQSCCATDEKFVNYWL

SEQ ID NO: 186626 - protein, 202 aa, Unknown
  Bacterial polypetide isolated from the Sargasso Sea
WHIECSAMSMDALGETFDIHGGGLDLKFPHHENEIAQSECATNKEFARYWMHTGPLRIEDEKMSKSLGNYITIKDALRNFSSEALRFFLLSTHYRNPINFKESSVKEAQVSLNKLYTSLAGLDLDKEISLSTNKSKKEFMKVMDDDFNIPGSLAVLFNLSKEINVKKDNGDIEEAIALAKELIDIAEPLGILQQNPEDYLKT

SEQ ID NO: 186627 - protein, 292 aa, Unknown
  Bacterial polypetide isolated from the Sargasso Sea
RAAERGISITDLCEETIKIFHQDTRRLGALDPDIEPRATHHIEEMQAMITILVEKGHAYEADGHVLFQVSTMGAYGALSKRSMDDMIAGARVEVAPYKREAGDFILWKPSIGDQPGWNSPWGWGRPGWHIECSAMAKAYLGEVFDIHAGGLDLIFPHHENEIAQSCCAHDSKHMAHYWLHNGFVTMNDEKMSKSLGNIISVTDAADKYRGETLRAALLSSHYRAPLDLSDDAMRDARNGLDRLYRAVGESTAIPDRVDKEFAAHLLDDLNTPAAFARLHELARLANKREIGA

SEQ ID NO: 186628 - protein, 188 aa, Unknown
  Bacterial polypetide isolated from the Sargasso Sea
MKNNQLNLSNTISGKKETFIPIDPKKIGMYVCGPTVYDFPHIGNARPLVVFDILYRVLSKIFGKKNITYVRNITDIDDKIIESSKNKKIPINKLTSEITKSFHDDCEYLNCLKPSFEPKATEHIKGMILMIENLLMNNYAYEQDNHVYFSINSFKNYGKLSKKNPEELVAGARVEISKSKKHPLDFVL

SEQ ID NO: 186629 - protein, 244 aa, Unknown
  Bacterial polypetide isolated from the Sargasso Sea
EPSWDSPWGKGRPGWHLECSVMSKKFLGDKFDIHGGGIDLIFPHHENEIAQSRCANENEIFANYWVHNGFITISSEKMSKSQGNVLTIDDLKNKVNGQVIRLALISAHYKQPLDWNEKLLSESEKTINKWYESYTELKKQVLIPQEYLSPLYDDLNTPGYIANLHKLFEKSQKGSAKDKEIFVSACNFIGLLNEDKKIWEKFKQSKSKISKEEIEKKIEERNIARKNKDYNAADNIRDELLDKG

SEQ ID NO: 186630 - protein, 259 aa, Unknown
  Bacterial polypetide isolated from the Sargasso Sea
SGRPGWHIECSAMISKHLGQTIDIHGGGSDLTFPHHENEAAQSRCANDSPDYVRYWLHNGMLNLGAEKMSKSLGNVKTIRDLCSKHSGEVLRYALLSGQYRSRLAWSDDLVIQAKSSLDSLYQSLRDKSGSLTSSDLLINELSFDQYPKGVTEPLTDDLNTPKALAAMHDLAAVLQRAESEQEVFAATQMLLAGGRLLGLLDQEPETYFKQGSKEASLSEDEIENLIQERHAARAEKNFQRADEIREELSNLGVELEDL

SEQ ID NO: 186631 - protein, 175 aa, Unknown
  Bacterial polypetide isolated from the Sargasso Sea
DAETVRYFLLSGHYRSQINYSEENLKQARAALERLYTAIKDVDLTVTAAPAEEFVAKFKAAMDDDFNTPEAYSVLFDMVREINRLKTTDMAQASAMAVAMKQLADVLGLLHQTPDSFFKGEGSDDEVAEIEALIVERNRARAEKDWPAADVARNRLNELGVVLEDGPSGTTWRKK

SEQ ID NO: 186632 - protein, 304 aa, Unknown
  Bacterial polypetide isolated from the Sargasso Sea
MLKLYNSYSNSIEKIDLNKREVKIYLCGPTVQSSPHLGHGRSAVVFDFFVRYLKYLKYNVIFVRNITDIDDKIIEKSFEENISYKELAMRVSKEFDYAYQKLNCIKPDEEPRATEFIKEIISYIETLIKNEYAYITKSGVYYDISKFDEYLLLSGRTKNEVISGTRVELEEDKNSPEDFALWKFSKENEPYWESPWGNGRPGWHIECSSMIEGILGKTIDFHCGGNDLIFPHHENEIAQSKGAHPKEQFVKYWLHNGMLNLSGKKMSKSDGNVKLLNEYIDEFSGPILRFFFLKSQYRSPQELM

SEQ ID NO: 186633 - protein, 281 aa, Unknown
  Bacterial polypetide isolated from the Sargasso Sea
FEPRATEHIKGMISMTENLLNNKHAYEKDKHVYFSVNSFKNYGKLSNKKPDELEAGSRVEISRLKNNPLDFVLWKPSSTDDPGWDSPWGRGRPGWHLECSVMSEKFLGKNFDIHGGGLDLVFPHHENEMAQSCCANETDKFANYWLHNGYVTFNKEKMSKSVGNIVTIQKMREKINGQVIRFALLSTHYKQPLDWNEKLINESQNTLDKWYSLFEKIGENELSDDLLQPLLQDLNTPGYISKLHSLYDKASKGDKYSKKLFLTGCNAIGLLEEDLKSWGKI

SEQ ID NO: 186634 - protein, 250 aa, Unknown
  Bacterial polypetide isolated from the Sargasso Sea
IECSSMVLNTIGDTVDIHGGGIDLIFPHHENEIAQSESLNGKKFANIWMHNGMVKIQGEKMSKSLGNLIKLKDAIQIFGVDLLRMWILSSHYRKPLLYDEKIINSFSKPLKRIKDAKNLMPITSEKKLDSKKEFDEFNLALSNDLNTSVALSQIISLSKKINNSKNELDISFAQNDLNKMLEITGLCQNIEDENNNKNIFIDIEVEQLLEKRNNYRKNKEFIKADEIRNQLLKKGIEIVDNGFNSTWKKV

SEQ ID NO: 186635 - protein, 269 aa, Unknown
  Bacterial polypetide isolated from the Sargasso Sea
DKSQPGWDSPWGVGRPGWHTECSAMSKKTLGLPFDIHGGGRDLIFPHHENEIAQSCCSSANIEDPTSYAKYWMHNGFVTIDGEKMSKSLGNIILVNELTESHHGEVIRLALLSSHYRQGLDWNEKIIHQASILLDKLYEIKFLLNGENIKHSSETNLEPIAYLADDLNTPGLIAELHKLVKDFNTSNSNKSEIKIHLNLISQALGILQDDSYKKISEELESKIHALILKRKVAKDNKDYELADKIRNELLDLGVEIKDTSSGTDWNLKS

SEQ ID NO: 186636 - protein, 238 aa, Unknown
  Bacterial polypetide isolated from the Sargasso Sea
EHIKEMIVQINELIANGHAYEEEGHVLFNVSTFPKYGTLSGRDKDQQIAGSRVEVANYKNDPLDFILWKPSEEGQPGWDSPWGFGRPGWHLECSAMSQKTLGVPFDIHSGGQDLIFPHHENELAQSCGANGGVEDSSSYARYWVHNGMIRFDGDKMSKSLGNILYINDILKEYDGEVLRYVLLSTHYRQPLNWSERSLKQAKTSLDRLYRILKNNKNVLTKDVDPAKEIINALCDDIN

SEQ ID NO: 186637 - protein, 277 aa, Unknown
  Bacterial polypetide isolated from the Sargasso Sea
KKLIRKGYAYLQDDGSVYFNINSYKKYGQLANLAFSNQQKTNRILNDEYNKDDPQDFALWKSWKKEDGDIYWESPWGKGRPGWHIECSVMSNEILGDHFDIHCGGVDNIFPHHENELAQSRCSSGKKFVNYWLHSEHLLIDGGKMSKSAGTLKNISELIRLGYSPESIRYLLLSGHYRTKISWSESKKREGERIVKRLSEFKMRLFEKGADSLGDKNYPKEYYDFIDKLDDDLDAPGALAVFFKWMRMQNEKLRNKIEDPNALSQAWSFLSAFDSIL

SEQ ID NO: 186638 - protein, 263 aa, Unknown
  Bacterial polypetide isolated from the Sargasso Sea
TFRRNDPGAGTHHGGKGRPGWHLECSVMSEKFLGKQFDIHGGGLDLVFPHHENEIAQSCCANKTEKFANYWLHNGFVTYDKEKMSKSVGNIVTINKLKQNINGEVVRLALMSAHYKQPLDWNEKLLMESQNTLDKWYEQFEKIEKHELKDDVLNPLQEDLNTPEYIAKLHSLFDEANKGKKSSKNQFLSACHQIGLLEDKQSWENFKKSKVKVDENFINNKIKDRNEARKKGNYKLADTLRKELEEAGVIIEDKQDNTKWKYK

SEQ ID NO: 186639 - protein, 252 aa, Unknown
  Bacterial polypetide isolated from the Sargasso Sea
EASKNKKINISYLTKNVTEKFHEDCKILFCLNPTKEPRATDHVEGMISMTKKLIEKNAAYEKEGHVFFSVASFKKYGKLSNKNPEDLKAGARVEVSKLKKDPLDFVLWKPSDNNDPGWDSPWGRGRPGWHLECSVMSEKYLGKNFDIHGGGLDLIFPHHENEIAQSCVYNETDKFANYWVHNGFVTMNKEKMSKSLGNITTIEDATKKYSGQVVRLSLLSAQYKQPLDWNNDLLMEQSKTLDKWYSLYSSEV

SEQ ID NO: 186640 - protein, 319 aa, Unknown
  Bacterial polypetide isolated from the Sargasso Sea
EPPTMNPFATKHIPEILDMMKVLIRKGFAYVSEKHVLFSVSSMPSYGQLSGKSLQDLTIGARVEIGKYKRDANDFVLWKPSKKGEPAWDSPWSRGRPGWHIECSAMAQKHLGVTVDIHGGGLDLLFPHHENETAQSCCANGGKPLANFWMHNGFIQLDGQKMSKSLGNFKLVCDLLEHYPGEVLRYVILSAHYRSEQQFNASLLESAKRSLDTLYRCLQSTESLDNIVVDLSTNSGFLALLDDLNTSESISELHALARQTKQGPKKKRVMARGKLLSLANMLGLLQQNPDEWFKKAHDPDALSQQEIEEAILLRQQAKE

SEQ ID NO: 186641 - protein, 287 aa, Unknown
  Bacterial polypetide isolated from the Sargasso Sea
FDLLFRILIELYGEKKVTYVRNITDIDDKIIEASKNKKINISDLTKTVIDKFHKDCKNLFCLNPTKEPRATEHVNGMINMAKKLIEKNAAYEKEGHVFFSVASFKKYGKLSNKNPNDLKAGARIEVSKLKKDPLDFVLWKPSDNNDPGWDSPWGRGRPGWHLECSVMSEKYLGKNFDIHGGGLDLIFPHHENEIAQSCVYNETDKFANYWVHNGFVTMNKEKMSKSLGNITTIEDATKKYSGQVVRLSLLSAQYKQPLDWNNDLLMEQSKTLDKWYSMYSSEVSEKT

SEQ ID NO: 186642 - protein, 273 aa, Unknown
  Bacterial polypetide isolated from the Sargasso Sea
IPDILYRLLLSYYPGDVVYIRNITDVDDKILKAANEQGVKPTEISEKFTDVYLNNMAQLNILHPTHQPKVTEFMDSIISMIHKIIDSGHGYVENNHVLFNTEKDNNYGCLSRKKLDEMIDGARVEVAEYKKSPRDFVLWKPSDNDSFGWDSPWGYGRPGWHIECTSMIKKIIGDHCTLDIHGGGNDLIFPHHENEIAQGSCISTSKYCNYWFHNGIVLVNKKKMSKSLGNVILLDDLLKEHNSSVIRLALLSAQNRQPLNGQNKLLSMRKICI

SEQ ID NO: 186643 - protein, 225 aa, Unknown
  Bacterial polypetide isolated from the Sargasso Sea
MNKDIYLTNSLGNKKEKFIPINEKNIGMYVCGPTVYDDPHIGNARPLVVFDILYKVLKCKYGKKNVSYVRNITDIDDKIIKASNEKSISIKELTENITKRFHDDCNYLSCDVPTNEPKATDNVSLMIEMINDLINKKYAYLNKKHVYFEIKKFKDYGKLSNRNIDELIAGSRVEVSDNKINNEDFVLWKPSNNNEPSWDSPWGPGRPGWHLECSVMSKKYLGKKF

SEQ ID NO: 186644 - protein, 230 aa, Unknown
  Bacterial polypetide isolated from the Sargasso Sea
MNSLKLTNSLTKKKEVFKPNNTKKISLYACGPTVYESPHVGNARTLVVFDVLFRVLKVLYNSNVTYVRNITDVDDKIIEASQNHKEDINEITNRVIKIFHENCKSLNCLKPTIEPKATEHVKEMIEMTSSLIKKGFAYENKNHVFFAVSKFKDYGKLSNKNLDELKSGSRVEISDLKKNPMDFVLWKPSKEKDPGWESPWGRGRPGWHLECSAMSEKYLGKNLDIHGRRS

SEQ ID NO: 186645 - protein, 316 aa, Unknown
  Bacterial polypetide isolated from the Sargasso Sea
MEDGKVKLYTCGPTVYDYSHVGNFRTFLFEDLLKRVLIAFGFEVKHVMNITDVDDKTISKSTQQQIELKDLTQRYTNAFMKDIEFLRILKADEYPNATDHVDEMILMIQALIDKEHAYISKDGSVFFKIDSCSDYGVLVNIEKSDNSHRYEISDEYSSDSANDFALWKSYKKDDGKIYWDSPWGKGRPGWHIECSAMATKYLGDHFDIHCGGVDNKFPHHENEIAQSTCALETPFVNYWLHSEFLMVEGSKMSKSLNNFYTISDIYDNGFTPEEFRFLILSAHYRSRVNFSLNRRKEAKSAIKRITETQDRLSIIS

SEQ ID NO: 186646 - protein, 196 aa, Unknown
  Bacterial polypetide isolated from the Sargasso Sea
HIKEMIELIEKLIDENKAYEKEGHVLFHVPSFDNYGILSKRNRDEQIAGSRVEVAPFKKDPADFILWKPSPSPLPGWDSPWGFGRPGWHLECSVMSEKSLGLPFDIHSGGIDLVFPHHENEIAQTCSISENKDPKDFATYWFHNGFVNVEGEKMSKSIGNIRLVHDLNKKYKGEVLRLTLLSAHYKQPLNWTEEII

SEQ ID NO: 186647 - protein, 187 aa, Unknown
  Bacterial polypetide isolated from the Sargasso Sea
MNKDIFLTNSLGNKKDKFIPIDPKKIGMYVCGPTVYDNPHIGNARPLVVFDILFKILKCKYGKNSVSYVRNITDIDDKIISSSIEKNISIGDLTKNITNIFHQDCKYLNCEAPTKEPKATENILLMIEMINKLIQNKFAYEINNHVYFEVKKFKDYGKLSNKNLDQLIAGARVEVSENKKNPADFVL

SEQ ID NO: 186648 - protein, 231 aa, Unknown
  Bacterial polypetide isolated from the Sargasso Sea
MSKDIFLTNSFGNKKEKFTPINTKKIGMYVCGPTVYDDPHIGNARPLVIFDILFKILKLKFKDSSVTYVRNITDVDDKIITSSKEKKISISELTKKITNNFHQDCEYLFCEKPTKEPKATENIDLMIKMISDLISKGFAYEKKNHIYFEVKQFKDYGKLSNKQLDDLVAGSRVEVSDNKKNPADFVLWKPSLDDEPFWPSPWGNGRPGWHLECSVMSKKFLDNEFDIHGGG

SEQ ID NO: 186649 - protein, 254 aa, Unknown
  Bacterial polypetide isolated from the Sargasso Sea
KLSNQSTEAMLSNTRIELNPNKKNDLDFALWKNAKPDEPSWESPWGKGRPGWHIECSAMSCKYLGEQFDIHGGGRDLIFPHHENEIAQSECISNKNFANYWIHNGLININKEKMSKSIGNIVNIKDALERWNKNLIRIFFLSHHYRTPVDLSEEKLIEVEKSLKKLSKKITQSKADESDDFEKAWKKCMSDDFNTAKAFGIFFKYANEGKLSLNNSKNLEEFENVMGISGWRDIISENKNIEINQDEIESIIPK

SEQ ID NO: 186650 - protein, 255 aa, Unknown
  Bacterial polypetide isolated from the Sargasso Sea
WASPWGRGRPGWHLECSVMSEKFLGKNFDIHGGGLDLVFPHHENEIAQSCCANKTDRFANYWLHNGYVTFNKQKMSKSLGNIVTIEKMRGTINGQVIRLALLSAHYKQPLDWNEKLINESQNTLDKWYTQFEKITENDLDENLLKPLLEDLNTPAYISKLHLLYDKASKGDKSSKRLFLSGCKLIGLLEEDLETWKKFKKIKSSIDEKTIKNKIKDRENARKKGDYKLADNIREDLENNGVIIEDKGDKTNWKYK

SEQ ID NO: 186651 - protein, 90 aa, Unknown
  Bacterial polypetide isolated from the Sargasso Sea
MNKDIYLTNNLTNKKEKFVPIDKNNVGMYVCGPTVYDDPHIGNARPLVVFDILFKILKSKFSSVSYVRNITDVDDKIIKSSNEKNISIKD

SEQ ID NO: 186652 - protein, 292 aa, Unknown
  Bacterial polypetide isolated from the Sargasso Sea
FYVCGPTVYDYAHIGNARPIVVFDVLFRLLQRLYPKVTYVRNITDIDDKINARSAETGEPISEITTRTTAQFHEDIAALNALPPTVEPRATDHVAEMIVMIEDLIAKGHAYEADGHVLFNVLSWDAYGRLSRHSRDELVAGARVDVAPYKKDAADFVLWKPSTENLPGWDSPWGWGRPGWHIECSAMASKYLGDIFDIHGGGQDLIFPHHENEIAQCLCDKPSERFSKYWMHNGYLMSEGEKMSKSLGNFYTINELLQEYPGEAVRLLLLKTHYRQPLDFTKSGLDEAKREL

SEQ ID NO: 186653 - protein, 214 aa, Unknown
  Bacterial polypetide isolated from the Sargasso Sea
MVINNIGETVDIHGGGIDLIFPHHENEIAQSESLTGKKFANIWMHNGMVKLSGEKMSKSLGNLITVREALKEFDSDQIRMWILSSHYRSPLIYSKEIISSQSRPLSRLRESLKNVENNNTENTDYAKEKEIFINALSSDLNTPVALSQVLLLSKKINSGNNKGHDTREARKTLNTMVSVLGLCQSKKDLKNDIDDIEIRELINKRETYRKSKEF

SEQ ID NO: 186654 - protein, 272 aa, Unknown
  Bacterial polypetide isolated from the Sargasso Sea
SEIKNNQRDFVLWKPSTGKTPGWDSPWGFGRPGWHLECSAMAKKYLGRTLDIHGGGSDLLFPHHENECAQSMCSHSGEPLANYWVHNGMIDFDNVKMSKSEGNLLLIRDLLNEIRPEVIRMAFLTTHYRKPINWNDALISDSEKKLDRLYGSIRKLGKISPAEPSEEVMNAIADDINTPKALSELFAIVKNINNAKSDEESRQLASILIGSAHLLGLMNEDAEMWFENIDIDEALIDRLLTEREAARSNRNFERADQIRQEIESLGVTIEDG

SEQ ID NO: 186655 - protein, 318 aa, Unknown
  Bacterial polypetide isolated from the Sargasso Sea
EYPNVTYVRNITDVDDKIIKSAKENKISFSVLTKKITQSFNEDCIYLNCEKPNHEPKATEHISEMIEMISELINKGFAYANQKHVYFEVKKFKDYGQLSNKKLDELVAGSRIEVSENKKNPEDFVLWKPSEPEEPSWDSPWGKGRPGWHLECSAMSKKYLGKEFDIHGGGVDLLFPHHENEIAQSRCANDSKVFANYWLHNAFITMSNEKMAKSQGNILKIKDFRNNKSGQVLRLALMSAHYRQPLDWNDKLLEDCENTISKWYNVYLNIEKKIQISDQILKPLFDDLNTPGYIANLHKLYEQASKGSDEDRDYLFLH

SEQ ID NO: 186656 - protein, 208 aa, Unknown
  Bacterial polypetide isolated from the Sargasso Sea
MNKDIFLTNSFGNKKEKFVPINKNKVGMYVCGPTVYDDPHIGNARPLVVFDILYKVLKCKYGKKSVTYVRNITDVDDKIIQSSTEKKISIEDLTKKITANYHNDCDYLKCEKPNEEPRATENISLMIKMTENLIKKNYAYVNNKHVYFEVKKFKDYGKLSNKNLEELIAGSRVEISENKKNPEDFVLWKPSKENEPSWDSPWGKGRPG

SEQ ID NO: 186657 - protein, 292 aa, Unknown
  Bacterial polypetide isolated from the Sargasso Sea
SSRVDKNHSKKHNNDFALWKISKEGEPFWDSPWSKGRPGWHIECSAMVKKHLGDQIDIHGGGMDLIFPHHENEIAQSECFSSKKPFVKYWMHNGMLRVKGAEMSKSLGNTFSINEALKRFSSDAIRLWILQTHYRTNPLLDLDLIKSTEKSLTRLRLINSELKSKPELKKMNFISFKQRFIESMDDDLNTPKAIATIFDLAKMIKKSSSTHDVSQGLILFRELSNILGLNYKKLIKDKVANDVNINEIELMIEERNQARSDKNWKEADLIRDKLLELGIEITDTTEGTKWKK

SEQ ID NO: 186658 - protein, 257 aa, Unknown
  Bacterial polypetide isolated from the Sargasso Sea
SESQPGWESPWGIGRPGWHTECCVMSEVNLKIPFDIHGGGQDLLFPHHENEIAQSCASVNSDNPEDYAKYWIHNGFVTIDGEKMSKSLNNIILLNDLLKEHDGETIRLALLSSHYRKSLDWNENVIKQSKVLLDKVYDFLVTYDDDPEGEIDESLIENFSNDLDIPKVLTSINELLKNKNSSNPRTIKQSLLFAGSILGVFNKKPSEWNMQIEMSKSEMAEIEKLINERKTLKENKDFIGADAIRDSLLEKGIELID

SEQ ID NO: 186659 - protein, 151 aa, Unknown
  Bacterial polypetide isolated from the Sargasso Sea
MDKDIFLTNSLGNKKEKFNPINSKKIGMYVCGPTVYDNPHIGNARPLIVFDILFKVLKCKYGNKEVTYVRNITDIDDKIIKSSLEKNISIGDLTKKITKIFHEDCKYLNCEVPSHEPKATENISLMIEMISKLIKNGNAYESKQHVYFDVN

SEQ ID NO: 186660 - protein, 277 aa, Unknown
  Bacterial polypetide isolated from the Sargasso Sea
SGITKVFHNDCESLNCLKPTKEPKATEHINEMIQMTSSLIKKNFAYENNGHVYFSVSSFKNYGKLSNKNLDELKAGSRIEVSGLKKNPMDFVLWKPSNKEDPGWDSPWGRGRPGWHLECSVMSEKYLGKIFDIHGGGLDLIFPHHENEIAQSCCNNSTKNFANYWVHNGFVTINNEKMSKSLGNIISISDAVNKYSGQVVRLALLSAHYSQPLDWNDDFLNNQKNTIDKWYSLYDEQNDEKISDIVEVLLDDLNTPGFIAKIHELYNKANSGDKKKI

SEQ ID NO: 186661 - protein, 253 aa, Unknown
  Bacterial polypetide isolated from the Sargasso Sea
PWGKGRPGWHLECSAMSKKFLGDEFDVHGGGIDLIFPHHENEIAQSRCANGTKAFANYWLHNAFITMSNEKMAKSQGNILKIKDFRNKISGQILRLALMSAHYKQPLDWNDKLLEDCQNTINKWYNVYLDSKNNTDISDEILEPLYDDLNTPGYIANLHKLYEKAQKGDDNDKAIFVSACRFVGLLNQNKEEWLSLKKSKASISEEEILKKIDERNKAREKKNYEEADKIRNELSDKGVLIEDKDGKTIWKFK

SEQ ID NO: 186662 - protein, 258 aa, Unknown
  Bacterial polypetide isolated from the Sargasso Sea
DPGWHSPWGRGRPGWHLECSVMSEKFLGKQFDIHGGGIDLIFPHHENEIAQSCCANRTEKFVNYWLHNGFVTINKEKMSKSIGNIVTINKLKETVNGQVVRLALLSSHYKQPLDWNEKLIMESQNTLNKWYSQFEEINYEELNDDIIKPLQEDLNTPEYIAKLHSLYDSSSKGDKSSKLKFLSGCKQIGLLEENKQTWENFKKIKSKVDVNFIEQKIKDRNNARNKGDYKLADTIRNELENNGVIIEDKQNKTIWKYK

SEQ ID NO: 186663 - protein, 156 aa, Unknown
  Bacterial polypetide isolated from the Sargasso Sea
MDIFLTNNLTNKKEQFIPKDREKIGMYVCGPTVYDDPHIGNARPLVVFDILFRLLKNNFSKVTYVRNITDIDDKIIKSSQEQKISTKELTEKVTSSFLKDCEFLNCENPTHQPKATEHIDLMIEMITELIEKGFAYENQKHVYFEVNKFADYGKLS

SEQ ID NO: 186664 - protein, 301 aa, Unknown
  Bacterial polypetide isolated from the Sargasso Sea
KIYNENLNELGIDPPDFQPRATEHIPEMIDQIKALIKNGHAYKAEGHVLFSVNTFLGYGSLSGRDKEEQIAGSRVEVAPYKKDPIDFILWKPSIEDQPGWDSPWGFGRPGWHLECSAMSEKTLGVPFDIHTGGQDLLFPHHENELAQCCGVHNNLDNISSYARYWIHNGMIRFDGDKMSKSLGNIQFINDLLNDHNGETLRLVLMSTHYRQPLNWSAKTIDQSKKTLDRLYRTIKSLNISLDDTNAKPAQEVIDALCDDLNTPEALGQFNLLMKDLENSERSQKEEKLSIIISTARILGIL

SEQ ID NO: 186665 - protein, 263 aa, Unknown
  Bacterial polypetide isolated from the Sargasso Sea
MALRLTNTLSREKEEFIPINPEQVQMYVCGPTVYDFAHIGNARPVVIFDVLYRLLQFLYPSVTYVRNITDVDDKIIAAGQISGEKIENITQKYIKYFHADMLALNALPPDVEPRATEHINEMLEMIKSLLDNNHAYEADGHVLFSVAAMEDYGKLSRHSREELVSGARVEVAPYKEDPADFVLWKPSDDDQPGWNSPWGRGRPGWHLECSAMSAKHLGTTFDIHGGGQDLIFPHHENEIAQSVSCNKGAPFVKYWVHNGYLTV

SEQ ID NO: 186666 - protein, 274 aa, Unknown
  Bacterial polypetide isolated from the Sargasso Sea
ILKNKYGSSHVNYIRNITDIDDKIIKASNDQNISINDLTSKITENFHEDCNYLKCETPNNEPKATENIKQMIEMITELEKKGFAYSKDKHVYFEVKKFSDYGKLSNKKLDELIAGSRVEVSEIKKNPEDFVLWKPSTDKEPSWDSPWGKGRPGWHLECSVMSKRYLGEEFDIHGGGRDLIFPHHENEIAQSRCANETNSFANYWVHNGFITLSNEKMAKSQGNILKIKDFKNKYNGQVLRLALISAHYRQGLDWNEKLISECEKTLSKWVFSLF

SEQ ID NO: 186667 - protein, 257 aa, Unknown
  Bacterial polypetide isolated from the Sargasso Sea
MIQGLIDKSHAYENQGHVFFSIDTFNDYGFLSNRSEEEQISGTRIKPSEIKKNQKDFVLWKPSTGDTPGWDSPWGFGRPGWHLECSAMAKKYLGKTLDIHGGGSDLLFPHHENECAQSMCSHSGKPLANYWIHNGMIDFDNVKMSKSEGNLLLIRDLLKQIGPEVIRMAFLTTHYRKPINWNDALITDSEKKLDRLYGSIRKLGKVSPAEPTEEMINALADDINTPKALSELFAIAKRVNNAKSENESKQLASTLVG

SEQ ID NO: 186668 - protein, 90 aa, Unknown
  Bacterial polypetide isolated from the Sargasso Sea
MTLKLYDTYSNEKKLFKPIDASNVRMYVCGPTVYSFPHIGNMRPVIIFDLLYRLLIHTYGKEHVTYVRNITDIDDKIIEEANSQKITIEK

SEQ ID NO: 186669 - protein, 254 aa, Unknown
  Bacterial polypetide isolated from the Sargasso Sea
WGLGRPGWHIECTSMIKNIIGIDSTLDIHGGGNDLIFPHHENEIAQGSCVSSAKYCNYWFHNGIVLVNKKKMSKSLGNVILVDDLLKKHDSGTIRLALLSAHYRQPLNWTDSTIVEAGNLMKKFKALAKSGNFDTRNSDQTEKEIVDILSDDLNTPEAIKYLSSLAKSARKNKDDLKKLVISAKFIGLDLLRKEKVIVHENINKKEIEKLIQERLESRLKGDYEKADKIREKLLSMKIHIKDLEGTTVWDYNPD

SEQ ID NO: 186670 - protein, 284 aa, Unknown
  Bacterial polypetide isolated from the Sargasso Sea
QILLEKGKAYKHDDGSVYFKISSFQDYGKLSNIKINKKKLNNRIISDEYDKNNVQDFVLWKAWKVDDGNVYWDSPWGKGRPGWHIECSAMSKATLGSHFDIHCGGVDNIFPHHENEIAQSQCANGKSFVNYWLHSEFLMINDSKMSKSSGNYYTLHDLKKMNFSPESIRYQLLSGHYRTKLLFSLRKKHESDKIIQRINDFYNHLKENGANQIEAKTYPSVYKDFQKAMNDDLNSPKAIAIFMEWMKINQKKIANNEFSKGDLGDSWRFLKIFDSIFGFIKKEK

SEQ ID NO: 186671 - protein, 287 aa, Unknown
  Bacterial polypetide isolated from the Sargasso Sea
LTKDCINSMHDDFQALGMISPDAEPRATENIDSIISLITKLIDKGHAYVSESDVYFSTESFEEYGKLSKRKLEDMLSGARIDIDLDKKNPADFVLWKKDTKGLKWDSPWGPGRPGWHIECSAMSMDALGETFDIHGGGSDLKFPHHENEIAQSECVTGKEFAKVWMHTGSLRIDEQKMSKSLKNFITIKEALNDSSSEVLRFFLISSHYRSPLNYSDEGLKEAKNSLDRLYNSLQDLSYEMDDHIPSEYSEKFHDAMQDDFNSPSAISVLFEMVKQINILKKEDQLT

SEQ ID NO: 186672 - protein, 112 aa, Unknown
  Bacterial polypetide isolated from the Sargasso Sea
MDFPTAKPLSFYDTFTRKKIPFVPLDKSNIRLYVCGPTVYDYAHIGNARPVVVFDVLYRLLKYRFPTVTYVRNITDVDDKINERAKKSGRSIKEITEETTKTFHSDMNALGA

SEQ ID NO: 186673 - protein, 132 aa, Unknown
  Bacterial polypetide isolated from the Sargasso Sea
MNKDIYLTNNLTNKKEKFVPIDKNKVGMYVCGPTVYDDPHIGNARPLVVFDILFKILKTKFSSVSYVRNITDVDDKIIKSSNEKNISIKDLTTTITKSFHEDCNYLNCENPSQEPKATEHIDLMIEMISQLI

SEQ ID NO: 186674 - protein, 264 aa, Unknown
  Bacterial polypetide isolated from the Sargasso Sea
PSNENELSWNSPWGKGRPGWHLECSVMSKRFLGNEFDIHGGGRDLIFPHHENEIAQSRCANDTKSFARYWMHNGFITMSNEKMAKSQGNILKIKDFKNKYNGQVLRLALISAHYRQGLDWNNKLIEESEKTLDKWYSVYFDLKRKICIPYEVLKPLYDDLNTPGYIANLHSLFNKSVKGTHNDKELFIASCQFIGLLHESKEQWAKIKKNKLIISEEEIIFKINERNKARDNKDYKLADKIRYELQDKGVLIEDKDGKTSWKLK

SEQ ID NO: 186675 - protein, 124 aa, Unknown
  Bacterial polypetide isolated from the Sargasso Sea
MDIFLINNLTNKKEKFVPKDKKRIGMYVCGPTVYDDPHIGNARPLVVFDILFKLLKNKFPKVTYVRNITDIDDKIIKSSQEKKISTNELTEKINKSFLEDCKFLNCDNPTHQPKATEHIDLMIE

SEQ ID NO: 186676 - protein, 252 aa, Unknown
  Bacterial polypetide isolated from the Sargasso Sea
MIKLFNTLSKKVEVFKPIDDVVKIYCCGVTVYDLCHLGHARSYIAWDILRRFLIYSDFKVKYVQNFTDIDDKILKRAKEESSSMKEVSEKNIIEFHKDMDSLGIMRPDSMPRATNHICNICSFITILEDKGYAYSRDGDVYYSVFKNKNYGKLSNQNLQEQNINQQGRMINEENSKKLNPQDFALWKKAKDDEPFFNSPWGKGRPGWHIECSAMVKDELGDTIDIHLGGSDLIFPHHENEIAQSEAANGKKL

SEQ ID NO: 186677 - protein, 80 aa, Unknown
  Bacterial polypetide isolated from the Sargasso Sea
MNRDLHLSNSLGNKKEKFEPLDIKNIGMYVCGPTVYDDPHIGNARPIVIFDLLFKVLKCKFGKETVTYVRNITDIDDKII

SEQ ID NO: 186678 - protein, 302 aa, Unknown
  Bacterial polypetide isolated from the Sargasso Sea
GNKAVTYVRNITDIDDKIIASSVEKKITIKDLTNKITNIFHDDCKYLNCENPTHEPKATENISLMVEMIGTLIKNKFAYEKNNHVYFEVKKFKDYGKLSNKNLDELIAGARVEVSENKNNPADFVLWKPSVEGEPSWDSPWGKGRPGWHLECSAMSKKFLGDKFDIHGGGRDLIFPHHENEIAQSRCANENETFANYWVHNGFITISNEKMSKSQGNILKIGDFKNNVSGQVLRLALISSHYKQPLDWNDKLLSECEKTINKWYESYIEIKKQTLIPDEYLSPLYDDLNTPGFIANLHKLFE

SEQ ID NO: 186679 - protein, 259 aa, Unknown
  Bacterial polypetide isolated from the Sargasso Sea
ALNVLPPDIEPRATEHITQMVAMITGLIEKGFAYEAEGHVLFSIEKMPDYGRLSGRSLNEMVAGARVEIAPYKAHPADFVLWKPSKAENPGWDSPWGRGRPGWHIECSAMSSDYLGVEFDIHAGGLDLVFPHHENEIAQSRCAHGTSQMAAFWVHNGYVTVEGEKMSKSLGNFTSVEDALQRHRGEVIRFSLLSAHYRAPFDFSDAALQQARTVLDKFYRAVSVADRADIITDLTLLDTEFITALADDMNTPLAISCLH

SEQ ID NO: 186680 - protein, 243 aa, Unknown
  Bacterial polypetide isolated from the Sargasso Sea
MSKDIFLTNSLGNKKEKFVPINKNKIGMYVCGPTVYDDPHIGNARPLVIFDVLFRILKCNFGEKNINYVRNITDIDDKIISSAIEKNISTNQLTKEITKNFNADCTYLKCQEPTFQPKATENIPLMIEMINKLIKTNYAYHSSKHVYFEVKKFKDYGKLSNKKLDELIAGSRVEISENKKNPEDFVLWKPSKENEPYWDSPWGKGRPGWHLECSVMSKKFLGDKFDIHGGGRDLIFPHHENEI

SEQ ID NO: 186681 - protein, 196 aa, Unknown
  Bacterial polypetide isolated from the Sargasso Sea
MNKELNIFNTLSGQKEKFVPINKEKVGMYVCGPTVYDFPHIGNARPLVVFDVLYRLLLKIFGKNKVTYVRNITDIEDKIIEASKRNKVPIDMLTTSTTKSFHDDCKYLNCFKPNFEPKATEHIKGMIAMTEKLLKSKNAYEKDKHVYFSVNSFKNYGKLSKKNLEELVAGARVEVSKSKKDPLDFVLWKPSATEDP

SEQ ID NO: 186682 - protein, 163 aa, Unknown
  Bacterial polypetide isolated from the Sargasso Sea
MNKDIFLTNSYGGKKERFQPIDENNVKMYVCGPTVYDDPHIGNARPLVVFDLLFKVLKCKYGNDKVTYVRNITDIDDKIIQSAKEKKTTIKDLTTKTNNNFQEDCDYLICEKPNFQPKATENIKVMIEMISILVEKVSHMKVRTTFISKLTNLKTMENYLIKK

SEQ ID NO: 186683 - protein, 111 aa, Unknown
  Bacterial polypetide isolated from the Sargasso Sea
MRFTNSLTSRTEAFEPIEAGKATIYCCGVTVYDLCHLGHARSYINWDVLRRYLIWRGYDVTYVQNYTDIDDKILNRANEEGSSMEEVSERNIEAFEIDMGRLNILPGRSHG

SEQ ID NO: 186684 - protein, 280 aa, Unknown
  Bacterial polypetide isolated from the Sargasso Sea
KFKDYGQLSNKKLDELIAGSRVEVSENKKNSEDFVLWKPSDSDEPSWESPWGKGRPGWHLECSAMSKKFLGKEFDVHGGGIDLLFPHHENEIAQSRCANDTKIFAKFWMHNAFITMSNEKMAKSQGNILKIKDFRNKINGQVLRLALLSAHYKQPLDWNDKLLDDCQNTINKWYNSYLEIENNYEVSDEILQPLYDDLNTPGYIANLHRLYEKAQKGNDQDKSLFVSACQFVGLLNENKGNWLKFKISNALISEKEILQKIQERNKARDNKNYEEADKIR

SEQ ID NO: 186685 - protein, 257 aa, Unknown
  Bacterial polypetide isolated from the Sargasso Sea
MENYQIEIGEEQIAGSRVEVAPFKKDPADFILWKPSDDTQPGWDSPWGIGRPGWHTECSAMSEKTLGLPFDIHGGGRDLIFPHHENEIAQSCCSSASIDDPTSYARYWMHNGFVTIDGEKMSKSLGNIILVKDLIEDHHGEVIRLALLSSHYRQGLDWNEKIIHQSKKLLDKLYAILKDLENTNQDDSIQSNKDVIGPLMDDLNTPGLIAELNKIVKEFSTIKDDEKPAVKSKLIFIGSILGILGDKNFNHVSDEFK

SEQ ID NO: 186686 - protein, 197 aa, Unknown
  Bacterial polypetide isolated from the Sargasso Sea
MIKLFNTLSKRVEVFKPIDDVVKIYCCGVTVYDLCHLGHARSYIAWDVLRRFLIYSDYKVKYVQNFTDIDDKILKRAKEESSSMKEVSEKNIIEFHKDMDSLGIMRPDSMPRATNHICNICSFITILEDKGYAYSRDGDVYYSVFKNKNYGKLSNQNIQEQNINQQGRMANDENSKKLNPQDFALWKKAKEDEPFFD

SEQ ID NO: 186687 - protein, 177 aa, Unknown
  Bacterial polypetide isolated from the Sargasso Sea
ILGVKQPDIQPKATDYIKEMINLIEKLIENSFAYEKDGHVLFHVPSFKNYGMLSGRNRDEQITGSRVEVAPYKKDPTDFVLWKPSPTPLPGWESPWGLGRPGWHLECSAMSEKTLGLPFDIHSGGADLIFPHHENEIAQTCAAHKSNDNLKSFSKYWFHNGFVNVEGEKMSKSIGNI

SEQ ID NO: 186688 - protein, 184 aa, Unknown
  Bacterial polypetide isolated from the Sargasso Sea
MNIEIFNTFSKKNEIFQPIDSNNVRIYVCGPTVYDIIHIGNARPLIVFDVLVRFLKLIYPKVTYVRNITDVDDKIIIQSQKNNESITELTSRTIEAFAEDAKSLYVLKPDYEPKATEHIPEMLKIIKTLIGNNNAYVSNGHVFFSVSSMSKYGELSGMKLDEMIDGARVDVDSNKKDQVTLYYG

SEQ ID NO: 186689 - protein, 287 aa, Unknown
  Bacterial polypetide isolated from the Sargasso Sea
SNVRMYLCGPTVYDRSHLGNARNVILFDVLFRFFREIYGDDNVKYVRNFTDIDDKINKRAKDLGKEIQVITDETIAWYLEDMALLGNLLPNEMPRATDYMAKMIKMIEDLVQLGHAYEAEGHVLFSVKSFEDYGRLSGRSIEDMIAGARVEIAPYKADPLDFVLWKPSSDDLPGWQSPWGRGRPGWHLECSAMSHDLLGDTFDIHGGGNDLIFPHHENELAQSKCCFPSGGFANFWLHNEMLQVDGKKMSKSLGNFFTVRDLIDKGFPGEVIRFVFLSTHYRKPMDW

SEQ ID NO: 186690 - protein, 271 aa, Unknown
  Bacterial polypetide isolated from the Sargasso Sea
EDFVLWKPSEDDEPSWESPWGKGRPGWHLECSAMSKKFLGDEFDVHGGGIDLLFPHHENEIAQSRCANDTKIFAKFWMHNAFITMSNEKMAKSQGNILKIKDFRNKISGQVLRLALLSANYKQPLDWNDKLLEDCQNTINKWYNSYLDIEKNSKVSDEILQPLYDDLNTPGYIANLHQLYDKAQKGNDEDKSLFVSACKFVGLLNESKENWLKFKINKALISEKEILQKIQERNKARENKKYEEADKIRNELSDKGVLIEDKDGKTTWKFK

SEQ ID NO: 186691 - protein, 232 aa, Unknown
  Bacterial polypetide isolated from the Sargasso Sea
MAKDIFLTNSLGGKKEKFTPKNEKSIGMYVCGPTVYDDPHIGNARPLVVFDILYKILKNRYGSTSVKYIRNITDIDDKIIKASNDQNISINDLTSKITENFHKDCNYLKCETPNSEPKATENIKQMIEMITELEKKGFAYSKDKHVYFEVKKFSDYGKLSNKKLDELIAGSRVEVSEIKKNPEDFVLWKPSTDKEPSWDSPWGKGRPGWHLECSVMSKRYLGEEFDIHGGGR

SEQ ID NO: 186692 - protein, 138 aa, Unknown
  Bacterial polypetide isolated from the Sargasso Sea
EGRPGWHIECSAMSSKHLGEHFDIHGGGSDLQFPHHENEIAQSCCANNGEYVNTWIHTGMVQVNKEKMSKSLDNFFTVRDVLKEYDPESVRYFLISGHYRSQLNYSQENLDQARSSLERIYTALRDVKPIECELESNE

SEQ ID NO: 186693 - protein, 267 aa, Unknown
  Bacterial polypetide isolated from the Sargasso Sea
MNKDIFLTNSLGNKKDKFIPINPKKIGMYVCGPTVYDNPHIGNARPLVVFDILFKILKCKYGNNSVSYIRNITDIDDKIISSSIEKNISINELTKNITNIFHQDCKYLNCEKPTKEPKATENISLMIEMINKLIQNKFAYEINKHVYFEVKKFKDYGKLSNKNLEELIAGARVEVSENKKNPADFVLWKPSTENEPSWDSPWGKGRPGWHLECSVMSKKFLGDKFDIHGGGIDLIFPHHENEIAQSRCANENETFANYWVHNGFITI

SEQ ID NO: 186694 - protein, 95 aa, Unknown
  Bacterial polypetide isolated from the Sargasso Sea
MDLMLYDTFTNSKKKFEPIDPNNVRMYVCGPTVYDYAHVGNARPVIVFDILFRLLQKIYGSGNVTYVRNITDVDDKIIHAANDQNEDIGILTEKT

SEQ ID NO: 186695 - protein, 249 aa, Unknown
  Bacterial polypetide isolated from the Sargasso Sea
MEKNIKIYNSLTGTKENFIPINKEIIGIYVCGPTVYSEVHLGNCRTFVFFDTLVRYFKFLGYKVRYVRNITDVGHLENDADEGEDKISKKARIEQLEPMEIAQKYTNDFHDVMKSFNALPPDIEPTATGHIIEQINMIEKIIENGFGYVVNNSVYFNVDKYISQGYNYGELSGRQVDELIAGSRTLEGQADKKSPNDFALWKKADSSHIMQWDSPWGKGFPGWHLECSAMSAKYLGSTFDIPRWRNGFK

SEQ ID NO: 186696 - protein, 187 aa, Unknown
  Bacterial polypetide isolated from the Sargasso Sea
MVTIYNSFTRQKELFTPIEPNKIRMYVCGMTVYDFCHIGHARVMVIFDMVSRYLRSIGFDVLYIRNITDIDDKIIERAKSNNESITDLTNRFIEEMNKDANALGVLPPDSEPKATEHMTEIIAMISELIKKKHAYLAGNGDVYFNVGSFNDYGRLSGKNIEELRAGDRVEVQKEKNDPLDFVLWKSA

SEQ ID NO: 186697 - protein, 88 aa, Unknown
  Bacterial polypetide isolated from the Sargasso Sea
MSAYKQQLKIYNSLSSKKEVFKSKNKDLVGMYVCGPTVYNTVHLGNCRTFISFDLIFRYLKHLGYNVRYVRNITDVGHLEENEEDDKI

SEQ ID NO: 186698 - protein, 306 aa, Unknown
  Bacterial polypetide isolated from the Sargasso Sea
FNVSLIVRNITDVDDKINERAAANGQTIEDLCAETIISFHADTATLGAEPPDVEPRATQHINEMIAMISVLIDKGHAYAADGHVLFHVTTMDNYGALSKRSMEDMIAGARVEVAPYKRAPEDFVLWKPSAPEQPGWDSPWGRGRPGWHIECSAMAKTYLGDVFDIHAGGLDLIFPHHENEIAQSCCAHGTSLMAKYWLHNGFVTMNDEKMSKSLGNIITVEEATSRYRPEVLRAALLSAHYRAPLDLSDSTMQDAHNSLDRLYRAAGSAEISDDHVDDELLTCLCDDINTPAAMARLHELARCANK

SEQ ID NO: 186699 - protein, 279 aa, Unknown
  Bacterial polypetide isolated from the Sargasso Sea
NITDIDDKIIKSSQEQKISTTELTEKITLSFFKDCEFLNCENPTHQPKATEHIELMIKMINDLIKKGFAYENKKHVYFEVKKFSDYGKLSNKNLEDLVAGSRVEISENKKNLEDFVLWKPSNTDEPTWDSPWGKGRPGWHLECSAMSKKFLGNEFDIHGGGIDLIFPHHENEIAQSRCANDTKVFANYWVHNAFITMSNEKMAKSQGNILKIKDFRNKISGQIIRLALMSAHYKQPLDWNDKLLSDCESTLDKWYKVYSSNLKPVKVSDEILKPLYEDL

SEQ ID NO: 186700 - protein, 271 aa, Unknown
  Bacterial polypetide isolated from the Sargasso Sea
MSIRFYNSYSRKKESFKPIIDGKVGLYTCGPTVYDFAHIGNFRTFIFEDLLKRWLIHSGYNVTHIMNITDLDDKTIAKAKTQKVDLRVITEKYTKQFMNDLRWLKILPADKYPRATKSIDKMIKIIKILIDKGHAYIESDGSVYFNISTFSDYGKLTRVTLKGQKKSDRINDDDYDKSSPQDFALWKGWKKEDGRVGWNAPWGKGRPGWHIECSAMSSENLGNHFDIHCGGVDNMFPHHENEIAQSKCSSGEKFVNYWLHSEFLLVDGGKM

SEQ ID NO: 186701 - protein, 276 aa, Unknown
  Bacterial polypetide isolated from the Sargasso Sea
ITSSLEKKISTQELTKKITKSFHEDCEYLVCERPSQEPKATENISQMIEMINKLMKNGFAYLNKQHVYFEVKKFKDYGKLSNKKLEDLIAGSRVEVSENKKNPEDFVLWKPSKDNEPFWESPWGKGRPGWHLECSVMSKKYLGDKFDIHGGGRDLIFPHHENEIAQSRCANENEVFANYWIHNGFITMSNEKMAKSQGNILKINKLKNEINGQVLRLALISTHYKQALDWNDKLINESQNTINKWYESYINLKKKVLVPEEYLNPLYDDLNTPGLI

SEQ ID NO: 186702 - protein, 319 aa, Unknown
  Bacterial polypetide isolated from the Sargasso Sea
IEASKNKKISIDKLTNDITKKFQDNCKYLNCLKPNFEPRATEHINGMISMTKNLLKNKHAYEKDKHVYFSVNSFKNYGKLSNKKPDELEAGSRVEVSKFKNNPLDFVLWKPSSTDDPGWDSPWGRGRPGWHLECSVMSEKFLGKNFDIHGGGLDLVFPHHENEIAQSCCANKTDKFANYWLHNGYVTFNKEKMSKSLGNIVTIEKMRVKINGQVIRLALLSAHYKQPLDWNEKLVKESQNTLDKWYSLYGAETETNLDDDLVNPLLEDLNTPNYISKLHLLFDKASKGDRSSKKQFLAGCPLIGLLEESLESWETLKKE

SEQ ID NO: 186703 - protein, 186 aa, Unknown
  Bacterial polypetide isolated from the Sargasso Sea
MKIFNTLSGKKEIFEPIEDNKIRMYVCGMTVYDDTHIGHARTFLSFDLIVRYLRSIDYEVQYIRNITDVDDKIIARAEELNISPSDLTLDCINSMHNDFQALGMISPDAEPRATENINSIISLITKLIDKGHAYVGESDVYFSTESFEEYGKLSKRKLEDLLSGSRIDIDLDKKNPADFVLWKKDT

SEQ ID NO: 186704 - protein, 244 aa, Unknown
  Bacterial polypetide isolated from the Sargasso Sea
SKFSSVSYVRNITDVDDKIIKSSNEKNISIKDLTTTITKSFHEDCNYLNCENPSQEPKATEHIDLMIEMISQLIKKRFAYENNKHVYFEVKKFNDYGKLSNKKIEDLVAGARVEVSDNKKNSEDFVLWKPSLENEPSWESPWGKGRPGWHLECSAMSKKFLGNEFDIHGGGIDLLFPHHENEIAQSRCANNTKVFANYWLHNAFITMSNEKMAKSQGNILKIKDFKNKVSGQVLRLALISAHYK

SEQ ID NO: 186705 - protein, 243 aa, Unknown
  Bacterial polypetide isolated from the Sargasso Sea
HLECSVMSEKFFGKNFDIHGGGLDLIFPHHENEIAQSCCANKVEKFANYWLHNGYVTFNKEKMSKSLGNIVTIEKMRKKINGQVIRLALLSTHYKQPLDWNENLIEESQSTLNKWYTQFEDTKEDALNQDLLGPLLEDINTPAYIAKLHLLYDKASKGDISSKKLFLAGCKLIGLLEEDLETWKHFKKTRSKIDEKTIKNKLKEREQARKKEDYKLADSIRKELESSGVIIEDKDNKTVWKYK

SEQ ID NO: 186706 - protein, 254 aa, Unknown
  Bacterial polypetide isolated from the Sargasso Sea
SETDEPSWDSPWGKGRPGWHLECSAMSKKYLGNEFDVHGGGVDLLFPHHENEIAQSRCANDSKVFANYWLHNAFITMSNEKMAKSQGNILKIKDFRNNKSGQVLRMALMSAHYRQPLDWNDKLLEECENTISKWYNVYLNIKTKLKISDEILKPLFDDLNTPGYIANLHKLYEKAVKGSDEDKILFISACNFIGLLNETKDDWLKFKKNKVSISENEILIKINQRNKARVNKNYKEADKIRDELLDKGVLIEDK

SEQ ID NO: 186707 - protein, 223 aa, Unknown
  Bacterial polypetide isolated from the Sargasso Sea
MNKDIFLSNTLGGKKEKFVPMNEGKIGMYVCGPTVYDDPHIGNARPLVVFDLLFKVLKCKYGKKSVTYVRNITDVDDKIIKASVEKKISISDLTNKISKNFHDDCVYLNCEAPTHEPRATENINLMIKMIKELLKNGFAYENEKNVYFKVRKYKEYGKLSNKNLEDLIAGSRVEVSENKKNPEDFVLWKPSNNDEASWDSPWGKGRPGWHLECSVMAKKYLGN

SEQ ID NO: 186708 - protein, 132 aa, Unknown
  Bacterial polypetide isolated from the Sargasso Sea
SDKKNIEDFALWKISKENEPLWNSPWGDGRLGWHIECSAMIDKIFDSGIDIHCGGNDLIFPHHENELAQSCAAFENQVFVKYWLHNGMINLFGQKMSKSEGNIKLLNEYIDKFGGNVIRFFFLRSHYRKPQE

SEQ ID NO: 186709 - protein, 94 aa, Unknown
  Bacterial polypetide isolated from the Sargasso Sea
MSLDIFLTNNLTNKKEKFIPQDKNNVRMYVCGPTVYDDPHIGNARPVVIFDILFKVLKNEYPHVTYVRNITDVDDKIIKSSQENNISILDLTKK

SEQ ID NO: 186710 - protein, 205 aa, Unknown
  Bacterial polypetide isolated from the Sargasso Sea
MNKDIFLTNSLGNKKEKFIPINPKNIGMYVCGPTVYDNPHIGNARPLVVFDILFKVLKCKYGTNSVSYVRNITDIDDKIISSSVEKNISINDLTKNITNIFHQDCKYLNCENPTKEPRATENISLMIEMINKLIKNKFAYEINNHVYFEVKKFKDYGKLSNKNLDELIVGARVEVSENKKNPADFVLWKPSIENEPSWDSPWGKR

SEQ ID NO: 186711 - protein, 260 aa, Unknown
  Bacterial polypetide isolated from the Sargasso Sea
MKFFIFDSLSRTKKEFVPIDPKKIRIYACGPTVYDYAHVGNARMAVVTDLLVRTLRKKYDNVIFVSNITDIDDKIINASKESGIPISNLTSKFHKIYNDEMLSLNVKLPDIQPKASEHINEMILMIEEIISKGCAYLAKDHVIFKVESYKHYGKLSGRSFEEQIAGSRVEVADYKKNPRDFVLWKPSKDNEPGWDSPWGRGRPGWHIECSAMSHKCLDTPFDIHCGGVDLTFPHHENEIAQSCSAQKVNCKPENFCKYWF

SEQ ID NO: 186712 - protein, 261 aa, Unknown
  Bacterial polypetide isolated from the Sargasso Sea
SDEPSWDSPWGKGRPGWHLECSAMSKKYLGKEFDIHGGGVDLLFPHHENEIAQSRCANDSKVFANYWLHNAFITMSNEKMAKSQGNILKIKDFRNNRSGQVLRLALMSAHYRQPLDWNDKLLDDSENTINKWYNVYLNIEKQFKISDEILKPLLDDLNTPGYISILHKLYEKASKGSDEDKRIFISACHFVGLLNETKEDWLKFKKRKILISESEILLKINERNEARVNKNYEEADKIRNELLDKGVLIEDKDGKTVWKFK

SEQ ID NO: 186713 - protein, 120 aa, Unknown
  Bacterial polypetide isolated from the Sargasso Sea
EGLGRPGWHLECSAMSEKTLGLPFDIHSGGADLIFPHHENEIAQTCAAHKSNDDLKSFSKYWFHNGFVNVEGEKMSKSIGNIKLVHDLVKNYKGEVLRLTLLSAHYRQPLNWTRNIIKQN

SEQ ID NO: 186714 - protein, 96 aa, Unknown
  Bacterial polypetide isolated from the Sargasso Sea
MNKDIFLSNTLGGKKEKFVPMNEGKIGMYVCGPTVYDDPHIGNARPLVVFDLLFKVLKCKYGKKSVTYVRNITDVDDKIIKASVEKKISISDLTNK

SEQ ID NO: 186715 - protein, 275 aa, Unknown
  Bacterial polypetide isolated from the Sargasso Sea
KHAYEKDKHVYFSVNSFKNYGKLSKKKSEELVAGARVEISKFKKNPLDFVLWKPSALEDPGWDSPWGRGRPGWHLECSVMSEKFLGKNFDIHGGGLDLVFPHHENEIAQSCCANKTDKFANFWLHNGYVTFNKEKMSKSLGNIVTIEKMRGTINGQVIRLALLSAHYKQPLDWNENLINESQSILDKWYTQFENTKEDDLNEDLLKPLLEDINTPAYISKLHLLYDKASKGDKPSKKLFLAGCKLIGLLEDDLETWKKFKKINSKINEKDIKNKI

SEQ ID NO: 186716 - protein, 264 aa, Unknown
  Bacterial polypetide isolated from the Sargasso Sea
FIKKRRILVSIEKDRINLYVCGMTVYDDCHIGHARTFISFDLFVRFFSYLGYKVNYVRNITDIEDKIIDKAKLEKVSFSEISDRFIFSMHHDFSKLNLLSPKFEPRASENIPEILKMIEELEAKEFAYSIDGGDVYFDINSYEDYGKLSKRKQKELESGSRVEIDENKMNPNDFVLWKRSEEEPLFDSKWGKGRPGWHIECSAMSKKFLGETFDIHGGGLDLKFPHHENEIAQSECCSGKTLANHWMHVAPLNVNGKKMSKSLG

SEQ ID NO: 186717 - protein, 258 aa, Unknown
  Bacterial polypetide isolated from the Sargasso Sea
HIGNARPAIVFDVLAKLLRNKYKSVTYARNITDVDDKIINAALEQNVEISEITKISTNQYHSDMKILNVEEPNKEPYATQFISEMILFIEDLIEKDNAYVSEGHVLFDIDSYKLYGDLSSRDPKDMIAGSRVEVQDYKKNPLDFVLWKPSNENEIGWSSPWGRGRPGWHLECSTMILEIFGETIDIHGGGEDLRFPHHENECAQSFCRNDGKQLANFWLHNGMVQMEDSKMSKSLGNILLIKDLLNEMPGEVIRLSLM

SEQ ID NO: 186718 - protein, 218 aa, Unknown
  Bacterial polypetide isolated from the Sargasso Sea
VFPHHENEIAQSCCANKADKFANYWLHNGYVTFNKEKMSKSLGNVVTIEKMRGKINGQVVRLALLSTHYKQPLDWSDNLIIESQSTLNKWYTLFENTKKDDLNEDLLRPLLEDLNTPGYISKLHSLYDKASKGDSSSKKAFIAGCKLIGLLEEDLETWKKFKKTKSKIDEKTIKNKIKDRENARKNGNYKLADSIRRDLESGGVIIEDKGDKTTWKYK

SEQ ID NO: 186719 - protein, 209 aa, Unknown
  Bacterial polypetide isolated from the Sargasso Sea
MSISHKSLKIYNSLSSKKEDFNTINPSKVGMYVCGPTVYNKVHLGNCRTFISFDLIVRFLKHIGYDVRYVRNITDVGHLEESEEDKIQKRAKIEKIEPMEVVQKYTNNFRDVLNKFNLTPPNIEPTATGHILEQIEMIEMIIENGFAYEKNGSVYFDLMKFSEKFKYGKLSNRNLDDIINESRELFGSDEKKNPQDFALWKNATSSHIM

SEQ ID NO: 186720 - protein, 190 aa, Unknown
  Bacterial polypetide isolated from the Sargasso Sea
MKISDTLTNQKKELEFSDKVRIYLCGVTVYDQSHIGHARTIIVFDTLRRFLEANGTQVELIQNFTDVDDKIINRAKEQGESASGLSTKYIQTYFEDSDRLNIRRATNYPKATEHIDDMINLIQNLVDKESAYVSKNGVYFRVSKFSEYGKLSKKKTEDLESGARIEVDESKESPLDFALWKFSDEQPNWE

SEQ ID NO: 186721 - protein, 293 aa, Unknown
  Bacterial polypetide isolated from the Sargasso Sea
MNKDIFLTNNLTNKKEIFVPLDKSNIRMYVCGPTVYDDPHIGNARPLVIFDILFRLFKNTFSKVTYVRNITDIDDKIIKSSQDQKISAKVLTEKVTSSFLEDCKFLNCENPTHQPKATEHINLMIEMIDQLIKKGFAYEKNKHVYFEVKKFTDYGTLSNKKLEDLIAGSRVEVSDNKKNSEDFVLWKPSNKDEPSWDSPWGEGRPGWHLECSAMSKKFLGNEFDVHGGGIDLIFPHHENEIAQSRCANDSKIFAKYWVHNAFITMSNEKMAKSQGNILKIKDFRKRVSGQVIR

SEQ ID NO: 186722 - protein, 264 aa, Unknown
  Bacterial polypetide isolated from the Sargasso Sea
LFCLSPTQEPRATDHVDGMIKMTEKLINTKAAYEIMGHVYFSVSSFKKYGCLSNKKLDDLKVGARVEVSKLKKDPLDFVLWKPSDKGDPGWESPWGRGRPGWHLECSVMSEKYLGKNFDIHGGGLDLIFPHHENEIAQSCVYNGTDKFANYWVHNGFVTMNKEKMSKSLRNITTIEDATQKYSGQVVRLSLLSAQYKQPLDWSKDLLIEQTKTLDRWYSMYSSEVSEKIPDCFNDLLDDMNTPLYISKLHKLFQQSQNGDNNKK

SEQ ID NO: 186723 - protein, 247 aa, Unknown
  Bacterial polypetide isolated from the Sargasso Sea
NVRMYVCGPTVYDRAHIGNARPVLVFDILFRLLRYLYKEDNVTYVRNITDIDDKINAKALERGVNIDKITDETISWFHKDMEFLGALRPNHEPRATDYVSQMKDMISKLISLSFAYPTEDGHVFFEVEQFSDYGRLSNKKLSELKEGVRIENENTKKNPLDFVLWKPSNAEEPGWESPWGRGRPGWHIECSAMAKDILGDQFDIHGGGIDLIFPHHENEIAQSTCSNNMKKFANFWLHNGFLKIEGE

SEQ ID NO: 186724 - protein, 300 aa, Unknown
  Bacterial polypetide isolated from the Sargasso Sea
NYLCKNITDIDDKIIASSVEKKISINKLTSKITSIFHEDCKYLKCENPTFEPKATENISLMLEMIKQLIKNNFAYESNNHVYFEVKSFKDYGKLSNKNLDELIAGSRVEISENKKNPEDFVLWKPSSENEPAWDSPWGKGRPGWHLECSVMSKKLLGEVFDIHGGGRDLIFPHHENEIAQSRCSSNKSSFANYWVHNGFITISKEKMSKSLGNILKIDDFKNKVNGQVLRLALISSHYRQPLDWNNNLLSECEKTLNKWYESYTKISKTILIPDEYLLPLYDDLNTPGYIANLHKLYEKS

SEQ ID NO: 186725 - protein, 251 aa, Unknown
  Bacterial polypetide isolated from the Sargasso Sea
MSLKLYNTLTNKKEIFEPIEQGKVGMYVCGVTVYDNCHLGHARAYVAFDILVRYFRYQGYNVNYVRNITDIEDKIIERANENSESIYDLTSRTIASMHADFQGLGLIEPNSEPKATEYIDGMVTMIEDLIAKGHAYVADNNDVFFSVRSYEEYGKLSNKVLDDLDPGSRILEDQAKADPLDFVLWKSAKPEEPSWDSPWGKGRPGWHIECSVMSLEKLGKNFDIHGGGPDLIFPHQENEIAQSKCSNDSEL

SEQ ID NO: 186726 - protein, 275 aa, Unknown
  Bacterial polypetide isolated from the Sargasso Sea
YHGDMKYLNNLPPTIEPKATEYIQEMIMLIEKLISKEFAYEKEKHVLFNVKKFNQYGKLSGRNIEDMIAGSRVEVAPFKENEHDFVLWKPSDQNSPGWDSPWGQGRPGWHIECSAMINKILGPVIDIHGGGQDLIFPHHENEIAQSCCANNNETFANFWIHNGYLKMEGEKMSKSLGNIVTVKELSKDYKGEVIRLALLLTHYRKPINFSKTLLDQAKKILDKIYKVKEEVNHIKDKINCINDEVIRALNDDLNTSLAITIMLSIKDKKELVDTA

SEQ ID NO: 186727 - protein, 223 aa, Unknown
  Bacterial polypetide isolated from the Sargasso Sea
MTKEIFLTNSLGGKKEKFIPRNPKSLGMYVCGPTVYDDPHIGNARPLVVFDILFRLLKNVYGEKSVNYVRNITDIDDKIIKTSIEKNISIDELTTKVIKNFHNDCDYLNCQKPNNEPKATENIDLMIEMINKLIKNGYAYFEKNHVYFEVKKFNDYGELSNKKLEELIIGSRVEVSDLKKNPEDFVLWKPSDENAPSWDSPWGKGRPGWHLECSVMSKRYLGD

SEQ ID NO: 186728 - protein, 184 aa, Unknown
  Bacterial polypetide isolated from the Sargasso Sea
MKLKIYNTLSKEKELFVPLNKNSIKMYVCGPTVYSYAHIGNARPAVVFDTLYRVLKNIYPEVKYVRNITDVDDKINEAAKKLNQPISAITTKYTDIYHKDMKSLCVLTPTYEPKVTDNIDGIISMIQKILDNKNAYINENHVLFDVTSFSRYGELSNRNTEEMLAGARVEVADYKKNPGDFVLW

SEQ ID NO: 186729 - protein, 92 aa, Unknown
  Bacterial polypetide isolated from the Sargasso Sea
MIKLFNTLSKNIEVFKPIDEVVKIYCCGVTVYDLCHLGHARSYIAWDVLRRFLIYRNYKVKFVQNFTDIDDKILKRAREENCSMQEVLKKTS

SEQ ID NO: 186730 - protein, 188 aa, Unknown
  Bacterial polypetide isolated from the Sargasso Sea
MSDLKVYNTLTREKEIFSPINPPHVGMYVCGPTVYSDVHIGNCRTIVSFDVIFRYLQYLGYSVRYVRNITDVGHLENDADEGEDKIAKKAKLENIEPMEVVQKYTNGFHEVVDLLNTLKPSIEPTATGHMIEQIEYVQQIIKSGYAYESNGSVYFDVEKFSEKHNYGEVSGRKIEDLKNNTRDFKGQG

SEQ ID NO: 186731 - protein, 225 aa, Unknown
  Bacterial polypetide isolated from the Sargasso Sea
MRIYDTLSRAKVDFLPLDPDHVRIYVCGPTVYDYAHIGNARPVVIFDVLVRLMRRLFPKVTYVRNITDIDDKINARALESGRDIREITEETAKVYHEDMAAVGALPPDVEPRATEHVTQMIAMIDNLIANGHAYEAEGHVLFSVPSMADYGRLSKLDRREIVAGARVDVAPYKKDAQDFVLWKPSDLEAPGWDSPWGRGRPGWHIECSAMSYEHLGDKFDIHGGG

SEQ ID NO: 186732 - protein, 303 aa, Unknown
  Bacterial polypetide isolated from the Sargasso Sea
KLLKNNFSKVTYVRNITDIDDKIIKSSQEQKISTKELTEKVTSSFLKDCEFLNCENPTHQPKATEHIDLMIEMIAELIKKGFAYENQKHVYFEVKKFSDYGKLSNKNLDDLIAGSRIEISENKKNSEDFVLWKPSINDEPYWDSPWGKGRPGWHLECSAMSKKFLGSEFDIHGGGIDLIFPHHENEIAQSRCANETKAFAKYWVHNAFITISNEKMAKSQGNILKIKDFRNKISGQIIRLALMSAHYKQPLDWNDKLLSDCENTLDKWYRVYSSDFKSIKVPDEILKPLYEDLNTPWFYCKSS

SEQ ID NO: 186733 - protein, 289 aa, Unknown
  Bacterial polypetide isolated from the Sargasso Sea
MIREKKNKTDFVLWKRTKEGLNWDSPWGLGRPGWHIECSAMSMDALGETFDIHGGGLDLKFPHHENEIAQSECATNKEFARYWMHTGPLRIEDEKMSKSLGNYITIKDALRNFSSEALRFFLLSTHYRNPINFKESSVREAQVSLNKLYTSLAGLDLDKEISLSTNESKKEFMKVMDDDFNIPGSLAVLFNLSKEINVKKDNGDIEEAIALAKELIDIAEPLGLLQKNPEDYLKTGVNVSSDEIDKMIAERSTAREKKDFKEADRIRDELQSLGVVLEDSKHTTTWRRA

SEQ ID NO: 186734 - protein, 297 aa, Unknown
  Bacterial polypetide isolated from the Sargasso Sea
YEKDGNVLFRVSSFSNYGCLSDRKLDEHDSGSRVKVEDFKENPNDFTLWKPSLNDDPGWDSPWGRGRPGWHLECSVMSESTLDIPFDIHSGGNDLKFPHHDNEIAQTCAYHDNDDPTSFAKYWVHNGFLNLEDEKMSKSLGNVVYIDQLLQKYKGNEVRLALLSTHYRQPIPWSEDLLDQSHNIYVKLQSAFKEYGAIDGKFHLNSKVAEILMDDLNTPLAIRTMQELVVNPDENIKNEIATFKYIFEGSNQDLSLSDEQVNEINELVKERDDARISGDYDRADKIRDKLSKMNVSI

SEQ ID NO: 186735 - protein, 315 aa, Unknown
  Bacterial polypetide isolated from the Sargasso Sea
ELTNETIKNFHKDAHALGNLKPDFEPKATDHISEMIEMIETLISNGFAYVSSGNVLFAVEKYNNYGALSGRSLNEMISGSRVEVAEYKKNPGDFILWKPSSKKLPGWDSPWGRGRPGWHIECSAMSKKYLGTQFDIHAGGLDLIFPHHENEIAQSCCANKSNIMANYWLHNGYVTSDGEKMSKSLGNFATINNLLLNFRGEAIRYALMQAQYRAPLSFSKKSLDEATKSLSRLYRAVEGFEVNEGQDTQIIDNLCDDLNSPKALARLHYLADEANKGSKECAQKLKNSSNILGILCNSSEEWFKFGEINSNEAMK

SEQ ID NO: 186736 - protein, 276 aa, Unknown
  Bacterial polypetide isolated from the Sargasso Sea
GMYVCGPTVYDDPHIGNARPLIIFDILFKLLKKKFASVTYVRNITDIDDKIIKSSQEQKISTKELTENVTKSFLDDCKFLNCENPTHQPKATEHISLMIEMINDLMKKGYAYENKNHVYFEVKKFSDYGKLSNKNLEELIAGSRVEVSENKKNSEDFVLWKPSNDNEPSWDSPWGKGRPGWHLECSAMSKKFLGDEFDIHGGGIDLIFPHHENEIAQSRCANDTKVFANYWVHNAFITMSNEKMAKSQGNILKIKDFKKKISGQVVRLALMSAHYR

SEQ ID NO: 186737 - protein, 298 aa, Unknown
  Bacterial polypetide isolated from the Sargasso Sea
NLTKFYELEFKKDIDWLRIINADLYPRATESISKIISIISKLLEKKYAYVEKDGSVYFKINSYEKYGQLSKIKLIKSENKKNNLNDEYSKESMRDFALWKIHKPSDGPVFWDSPWGKGRPGWHIECSAMSIEHLGVSFDIHCGGVDNIFPHHENEIAQSECFSEKKFVNYWMHSEHLMIEDSKMSKSEGNTYTLNTLEKHGFSPSSLRYLLTAGHYRTKITFSLDSKTKADKVIKRIRSFADRLKELGADKLKLNNLKSPNELELFKQHMNDDLNTPNAYDTFFNYMRLINKKIDQKR

SEQ ID NO: 186738 - protein, 256 aa, Unknown
  Bacterial polypetide isolated from the Sargasso Sea
HEDCEYLVCEKPSQEPKATENISQMIEMINKLMKNGFAYLNEHHVYFEVKKFKDYGKLSNKKLEDLIAGSRVEVSENKKNPEDFVLWKPSKDNEPYWESPWGKGRPGWHLECSVMSKKYLGDKFDIHGGGRDLIFPHHENEIAQSRCANENEVFANYWVHNGFITMSNEKMAKSQGNILKINKLKNEINGQVLRLALISTHYKQALDWNDKLISESQNTINKWYESYINLKKKVLVPEEYLNPLYDDLNTPGYIAN

SEQ ID NO: 186739 - protein, 195 aa, Unknown
  Bacterial polypetide isolated from the Sargasso Sea
KKLDDLIAGARVEISKNKKNPADFVLWKPSEENEPSWESPWGKGRPGWHLECSVMSKKFLGDKFDIHGGGRDLIFPHHENEIAQSRCANENEVFANYWVHNGFITISSEKMSKSQGNILKIDSLRNKVNGQVLRLALVSTHYKQPLDWNDKLLSECEKTINKWYESYTDIEKQSLIPDEYLAPLYDDLNTPGYIA

SEQ ID NO: 186740 - protein, 105 aa, Unknown
  Bacterial polypetide isolated from the Sargasso Sea
MDLMLYDTFTNSKKKFEPIDPNNVRMYVCGPTVYDYAHVGNARPVIVFDILFRLLQKIYGSENVTYVRNITDVDDKIIYAANNQNEDIGILTEKTINYFHDDAKY

SEQ ID NO: 186741 - protein, 251 aa, Unknown
  Bacterial polypetide isolated from the Sargasso Sea
PWGKGRPGWHLECSAMSKKFLGNEFDIHGGGIDLIFPHHENEIAQSRCANDTKVFANYWVHNAFITMSNEKMAKSQGNILKIKDFRNKISGQIIRLALMSAHYKQPLDWNKKLLSDCESTLDKWYKVYSSNLKSVKVSDEILKPLYEDLNTPGYIANLHKLYEKANKGENIDLFVSACKFIGLMNETSQQWSEFKKKRVSITESEIENMLSLRDKARENKNYKEADKIRDELSDKGVLIEDKDGKTLWKFK

SEQ ID NO: 186742 - protein, 250 aa, Unknown
  Bacterial polypetide isolated from the Sargasso Sea
MNLLRLHNTLTRKKEDFIPIDPDHVRVYACGPTVYGRIHVGNARPVVVFDVLVRLLRLRYAKVTYVRNITDVDDKINIRAAERGISIDDLCAETIETFHQDTARLGSVDPDIEPRATHHIDEMQEMIMILIDKGHAYEASGHVLFQVSTMDTYGALSKRSMDDMIAGARVEVAPYKREAADFILWKPSNDDQPGWNSPWGRGRPGWHIECSAMAKTYLGEVFDIHAGGLDLIFPHHENEIAQSCCAHGSA

SEQ ID NO: 186743 - protein, 320 aa, Unknown
  Bacterial polypetide isolated from the Sargasso Sea
ADRYNFAHIGNARPAVVFDVLYRILKRRFKKVVYARNFTDVDDKINTAAKESGLPIATITERYIEAYQSDMAALGVLTPDLEPRVTEHVPDIIKMVEQLIARGHAYATERHVLFDVRSFPAYGALSGRDRDEMIAGARVEVAPYKRDPADFVLWKPSTPDLPGWESPWGRGRPGWHIECSAMIEQHLGVSIDIHGGGQDLIFPHHENEIAQGTCAHDGELYCRYWVHNGFVTVEGRKMSKSLGNVLLVRDLLNDAPGEAIRFALLSAHYRQPLDWSRKGLMQAKRGLDRLYGVLDDLSDTHDTPYAPGLLDAFKIALSDD

SEQ ID NO: 186744 - protein, 250 aa, Unknown
  Bacterial polypetide isolated from the Sargasso Sea
MINKLNISNTLSGKKQTFVPIDKNKVGMYVCGPTVYEFPHIGNARPLVVFDVLYRILIKIYGKNKVSYVRNITDIDDKIIDSSKKKKISIEKLTSKVTEVFHDDCKYLNCLKPNFEPKATEHIKAMISMTENLLKNKHAYENDHHVYFSVTSFKNYGKLSKKNPEELVAGARVEVSKLKKNPLDFVLWKPSSPEDPGWDSPWGRGRPGWHLECSVMSEKFLGKNFDIHGGGLDLVFPHHENEIAQSCCGI

SEQ ID NO: 186745 - protein, 293 aa, Unknown
  Bacterial polypetide isolated from the Sargasso Sea
NFRTFLFEDLLKRFLILKGYEVYHVMNITDVDDKTIKRANTEGITINELTLRYTEEFMNDIKSLKILPADKYPRATDHIAEMIQMIQTLEESGYAYETKDHSVYFRLDSYKSYGQLTKINLTKQRTTKRIINDEYSKDNPQDFALWKAWDDEDGKVFWESPWGRGRPGWHIECSAMSIKYLGNHFDIHCGGVDNIFPHHENELAQSVSSSKGLFVNYWMHSEYLHIQGDKMSKTLGNYYKISDLISDGFTAEEIRFTLLSAHYRSKLNFSLNQNQEARTAIKRITDIQQRLLN

SEQ ID NO: 186746 - protein, 279 aa, Unknown
  Bacterial polypetide isolated from the Sargasso Sea
MKNLNLYNTLERKLSIFSPIDNKNVRMYACGPTVYDFIHIGNARPLVVFDVLVRLLRIIFPKVTYVRNITDIDDKINKRAFEKGIDISELTKETIKNFHKDCKSLGNLNPDFEPKATDHVNEMIEMIKTLISEGFAYVSSGNVLFSVETYKKYGCLSGRSLEDMIAGSRVDVAEYKQKPGDFTLWKPSNKGLPGWNSPWGIGRPGWHIECSAMSKKYLGEVFDIHAGGLDLIFPHHENEIAQSCCANNSDVMANYWLHNGYVTSDGKKMSKSLGNFTTI

SEQ ID NO: 186747 - protein, 252 aa, Unknown
  Bacterial polypetide isolated from the Sargasso Sea
PWGKGRPGWHLECSAMSKKFLGDEFDVHGGGIDLLFPHHENEIAQSRCANDTKIFAKFWMHNAFITMSNEKMAKSQGNILKIKDFRNKISGQVLRLALLSAHYKQPLDWNDKLLDDCQNTINKWYNSYLDIENNSKVSDEILQPLYDDLNTPGYIANLHKLYDKAQKGNDEDKSLFVSACQFVGILNESKENWLKFKINKALISEKEILQKIQERNKARENKNYEDADKIRNELLDKGVLIEDKDGKTTWKF

SEQ ID NO: 186748 - protein, 293 aa, Unknown
  Bacterial polypetide isolated from the Sargasso Sea
LTNKKEQFVPKNNENIGMYVCGPTVYDDPHIGNARPLVIFDILFKLLKNKFPKVTYVRNITDIDDKIIKSSEEQNISTKELTEKVTSSFFDDCKFLNCENPTHQPKATEHIDLMIDMINQLIKKGFAYENNKHVYFEVKKFSDYGKLSNKKLEDLIAGSRIEVSDNKKNSEDFVLWKPSIKDEPSWNSPWGKGRPGWHLECSAMSKKFLGNEFDIHGGGIDLIFPHHENEIAQSRCANDSKIFAKYWVHNAFITMSNEKMAKSQGNILRIKDFRNKMSGQVLRLALMSAHYRQ

SEQ ID NO: 186749 - protein, 288 aa, Unknown
  Bacterial polypetide isolated from the Sargasso Sea
RATNHICNICSFITILEDKGYAYSRDGDVYYSVFKNKNYGRLSNQNIQEQNINQQGRMANEENNKKLNPQDFALWKKAKDDEPFFDSPWGKGRPGWHIECSAMVKDELGDTIDIHLGGSDLIFPHHENEIAQSEAANGKKLANYWLHNGMVNVNGQKMSKSLKNFKTIRELIKSGISPMTLRYFVMTVNYRKPLDFTEEALRSASEAWKNINVALSFKDLTKGAFRSIEKNESLEEEYKKKISFELSQKKLKFSEALGNDLNTASAIAIIYDLAKPLKNFLNQFQRVE

SEQ ID NO: 186750 - protein, 278 aa, Unknown
  Bacterial polypetide isolated from the Sargasso Sea
DDYGKLAKRSMKEMMAGARVEVAPYKKDPMDFVLWKPSDDATPGWESPWGKGRPGWHIECSAMSSKHLGDTFDIHGGGIDLVFPHHENEVAQSTCAHGKGTFARYWMHNGFLQVNGQKMSKSLGNFKTIREILDVMPGEVARLQMLTTHYRQPIDWTDAATAEAKKILDRWYRLTETVGEVSAADVSDALVEALADDLNTPKAMAVMHELAAGAKTGDNDAARALKACGRIMGVLLQKADTYFAWMPAGSEDSTGKDIHPAEIETLIEDRAAAKANKD

SEQ ID NO: 186751 - protein, 276 aa, Unknown
  Bacterial polypetide isolated from the Sargasso Sea
EHINEMIELIKLLIQNKFAYEKEGHVLFHVPLFEKYGSLSGRNKEEQIMGSRIEVAPYKKDPTDFVLWKPSPSPKPGWESPWGFGRPGWHLECSAMSEKTLGLPFDIHSGGADLIFPHHENEIAQTCAAHNKMDDLKSFAKYWFHNGFVNVEGEKMSKSLGNIRLVNDLVKEFNGEVLRLTLISAHYRQPLNWTREIITQNRIMLDRFYRNLKQLENIDAYDHDYQIEEKVIAGLFDDLNTPKVIAELNILSNQISNANKKMKGKKKYNLLEVGKI

SEQ ID NO: 186752 - protein, 92 aa, Unknown
  Bacterial polypetide isolated from the Sargasso Sea
MDPHNLYIYNSLTSSKEKFKPLRKNSVGMYVCGPTVYSNVHLGNCRTFISFDIIFRYLRYLGYNVRYVRNITDVGHLEDTGEDKISKKAKVK

SEQ ID NO: 186753 - protein, 154 aa, Unknown
  Bacterial polypetide isolated from the Sargasso Sea
MSLNLYDTFSNSKKKFEPIDPKNIRMYVCGPTVYDYPHVGNARPVIVFDILFRILQNLYGTEHVTYVRNITDVDDKIINASQENNEDINELTSRTINYFHSDAKYIGAMEPSFEPRATDHIAEMINIIETLIEKNYAYVAEHNVLFSSNKFLNT

SEQ ID NO: 186754 - protein, 233 aa, Unknown
  Bacterial polypetide isolated from the Sargasso Sea
MDLVFPHHENEIAQTCSLNTNHDPKSFAQFWFHNGFVNVEGEKMSKSIGNIRLVHDLKSQYSGEVLRLTLLSAHYRQPLNWTKEIINQNSKMLDRFYRSLKELQDVEITSEKLSDEVMKSFLDDLNTPKVLAELNTLSNKLSLANKEEKINIKNNLIAAGKILGILGEDPDVWLGYNQSANPEKEEIEGLINQRNEARRDKDFKLADEIRDKLKIKGIEIEDTKNGTIWRKDS

SEQ ID NO: 186755 - protein, 307 aa, Unknown
  Bacterial polypetide isolated from the Sargasso Sea
YYISNFKDDLKSLSFFPSDRLPRATDHVGQMIEMIKALIDKGYAYVTDDGSVFFSIDAYEDYGALSNIDMNQAVRGDRVATDEYNLDNPSDFALWKSYKKEDGNVKWSSPWGLGRPGWHIECSAMSIEYLGPHFDIHCGGVDNKFPHHENEIAQSICATNKPFVNFWMHSEFLTVDGGKMSKSLGNYYCLNDLIKEGLTAEEFRYIVLSPHYRSKVNFSLDKKHEAKKAIQRIMGLKERLEKFDESESVELPRGADNFISALENDLDSPAALAIFFDWVRETNSKLDNNELLKSEYSKKVKILLIIL

SEQ ID NO: 186756 - protein, 297 aa, Unknown
  Bacterial polypetide isolated from the Sargasso Sea
ISPDAEPRATENIDSIVSLITTLIDKGHAYVTESDVYFSTESFEEYGKLSKRKLEDMLSGARIDIDLDKKNPTDFVLWKKDTEGLKWDSPWGPGRPGWHIECSAMSMDALGETFDIHGGGSDLKFPHHENEIAQSECVTGKEFAKVWMHTGSLRIDEQKMSKSLKNFITIKEALNDSSSEVLRFFLISSHYRSPLNYSDEGLKEAKNSLDRLYNSLQDLSYETDEHIPSEYSEKFHDAMQDDFNSPSAISVLFEMVKQINILKKKDQLTHADALASELISLSNILGILSENPEEYFT

SEQ ID NO: 186757 - protein, 231 aa, Unknown
  Bacterial polypetide isolated from the Sargasso Sea
GGRDLIFPHHENEIAHSCCSSANIEDPTSYAKYWMHNGFVTIDGEKMSKSLGNIILVNELTESYHGEVIRLALLSSHYRQGLDWNEKIIHQASILLDKLYEIKILLNGENIEHSSETNLEPIAYLADDLNTPGLIAELHKLVKDFNTSNSNKSEIKIHLNLISQALGILQDDSYKKISEELESKIHALILKRKVAKDNKDYELADKIRNELLDLGVEIKDTSSGTDWNLKS

SEQ ID NO: 186758 - protein, 152 aa, Unknown
  Bacterial polypetide isolated from the Sargasso Sea
MNKNLNFFNTLSNKKEKFVPINNNKIGMYVCGPTVYDFPHIGNARPLVVFDVLFRLLQSFYGKNKVTYVRNITDIDDKIIESSKKNKKSISELTETITKSFHQECRYLNCLNPTFEPKATDHIKEMINMVSNLLKNKHAYENNKHVYFSVSS

SEQ ID NO: 186759 - protein, 270 aa, Unknown
  Bacterial polypetide isolated from the Sargasso Sea
KKKELFKPINSKNITMYACGPTVYDNPHVGNARSLVVFDLLFRTLKKIYGDNNVTYVRNITDIDDKIIDTAKVKNLPINKITEEVTNQFHDACKNLNCLKPTVEPKATEHVDGMIKMTTSLIEKGFAYINEGHVYFSISSFKSYGKLSNKNLEDLKSGSRVEVSTNKKNPLDFVLWKPSDEKDPGWDSPWGRGRPGWHLECSVMSEKYLGKEFDIHGGGLDLVFPHHENEIAQTCSNNSNDKMANYWVHNGFLTMNKEKMSKSLGNIVSI

SEQ ID NO: 186760 - protein, 207 aa, Unknown
  Bacterial polypetide isolated from the Sargasso Sea
MEIKFYDTKSRRKRKFQPRLRNNVKFYVCGPTVYDRAHIGNARPAVVFDILFRFLKHEFGHKNVTYVRNFTDIDDKINEAAKASKKSIREITNETIQWYKDDMAALNVLEPTFSPRATEYVPAMIKQIKSLVDNKNAYLDAHGHVMFDVASFANYGKLSRRNLDEMKAGSRGAINDSQRNPMDFGLWKPSDDKFTGWEKSLGVEDAR

SEQ ID NO: 186761 - protein, 246 aa, Unknown
  Bacterial polypetide isolated from the Sargasso Sea
MLYDTFTNSKKKFEPIDPNNVRMYVCGPTVYDYAHVGNARPVIVFDILFRLLQKIYGSENVTYVRNITDVDDKIIHAANDQNEDIGILTEKTINYFHDDAKYIGALKPTFEPRATEHIPEMIKLIEKLISKEFAYIADGNVLFSSNKFKEYGKLSGKNLDEMVAGSRVGVESYKKEESDFVLWKPSKEDEPSWKSPWGDGRPGWHIECSAMSEKLLGENFDIHGGGQDLIFPHHENEIAQSECANN

SEQ ID NO: 186762 - protein, 229 aa, Unknown
  Bacterial polypetide isolated from the Sargasso Sea
MNYLGETIDIHAGGIDLIFPHHENEIAQSTCCHDKKMSNFWLHNGFINFKGEKMSKSLGNTTIVNDLLAKHDPTVLKYSLLTTHYRQPIDFSNDLLSYSQNIINKWENYIQEVKTTELDSEFVSALLDDLNTPKALMRLQQIIANLKKDTNNEVLLAHFNNGLSLLGLNPSFLKKDLDLDKEYIENMISRRQIAKSNKDFELADKIRDELFKQGIVLEDTKNETTWKKN

SEQ ID NO: 186763 - protein, 48 aa, Unknown
  Bacterial polypetide isolated from the Sargasso Sea
YKKNPEDFVLWKPSKTNEPSWDSPWGDGRPGWHIECSAMISELLRRNY

SEQ ID NO: 186764 - protein, 255 aa, Unknown
  Bacterial polypetide isolated from the Sargasso Sea
MIEMIETLISNGFAYVSSGNVLFAVEKYKNYGSLSGRSIDEMISGSRVEVAEYKENPGDFILWKPSSKNLPGWNSPWGRGRPGWHIECSAMSKKYLGTQFDIHAGGLDLIFPHHENEIAQSCCANKSDIMANYWLHNGYVTSNGEKMSKSKGNFATINDLLLNFRGESIRYALMQAQYRAPLSFSKKSLDEATKSLSRLYRAVEGFQITDDQDNKIVDNLCDDLNSPKALARLHFLADEANKGSRECAQKVKKLF

SEQ ID NO: 186765 - protein, 301 aa, Unknown
  Bacterial polypetide isolated from the Sargasso Sea
INSKKISLYACGPTVYENPHVGNARTLVVFDVLFRVLKVLYSSNVTYVRNITDVDDKIIEASNKYKKDINEITNQVTKIFHQNCESLNCLRPTVEPKATEHIKEMILMTSSLIKKGHAYENKDHVYFSVNSFKDYGKLSNKNLDELKAGTRIKISDLKKNPMDFVLWKPSKEMEPGWESPWGRGRPGWHLECSVMSEKYLGKTFDIHGGGLDLIFPHHENEIAQSCCNNETKNFANYWVHNGFVTINKEKMSKSLGNIVTISDAVKRYSGQVVRLALLSAHYSQPLDWNDDLLENQKSVLD

SEQ ID NO: 186766 - protein, 256 aa, Unknown
  Bacterial polypetide isolated from the Sargasso Sea
MSLQLQNTLSGKKEFFKPVNPDHVRIYACGPTVYNFAHIGNARMAVVNDLLVRVLKTQFKQVTYVSNITDIDDKIIEASKETGEDISVITNKYTEIYNNDMSALGVNLPDIQPRATDHIKEMIELIKKLIDENKAYQKEGHVLFHVPSFDNYGILSKRNRDEQIAGSRVEVAPFKKDPADFILWKPSPSPLPGWDSPWGFGRPGWHLECSVMSEKSLGLPFDIHSGGIDLVFPHHENEIAQTCSISENKDPKDFAT

SEQ ID NO: 186767 - protein, 273 aa, Unknown
  Bacterial polypetide isolated from the Sargasso Sea
GHVLFNVPSYAEYGQLSQRDRDEMIAGARVEVAPYKKDPSDFVLWKPSTPDLPGWDSPWGVGRPGWHLECSCMIEKHLGRSIDIHGGGVDLVFPHHENEIAQSTCAHGGDTFVKYWLHNGFVNVDQEKMSKSIGNVLLVHDLLKDAPGEAIRLALLNAHYRQPLDWTDDGLAQAKRMLDRLYGALRGLADLDPAGDTGPDPEFLAALNDDLNTPKALAALFDLSRQANSATDPEEKSRLKGVLLASSNLMGILQQDTEAWFAGGDIDQDGLSA

SEQ ID NO: 186768 - protein, 92 aa, Unknown
  Bacterial polypetide isolated from the Sargasso Sea
MSNDIFLTNNLTNKKEKFVPIDKQNIRMYVCGPTVYDDPHIGNARPIVVFDILYKIFKKKYSKVTYVRNITDVDDKIIKSSKENNISISELT

SEQ ID NO: 186769 - protein, 67 aa, Unknown
  Bacterial polypetide isolated from the Sargasso Sea
MRITNTLSRQKEDFVPVDPKHIRFYVCGPTVYDYAHIGNARPVVVFDVLYRLLKTLYPRVTYVRNIT

SEQ ID NO: 186770 - protein, 289 aa, Unknown
  Bacterial polypetide isolated from the Sargasso Sea
NLEDLIAGSRVEISENKKNSEDFVLWKPSNNDEPAWDSPWGKGRPGWHLECSAMSKKFLGNEFDIHGGGIDLIFPHHENEIAQSRCANNTKVFANYWVHNAFITISNEKMAKSQGNIFKIKDFRNKISGQIIRLALMSAHYKQPLDWNDKLLSDCESTLDKWYKVYSSNLKSVKVSDEILKPLYEDLNTPGYITNLHKLYEKANKGENIDLFVSACKFIGLMNETSEEWNEFKKKRVSITETEIENLLSLRDKARENKNYKEADRIRDELLDKGVLIEDKDGKTLWKFK

SEQ ID NO: 186771 - protein, 314 aa, Unknown
  Bacterial polypetide isolated from the Sargasso Sea
DIEPKATDHMKEIVTMISNLIKKGHAYLGKNGDVYFDVSSFDAYGKLSGKNTDELRAGERIEVQKEKNDPLDFVLWKSAKPDEPKWPSPWGEGRPGWHIECSAMSTHCLGSHFDIHGGGQDLQFPHHENEIAQSVCSTNDKFANIWMHNGFVRVNEEKMSKSLNNFFTIREVLKKYNAEVIRFFILSSHYRSQLNYSSDNLDEAKSALTRLYTALKGSNHESAVDKKYLADFNSHMDDDFNTPKAISLLHEITRKINRLGDKETEKSKILKSTLKQLASTLGLLNSNPQDFLQGREDNKIDDVDTDYINKLIDE

SEQ ID NO: 186772 - protein, 250 aa, Unknown
  Bacterial polypetide isolated from the Sargasso Sea
MTDIFLTNNLTNKKEQFIPKDRKKIGMYVCGPTVYDDPHIGNARPLVIFDILFRLLKNNFSKVTYVRNITDIDDKIIKSSQEQKISTKELTEKVTSSFLKDCEFLNCENPTHQPKATEHIDLMIEMITELIEKGFAYENQNHVYFEVKKFADYGKLSNKSLDELIAGSRIEISKNKKNSEDFVLWKPSINDEPYWDSPWGKGRPGWHLECSAMSKKFLGNEFDIHGGGIDLIFPHHENEIAQSRCANETK

SEQ ID NO: 186773 - protein, 248 aa, Unknown
  Bacterial polypetide isolated from the Sargasso Sea
PISEITKKYEKIYNENLNELGIDPPDFQPRATEHIPEMIDQIKALIKNGHAYKAEGHVLFSVNTFLGYGSLSGRDKEEQIAGSRVEVAPYKKDPIDFILWKPSIEDQPGWDSPWGFGRPGWHLECSAMSEKTLGVPFDIHTGGQDLLFPHHENELAQCCGVHNNLDNISSYARYWIHNGMIRFDGDKMSKSLGNIQFINDLLNDHNGETLRLVLMSTHYRQPLNWSAKTIDQSKKTLDRLYRTIKSLN

SEQ ID NO: 186774 - protein, 206 aa, Unknown
  Bacterial polypetide isolated from the Sargasso Sea
MKISDTLTNEKKELEFSDKVRIYLCGVTVYDQSHIGHARTIIVFDTLRRFLEANGIKVELIQNFTDVDDKIINRAKEQGESASGISSKYIQTYFEDSDRLNIKRATNYPKATEHIDDMINLIQDLVDKESAYVSKNGVYFRVSKFSEYGKLSKKKTEDLESGARIGVDEAKESPLDFALWKFSEGQPNWESPWGKGRPGWHIECSA

SEQ ID NO: 186775 - protein, 235 aa, Unknown
  Bacterial polypetide isolated from the Sargasso Sea
MNKDIFLSNSLGGKKEKFVPMDQEKVGMYVCGPTVYDDPHIGNARPLVVFDLLFKVLKCKYGNNSVIYVRNITDIDDKIIQSSKEKNISITELTSKITKKFHDDCEYLNCEIPTHEPKATDNIEEMINMIGELIKNKFAYESQGHVYFKVKNFKDYGKLSNKNLDDLIAGSRVELSDKKENQEDFVLWKPSNDDEPSWDSPWGKGRPGWHLECSVMSKKYLGDTFDIHGGGGDLY

SEQ ID NO: 186776 - protein, 300 aa, Unknown
  Bacterial polypetide isolated from the Sargasso Sea
MGKKEELVPLDGEQVRMYICGMTVYDDTHIGHARTFLCFDLIVRYLRKSGYKVNYIRNITDVDDKIIARAKELNIDASDLTDKYITSMQEDFRNLGMIDPDIEPRATNNIDSIISLIQILMDKGHAYTGKADVYFSTDSYKEYGNLSNRNTEDLIAGARIDVDEEKQNPADFVLWKKAEEGLTWDSPWGRGRPGWHIECSAMSMDALGKTFDIHGGGIDLKFPHHENEIAQSVCATGEDFAKCWMHTGPLRIDKEKMSKSLDNFITIKEAINKFPPEVIRFFLISNHYRSPINYSEEGVL

SEQ ID NO: 186777 - protein, 215 aa, Unknown
  Bacterial polypetide isolated from the Sargasso Sea
MDIFLTNNLTNKKELFVPKDNKNIGMYVCGPTVYDDPHIGNARPLVVFDILFKLLKNKFEKVSYVRNITDIDDKIIKSSQEQKISTKELTDKVTKSFLEDCKYLNCENPTHQPKATEHIDLMIEMTTELIKKGFAYENNKHVYFEVKKFSDYGKLSNKKLEDLIAGSRVEISKNKKNSEDFVLWKPSNKDEPSWDSPWGNGRPGWHLECSAMSKK

SEQ ID NO: 186778 - protein, 286 aa, Unknown
  Bacterial polypetide isolated from the Sargasso Sea
MNKDIFLTNNLTNKKEKFVPINKNNIGVYVCGPTVYDDPHIGNARPLVVFDILFKILKSKFSSVTYVRNITDVDDKIIKSSNEKNISITDLTKKVIKSFHEDCKYLNCENPSQEPKATEHIDLMIEMISQLIKKGFAYENNKHVYFEVKKFNDYGKLSNKKIEELVAGSRVEVSDNKKNSEDFVLWKPSLENEPSWDSPWGLGRPGWHLECSAMSKKFLGNEFDIHGGGIDLIFPHHENEIAQSRCANNTKIFANYWLHNAFITISNEKMAKSQGNILKIKDLKIK

SEQ ID NO: 186779 - protein, 275 aa, Unknown
  Bacterial polypetide isolated from the Sargasso Sea
IKNKFAYESQGHIYFKVKNFKDYGKLSNKNLDDLIAGSRIELSDKKENQEDFVLWKPSNDDEPSWDSPWGKGRPGWHLECSVMSKKYLGNTFDIHGGGRDLIFPHHENEIAQSVCANKTEKFANFWVHNNFITMSKEKMAKSQGNILKISDFKKKYNGQVLRLALISTHYSQPLDWNEKLMSECQRTLDKWYNCYVSVNKKILIQDDDLNPLYDDLNTPGFIAILHKLYDKAKEGNQEDKEIFTTACKFIGLLDQSKEEWDGFKKQNLKLSQNDI

SEQ ID NO: 186780 - protein, 283 aa, Unknown
  Bacterial polypetide isolated from the Sargasso Sea
GFNFKDFAYEKEDHVLFHVPNYDNYGKLSKRNRDEQIAGSRIEIAPFKKDPADFVLWKPSDKSQPGWDSPWGVGRPGWHTECSAMSKKTLGLPFDIHGGGRDLIFPHHENEIAQSCCSSANIEDPTSYAKYWMHNGFVTIDGEKMSKSLGNIILVNELTESYHGEVIRLALLSSHYRQGLDWNEKIIHQASILLDKLYEIKILLNGENIEHSSETNLEPIAYLADDLNTPGLIAELHKLVKDFNTSNSNKSEIKIHLNLISQALGILQDDSYKKISEELESKI

SEQ ID NO: 186781 - protein, 277 aa, Unknown
  Bacterial polypetide isolated from the Sargasso Sea
SIEDQPGWDSPWGFGRPGWHLECSAMSEKTLGVPFDIHTGGQDLLFPHHENELAQCCGVHNNLDNISSYARYWIHNGMIRFDGDKMSKSIGNIQFINDLLNDHNGETLRLVLMSTHYRQPLNWTAKTIDQSKKTLDRLYRTIKSLNISLDDTNVKPAQEVIDALCDDLNTPEALGQFNLLMKDLENAEGSQKEEKLAIIISTARMLGILQIDPDSWLGYQKVKTGMDVDKIEQMIEDRNNCRSEKDFQRADEIRDELRSMGIEIEDSAEGTIWKSES

SEQ ID NO: 186782 - protein, 269 aa, Unknown
  Bacterial polypetide isolated from the Sargasso Sea
DFVLWKPTEMNNIGWNSPWGYGRPGWHIECSAMCKELLGESFDIHGGGIDLLFPHHENELAQSVCANNTKLLANYWVHNGFVNIEGQKMSKSLGNYLTVEDLRKKGITSAVIRFVLLSTHYRQPLDWTNRKLYEAQTILTKWLRVFDKKNVLIHGQPTKKILKALCDDLNSPLVLTEMHNLLKIGDLDGFINSMVFLGFTSNTFKEQITTKINVDDDNIHKLINDLIFARQTARDNKDYRKSDEIRIRLEKAGVSINDLGNKTKWTLQP

SEQ ID NO: 186783 - protein, 184 aa, Unknown
  Bacterial polypetide isolated from the Sargasso Sea
MDIFLTNNLTNKKEQFIPRNEKNIGMYVCGPTVYDDPHIGNARPLVIFDILFKLLKNKFKTVSYVRNITDIDDKIIKSSQDQKISTSELTEKVTKSFLQDCKYLNCEDPTHQPKATENIDLMIKMINDLIKKGYAYENNNHVYFEVKKFSDYGKLSNKKLEDLIAGSRVEISDNKKNSEDFVLW

SEQ ID NO: 186784 - protein, 204 aa, Unknown
  Bacterial polypetide isolated from the Sargasso Sea
MHLTFYNTKTRRKERFIPINKENVSMYVCGPTVYDRAHIGNARPAVVFDLLFRFFKHIYGSECVTYVRNFTDIDDKINDKSKITGRSIKQITDETIGWYIADMEYLNVLEPSFSPRATDFIGPMIELISKLISKGNAYIDGKGHVYFKVKSYSSYGILSKRNLEELEMGARVEISENKRDPMDFVLWKPSDEQTPGWESPWGRG

SEQ ID NO: 186785 - protein, 310 aa, Unknown
  Bacterial polypetide isolated from the Sargasso Sea
KKEVFKPNNIKKISLYACGPTVYESPHVGNARTLVVFDVLFRVLKVLYDSNVTYVRNITDVDDKIIEASQNNKEEINEITNRVIKIFHENCKSLNCLKPTIEPKATEHVKEMIEMTSSLIKKGFAYENKNHVFFAVSKFKDYGKLSNKNLDELKAGSRIEISDLKKNPMDFVLWKPSNEKDPGWESPWGRGRPGWHLECSVMSEKYLGKNLDIHGGGLDLIFPHHENEIAQSCCNNNTKNFANYWVHNGFVTINKEKMSKSLGNIISITDATKKYSGQVVRLALLSAHYSQPLDWNNKLFRNQRATIEKW

SEQ ID NO: 186786 - protein, 287 aa, Unknown
  Bacterial polypetide isolated from the Sargasso Sea
LLKNNHAYEKDKHVYFSISSFKNYGKLSKKNPDELVAGARVEVSKSKKHPLDFVLWKPSAAEDPGWDSPWGRGRPGWHLECSVMSEKFLGKNFDIHGGGLDLVFPHHENEIAQSCCANKADKFANYWLHNGYVTFNKEKMSKSLGNIVTIEKMRGQINGQVIRLALLSTHYKQPLDWNEKLINESQSTLDKWYTQFEDTKEDHLSDDLLQPLLQDINTPGYISKLHSLYDKASKGDKESKKNFLAGCKLIGLLEDDFNRWKQFKKTKSKIDEAIISSKIKDRENARR

SEQ ID NO: 186787 - protein, 262 aa, Unknown
  Bacterial polypetide isolated from the Sargasso Sea
IDQGVSLQSFTDKYTQAFYEDVDRLRIRKAKHYPRATDFVPQMIEMILKLEKKGYTYTTEDGSVFFKISNFEAYGKLANLDPEQLQSGARVEADEYGKEEGRDFALWKGYKDEDGDVFWDSPWGRGRPGWHIECSAMSMNLLGDCFDIHCGGVDNIFPHHENEIAQSCAASDAQFVNYWLHNEHLLVDGEKMSKSAGNFYTLRSLLEKGFSPEAIRYTLLSTHYRSKLNFTVEKVKIAQKTINRLRELKRRLEKVSAGVEGA

SEQ ID NO: 186788 - protein, 134 aa, Unknown
  Bacterial polypetide isolated from the Sargasso Sea
MNKDIFLTNSYSGHKEKFVPIDANNIKMYVCGPTVYDDPHIGNARPLVVFDILFKVLKCKYGNDKVTYVRNITDIDDKIIQSAKDKKITIKDLTTKINKNFQEDCDYINCEKPSFQPKATENINEMIHMINNLV

SEQ ID NO: 186789 - protein, 290 aa, Unknown
  Bacterial polypetide isolated from the Sargasso Sea
FVRLFRNKYPNVTYVSNITDIDDKIIEAANESNIPINELTKKYTDIYNADMSNLNVFPPDIQPKATEYVVDMVNFIDKLIQNDKAYEKDGHVFFNVPSYGGYGKLSNREIDQQLAGSRVQVSDIKKNQQDFVLWKPSSESQPGWESPWGIGRPGWHTECCVMSEVNLKIPFDIHGGGQDLLFPHHENEIAQSCASVNSDNPEDYAKYWIHNGFVTIDGEKMSKSLNNIILLNDLLKEHDGETIRLALLSSHYRKSLDWNENVIKQSKVLLDKVYDFLVTYDDDPEGEIDE

SEQ ID NO: 186790 - protein, 260 aa, Unknown
  Bacterial polypetide isolated from the Sargasso Sea
MLKLYNSYSKLIEEVSLDKNDVKIYLCGPTVQSSPHLGHGRSAVVFDFLIRYMKYLEYKVTYVRNITDIDDKIILKSNEEGISYIELGNRVSAEFKKAYSELNCITPDFEPKATEFISEIIKYIEKLIKNKFAYVSESGIYYDTLKFNDYLKLSGRTREDVITGTRIELEEDKQSPEDFALWKFSKEGEPYWESPWGNGRPGWHIECSSMIESILGKTIDIHCGGNDLIFPHHENEIAQSKGAYPTEEFVRYWLHNGMLN

SEQ ID NO: 186791 - protein, 194 aa, Unknown
  Bacterial polypetide isolated from the Sargasso Sea
MSLDIFLTNNLTNKKEKFIPKDKNNVRMYVCGPTVYDDPHIGNARPVVVFDILFKILKNKYPNVTYVRNITDVDDKIIKSSKENNILISELTKKITQSFNEDCIYLNCEKPNHEPKATEHISEMIEMISELIKKGFAYENKRHVYFEVKKFEDYGQLSNKNLDELVAGSRIEVSDNKKNPEDFVLWKPSESDEP

SEQ ID NO: 186792 - protein, 147 aa, Unknown
  Bacterial polypetide isolated from the Sargasso Sea
MIKLFNTLSKRVEVFKPIDDVVKIYCCGVTVYDLCHLGHARSYIAWDVLRRFLIYSEFKVKYVQNFTDIDDKILKRAKEESSSMKEVSEKNIIEFHKDMDSLGIMRPDSMPRATNHICNICSFITILEDKGYAYSRDGDVYYSVLKI

SEQ ID NO: 186793 - protein, 264 aa, Unknown
  Bacterial polypetide isolated from the Sargasso Sea
KPSAVEDPGWDSPWGRGRPGWHLECSVMSEKFLGKTFDIHGGGLDLIFPHHENEIAQSCCANKTDKFANYWLHNGYVTFNKEKMSKSLGNIITIEKMRKTINGQVIRLALLSSHYKQPLDWNENLIKESQNTLDKWYTQFEKNKEDVLNQDLLEPLLEDINTPGYIAKLHLLFDKASKGDNSSKKLFLAGCKLIGLLEEDLETWNKFKKARSKVDEKTIQSKIKDRDLARKKGDYKLADNIRKDLESKGVIIEDKDKKTIWKYK

SEQ ID NO: 186794 - protein, 223 aa, Unknown
  Bacterial polypetide isolated from the Sargasso Sea
MKISDTLTNQKKELEFSDKVRIYLCGVTVYDQSHIGHARTIIVFDTLRRFLEANGTHVELIQNFTDVDDKIINRAKEQGESASGLSTKYIQTYFEDSDRLNIRRATNYPKATEHIDDMINLIQNLVDKESAYVSKNGVYFRVSEFSEYGKLSKKKTEDLESGARIEVDESKESPLDFALWKFSDGQPNWESPWGKGRPGWHIECSAMSIKYLGKNFEIHGGGR

SEQ ID NO: 186795 - protein, 285 aa, Unknown
  Bacterial polypetide isolated from the Sargasso Sea
RCKSLRFPENKKNPADFVLWKPSAENEPSWDSPWGKGRPGWHLECSVMSKKFLGDKFDIHGGGMDLIFPHHENEIAQSRCANENETFANYWVHNGFITIASEKMSKSQGNILKIGDFKNKVSGQVLRLALISAHYKQPLDWNEKLLSECEKTINKWYESYTDIKKQVLIPEDYLSPLYDDLNTPGYIANLHKLFDKSQKGSIKDKEIFVSACNFIGLLNENKNSWDKFKQSKSMISEEEIKQKITERNNARKNKDYKAADKIRDELLDKGVLIEDKDDKTLWKFK

SEQ ID NO: 186796 - protein, 246 aa, Unknown
  Bacterial polypetide isolated from the Sargasso Sea
LWKKAKDDEPFFDSPWGKGRPGWHIECSAMVKDELGDTIDIHLGGSDLIFPHHENEIAQSEAANGKKLANYWLHNGMVNVNGQKMSKSLKNFKTIRELIKSGISPMTLRYFVMTVNYRKPLDFTEEALRSASEAWKNINLALSFLDLTKDAFKFIDKNESIEVEYKEKISFELSKKKLNFSEALGNDLNTAGAIAIIYDLAKPLKNFLNQFQRVEGFKIDLNEKFFLLENFKTLEKLTEVLGLKKE

SEQ ID NO: 186797 - protein, 241 aa, Unknown
  Bacterial polypetide isolated from the Sargasso Sea
MIKLFNTLSKNIEVFKPIDEVVKIYCCGVTVYDLCHLGHARSYIAWDILRRFLIYSDYKVKYVQNFTDIDDKILKRAKEENSSMNEVSEKNITEFHKDMDALGIMRPDSMPKATNHICNICSFIKVLEDKGFAYARGGDVYYSVFKNKNYGKLSNQNILEQNINQQGRITTDESNKKENPQDFALWKKAKENEPSFDSPWGKGRPGWHIECSAMVKDELGETIDIHLGGSDLIFPHQKRDA

SEQ ID NO: 186798 - protein, 245 aa, Unknown
  Bacterial polypetide isolated from the Sargasso Sea
WHLECSVMSKKYLGNTFDIHGGGRDLIFPHHENEIAQSICANKTKKFANYWVHNGFITMSKEKMAKSQGNILKISDFKNKYNGQVLRLALMSAHYTQPLDWNDKLMNECQKTINKWYDCYVSVNKKILIKDDDLQPLYDDLNTPGYLANLHKLYDKAKDGNKTDKEVFTTACNFIGLLKEPKDNWINFKKEMLSLSEKEILIKIKERNKAREDKNYKLADKIRDDLLDKGILIEDKDGKTIWKIK

SEQ ID NO: 186799 - protein, 202 aa, Unknown
  Bacterial polypetide isolated from the Sargasso Sea
MNKDIFLTNSYGGKKDKFKPIDENNIKMYVCGPTVYDDPHIGNARPLVVFDILYKVLKCKYGKNRVTYVRNITDIDDKIIQSSKDKKISIAELTNKINTNFQEDCNYLNCETPNFQPKATENINEMVEMISSLIKKGFAYESKKHIYFEVKKFNDYGKLSNKKIEDLISGSRVDVSSNKKNPEDFVLWKPSSEDEPSLGISW

SEQ ID NO: 186800 - protein, 321 aa, Unknown
  Bacterial polypetide isolated from the Sargasso Sea
KENFKPVDESHVRVYACGPTVYNFAHIGNARMAVVNDLLINVLRTQYKKVTYVSNITDIDDKIIEAAHDLNEPIENLTKKYTKIYNEDMSYLNVQLPDVQPRATDHIKEMIDLISKLIKSGNAYEKNGHVLFYVPSFSKYGILSKRNRDEQIAGSRVEVAPFKKDPADFILWKPSPDPMPGWESPWGFGRPGWHLECSAMSEKTLGLPFDIHSGGMDLVFPHHENEIAQTCSLHNNHDPDSFAHFWFHNGFVNVEGEKMSKSIGNIRLVHDLKNQYNGEVLRLTLLSAHYRQPLNWTKEIIDQNSKMLDRLYRCLKDLQDI

SEQ ID NO: 186801 - protein, 255 aa, Unknown
  Bacterial polypetide isolated from the Sargasso Sea
TYVSNITDIDDKIIAASEEKNIPIKELTTKFTNIYNEDMSVLGVSLPDIQPKATDHINEMIELIKLLIQNNFAYEKKGHVLFDVPKFKHYGSLSGRNRDEQIVGSRVEVAPYKKDPTDFVLWKPSPSPKPGWESPWGFGRPGWHLECSAMSEKTLGLPFDIHSGGADLIFPHHENEIAQTCAAHNNTHDLKSFAKYWFHNGFVNVEGEKMSKSIGNIHLVNELNKEFKGEVLRLTLISAHYRQTLNWTKNIIKQN

SEQ ID NO: 186802 - protein, 325 aa, Unknown
  Bacterial polypetide isolated from the Sargasso Sea
LRSIDYEVQYIRNITDVDDKIIARAKELNITPSELTEECIDSMEKDFHSLGMIRPDAEPRATENIDSIISLITKLIDKGHAYVGESDVYFSTESFNEYGKLSKRKLKDMLSGARIDIDLDKKNPADFVLWKKDTEGLKWDSPWGPGRPGWHIECSAMSMDALGETFDIHGGGSDLKFPHHENEIAQSECVTGKEFAKVWMHTGSLRIDDQKMSKSLKNFITIKEAINENAPEVLRFFLISSHYRSPLNYSDEALKEAKNSLDRLYNSLQDLSYETDKHLPSEYSEKFHEAMKDDFNSPSAISVLFEIVKTINILKKEDKLTQASI

SEQ ID NO: 186803 - protein, 295 aa, Unknown
  Bacterial polypetide isolated from the Sargasso Sea
EEQIAGSRVEVAPFKKDPADFILWKPSDDTQPGWDSPWGIGRPGWHTECSAMSEKTLGLPFDIHGGGRDLIFPHHENEIAQSCCSSASIDDPTSYARYWMHNGFVTIDGEKMSKSLGNIILVKDLIEDHHGEVIRLALLSSHYRQGLDWNEKIIHQSKKLLDKLYAILKDLENTNQDDSIQSNKDVIGPLMDDLNTPGLIAELNKIVKEFSTIKDDEKPAAKSKLIFIGSILGILGDKNFNHVSDEFKNKIEELIQKRTEAKQDKSFDKADKIRQELLDLGVEIKDSSDGTSWNP

SEQ ID NO: 186804 - protein, 247 aa, Unknown
  Bacterial polypetide isolated from the Sargasso Sea
MGKLKLHNTLGNKVEEFIPIDKNNIRIYACGPTVYNYAHIGNARMAVVNDLLVRFLRTIYPKVTYVSNITDIDDKIIAASEEKNIPIKELTTKFANIYNEDMSVLGVSLPDIQPKATDHINEMIELINLLIQNNFAYEKEGHVLFDVPKFKHYGSLSGRNRDEQIVGSRVEVAPYKKDPTDFVLWKPSPAPKPGWESPWGFGRPGWHLECSAMSEKTLGLPFDIHSGGADLIFPHHENEIALDMCSS

SEQ ID NO: 186805 - protein, 392 aa, Unknown
  Bacterial polypetide isolated from the Sargasso Sea
MNKDILLSNSLSNKKEIFVPIDDKKIRMYVCGPTVYDDPHIGNARPLVIFDILFKVLKCKYGNKNVTYVRNITDIDDKIIEASKNKKISIKDLSQDITKRFHKDCEYLNCDKPTFEPRATDNIALMINMVENLIEKKFAYESNRHVYFEVSNFKDYGKLSNKKQEELIAGSRVEESENKKKQEDFVLWKPSKKDEPGWESPWGRGRPGWHLECSVMSKKYLGDKFDIHGGGRDLIFPHHENEIAQSRCANETDVFSNYWVHNGFITLSNEKMAKSQGNILKISDFKKNVNGQALRLALISAQYRQPLDWNDKLLDESQKTIDKWYKSYVGLDKPKQISDDDLLPLYDDLNTPKYIANLHKLFEKSQSGNLEDKKIFVSACNFIGLITETKDK

SEQ ID NO: 186806 - protein, 322 aa, Unknown
  Bacterial polypetide isolated from the Sargasso Sea
MQIFLTNNLSNKKEHFVPKEKKNVGMYVCGPTVYDDPHIGNARPLIIFDILFKLLKNEFPLVTYVRNITDIDDKIIKSSQEQKISTKELTEKVTSSFLKDCEFLNCENPTHQPKATEHIDLMIEMINGLIKKGFAYENKNHVYFEVKKFSDYGKLSNKNLEDLVAGSRVEISENKKNSEDFVLWKPSNNNEPAWDSPWGKGRPGWHLECSAMSKKFLGKEFDIHGGGIDLIFPHHENEIAQSRCANDTKVFANYWVHNAFITMSNEKMAKSQGNILKIKDFRNKISGQIIRLALISAHYKQPLDWNDKLLSDCESTLDKWYK

SEQ ID NO: 186807 - protein, 335 aa, Unknown
  Bacterial polypetide isolated from the Sargasso Sea
MINSVSKNNAYVLDDGEVLFSVNSFDNYGSLSRQNLNSMNVGNRVEIDKRKKNPLDFVLWKPADKNNIGWNSPWGYGRPGWHIECSAMCKELLGGSFDIHGGGIDLLFPHHENELAQSVCANDTKQLANYWVHNGFVNIEGQKMSKSLGNYLTVEDLRKKDIYGAVIRFVLLSTHYRQPLDWTNRKVSEAQNILTKWLSLFDKKDVPIHGKPTKKILEALCDDLNSPLVLTEMHNLLKIEDLDGFINSMVFLGFTPNELNKKSNTKNEFDNNIIHELINDLILARQTARDNKDYRKSDEIRIRLEKAGVSINDLGKNTKWTLKPFFNPKKLLEEN

SEQ ID NO: 186808 - protein, 424 aa, Unknown
  Bacterial polypetide isolated from the Sargasso Sea
YVCGPTVYDFPHIGNARPLVVFDVLYRVLSKIFGKNNITYVRNITDIDDKIIESSKNKKISLDELTSSITKSFHDDCQYLNCLKPSFEPKATEHIKGMINMTENLLKNNHAYEKDKHVYFSINSFKNYGKLSKKNPDELVAGARVEVSKSKKHPLDFVLWKPSATDDPGWDSPWGRGRPGWHLECSVMSEKFLGKNFDIHGGGLDLVFPHHENEIAQSCCANKVEKFANYWLHNGYVTFNKEKMSKSLGNIVTIKEMRGTISGQVIRLALLSSHYKQPLDWNEKLINESQSTLDKWYTQFEKTNKEELNEDLLQPLLEDINTPGYISKLHSLYDKASKGDKSSKKIFLAGCKLIGLLEEDLEIWKKFKKTKSKIDEKTIKIKIKNRENARKKGDYKSADNIRKELENNGVIIEDKGDTTTWKYK

SEQ ID NO: 186809 - protein, 361 aa, Unknown
  Bacterial polypetide isolated from the Sargasso Sea
SVAYEEDMKNLGIIEPTFIPKVTENIPSIISMIKKLEKLNHAYVSNNHVLFDVESFPKYGELSKLNQKDLIAGARIEVAPYKKNPSDFVLWKPSDNDTPGWDSPWGRGRPGWHIECSAMIKKFLGNSIDIHGGGQDLVFPHHENENAQSKCANNSILANYWVHNGFVTFNKKKMSKSLNNIIILNDLIKKFRGESIRFALISAHYRQPLDWNESTMINSENSLNNLYSTLLENIDIKAKKSKQTNVEKALLNDLNTPEAIASLYGTVKDLQQAKKNSLKSEIKGILLRESYFLGILQKDPFEWLKKPDNNTLSDNEIKKLIEERSLARKNKNFKEADRIRNNLLHHGISIKDEKDETIWEK

SEQ ID NO: 186810 - protein, 233 aa, Unknown
  Bacterial polypetide isolated from the Sargasso Sea
MSLDIFLTNNLTNRKEKFIPQDKNNVRMYVCGPTVYDDPHIGNARPVVIFDILFKVLKNEYPKVTYVRNITDVDDKIIKSSQENNISILDLTKKITQSFNEDCIYLNCENPNHQPKATEHISEMIEMISELIKKGFAYENKKHVYFEVKKFKDYGQLSNKKLDELVAGSRIEVSDNKKNPEDFVLWKPSQLEEPSWDSPWGKGRPGWHLECSAMSKKYLGKEFDIHGGGIDLL

SEQ ID NO: 186811 - protein, 459 aa, Unknown
  Bacterial polypetide isolated from the Sargasso Sea
MAIKLFNTLSKQKETFIPQDPKKVTMYVCGPTVYSHPHIGNARAALIPDILYRLLLLYYPGDVVYIRNITDVDDKILKAANEQGVKPTEISEKFTDVYLNNMAQLNILHPTHQPKVTEFMDSIISMIHKIIDSGHGYVENNHVLFNTEKDNNYGCLSRKKLDEMIDGARVEVAEYKKSPRDFVLWKPSDNDSFGWDSPWGYGRPGWHIECTSMIKKIIGDHCTLDIHGGGNDLIFPHHENEIAQGSCISTSKYCNYWFHNGIVLVNKKKMSKSLGNVILLDDLLKEHNSSVIRLALLSAHYRQPLNWTEQTIINAKNLYKKLVSAVDASDILTSSDLLTSAELHGPFPQCAEIQDILSDDLNTPEVINYLSRLAKTARNNTDDALKLAQSMKFIGLDLVKPSYKTSLDDKYIINLIKQRDEYRIKKDFGSADEVRDKLLDMGIELRDSDGKTTWKYTED

SEQ ID NO: 186812 - protein, 247 aa, Unknown
  Bacterial polypetide isolated from the Sargasso Sea
PGWHLECSVMSKKYLGDNFDIHGGGRDLIFPHHENEIAQSRCANESKSFSNYWVHNGFITISNEKMAKSQGNILKIKDFYQKYNGQVLRLALMSTHYKQAMDWNEDLLIQSEKILDKWYEFKKNTKGKVLIPEEDLSPLYDDLNTPGYIANIHKLYEKAFKGSDKDKEIFTTACNFVGLLTETKSQWLEFKKDRLKISESDILQKIKERNLARDNKNYELADKIRNDLLDKGILIEDKDDKTTWKIK

SEQ ID NO: 186813 - protein, 460 aa, Unknown
  Bacterial polypetide isolated from the Sargasso Sea
MALQIQNTLSGRKEIFKPVDPSHVRIYACGPTVYNFAHIGNARMAVVNDLLVRVLKTQFKKVTYVSNITDIDDKIIEASKETGEDINVITSKYTEIYNNDMGALGVNLPDIQPRATDHIKEMIELIQKLIDENKAYEKDGHVLFHVPSFEKYGVLSKRNRDEQIAGSRVEVAPFKKDPADFVLWKPSPSPLPGWKSPWGFGRPGWHLECSVMSEKSLGLPFDIHSGGIDLVFPHHENEIAQTCSISTNKDPKDFAAYWFHNGFVNVEGEKMSKSIGNIRLVHELNKKYKGEVLRLTLLSAHYKQPLNWTEEIIEQNSKMLDRLYRVLLELSDINIDPDLPSNSIMETFLDDLNTPKVIAKLNEEANSVSSASDSKRVDIKKNLLSTGKILGILENEPENWLGYNQNSGDNSEEIERLINERNEARRSKNFSLADTIRDTLREKGIEIEDTDKGTIWRKSR

SEQ ID NO: 186814 - protein, 461 aa, Unknown
  Bacterial polypetide isolated from the Sargasso Sea
MILKLYNSTTSQKEDFKSISPNIVSMYCCGPTVYDAPHLGNFRTFVFYDLVKRVLIQNGFEVNQVINITDIDDKIIDKVNSGAIGYKELTAKFNDMFLQHSLSLNIQEANQYPKTSDHVEAMIGFIKALIDKEYAYNVDGNIFFDTEKYSKYGKFVNIENIDRLESEDDGLGKKNQKDFALWKTWKEEDGDITWESEWGKGRPAWHTECAVLATQSLGKTIDIHCGGVDLKFPHHENESAQVEALLDSVFSNYWLHSEHLILEEEKMSKSLGNILNIGDLLNQYSAETIRLFLLSSHYRSKIYFSDEKLSDSSKMIDKINRFVKSVGLDTLNHNGDTNPSGDYLRFVESLNDDLNTPEALGIFFDFINKKNKKIHEDSLSEEDIEESKKFILGFNSIFQIIHPSVLIDEEVPGEVQNLAFLREEMRDKKNWKEADRLREEIEKMGWLIEDSESSQKLVRKK

SEQ ID NO: 186815 - protein, 453 aa, Unknown
  Bacterial polypetide isolated from the Sargasso Sea
MSKDIFLTNSFGNKKEKFIPINSKRIGMYVCGPTVYDDPHIGNARPLVVFDILFKILKSKFNNSEVKYVRNITDVDDKIITSSKEKKISISELTQSITANFHKDCEYLFCQKPTEEPKATENINLMIEMISDLISKKFAYENNNHVYFEVKKFSDYGKLSNKNLDDLIAGSRVEVSENKKNAADFVLWKPSKNDEPSWPSPWGKGRPGWHLECSVMSKKYLEKEFDIHGGGRDLIFPHHENEIAQSRCANETKTFAKYWLHNGFITMSNEKMAKSQGNILKIKDFKNKISGQVLRLALINTHYRQPLDWSDELINSCQNTLDKWYTVYTKTNQLNSIPEDILEPLLDDINTPGYIAKLHELYSLAVKGKETDKILFNQACNFIGLLLEDNNKWNSYKKKNIKISEKEILSKIKERNNARKNKEFDLADKIRNELSENGILIEDKDDTTIWKYK

SEQ ID NO: 186816 - protein, 453 aa, Unknown
  Bacterial polypetide isolated from the Sargasso Sea
MNKDIFLTNSLGNKKEKFVPINKNKIGMYVCGPTVYDDPHIGNARPLVVFDILYKVLKCNYGSKSVSYVRNITDVDDKIIQSSLEKKISIEDLTKEVTTNYHSDCVYLKCEKPNEEPKATENISLMVKMTEELIKKNFAYINNNHVYFEVKKFKDYGKLSNKNLDELIAGSRVEISENKKNPEDFVLWKPSKENEPSWDSPWGKGRPGWHLECSVMAKKYLGTKFDIHGGGRDLIFPHHENEIAQSRCANDTDVFANYWLHNGFITISNEKMAKSQGNILKIKDLKKNINGQVLRLALISAHYKQPLDWNDKLLKECQKTLNKWYDCYVEVKKKILIPEKFLEPLYDDLNTPGYISNIHKLYDKAQNGTIEDKEIFNTACNFIGLLTDTKDQWLKFKKEQSNITEDEILSKIKERDKARKNKDYKLSDKIRNELLNKGVLIEDKDGKTTWKLK

SEQ ID NO: 186817 - protein, 242 aa, Unknown
  Bacterial polypetide isolated from the Sargasso Sea
MDKDIFLTNSLGSKKEKFSPINPKKIGMYVCGPTVYDNPHIGNARPLIVFDILFKVLKCKYGNNSVTYVRNITDIDDKIIQSSLEKKISISDLTYEITKTFHDDCEYLHCEVPSHEPKATENISLMIEMISKLVKNNKAYESNQHVYFDINKFKDYGKLSNKNLDELISGARVEISKNKKNPADFVLWKPSSVNEPSWESPWGRGRPGWHLECSVMSKKYLGDKFDIHGGGIDLIFPHHENE

SEQ ID NO: 186818 - protein, 453 aa, Unknown
  Bacterial polypetide isolated from the Sargasso Sea
MDKDIFLTNSLGNQKDKFKPINEKEIGMYVCGPTVYDNPHIGNARPLIVFDILFKVLKCKYGNNSVTYVRNITDIDDKIIKSSLEKKISINDLTKGITKIFHDDCKFLNCEVPSHEPKATENISLMIEMISKLIKNNNAYESNHHVYFDVNKFKDYGKLSNKNLDELISGARVEISENKKNPADFVLWKPSSENEPSWESPWGRGRPGWHLECSVMSKKFLGDKFDIHGGGIDLIFPHHENEIAQSRCANENEIFANYWVHNGFITISNEKMSKSQGNVLTINDLKNKINGQVIRLALISAHYKQPLDWNEKLLSESEKTINKWYESYIDLKKQVLIPEDYLSPLYDDLNTPGYIANLHKLFEKSQKGSSKDKEIFMSACNFIGLLNEDKDTWEKFKQNKSKISQEEIERKINERNIARKNKDYKAADNIRNELLDKGVLIEDKDDKTLWKLK

SEQ ID NO: 186819 - protein, 316 aa, Unknown
  Bacterial polypetide isolated from the Sargasso Sea
MNKDIFLSNSLGGKKEKFVPIDKKKLGMYVCGPTVYDDPHIGNARPLVVFDLLFKVLKCKYGNKSVTYVRNITDIDDKIIQSSKEKNISITELTSRITKKFHDDCEYLNCEIPTHEPKATDNIEEMINMIGELIKTQFAYESHGHVYFKVKNFKDYGKLSNKNLDDLIAGSRVELSDKKENQEDFVLWKPSKDDEPSWESPWGKGRPGWHLECSVMSKKYLGNTFDIHGGGRDLIFPHHENEIAQSVCANKTEKFANYWVHNNFITMSKEKMAKSQGNILKISDFKKKYNGQVLRLALISTHYSQPLDWNEKLMDE

SEQ ID NO: 186820 - protein, 326 aa, Unknown
  Bacterial polypetide isolated from the Sargasso Sea
MIEMSSSLISKGFAYENKGHVYFSVNSFKNYGKLSNKNLEELKAGSRIEVSDLKKKPIDFVLWKPSSNEDPGWDSPWGRGRPGWHLECSVMSEKYLGKNFDIHGGGLDLIFPHHENEIAQSCSNNSSDSFANYWVHNGFVTFNKEKMSKSLGNIVTISQAVKKYSGEVVRLALLSAHYSQPLDWNDELLQNQKNTIDKWYNLYEETKDQDILDISETLLDDLNTPGFIAKIHELYNNANNGDKKSKSLFNNACRLIGLFNTSKEKWENIKKSNIKVSEDYILKKITERTKAKKDKNFTLADQIRKDLLDKGILIEDQKDKTVWKLK

SEQ ID NO: 186821 - protein, 333 aa, Unknown
  Bacterial polypetide isolated from the Sargasso Sea
MKIFNSLSGKKETLVPIEDNNIRMYVCGMTVYDDTHIGHARTFVSFDLIVRYLRDLGYEVQYIRNITDVDDKIISRAKELGWDPSDLVKKYISSMDEDFSALGMIKPDQEPRATDNIDSIIRLIEILIDKGHAYEGESDVYFSTESFESYGKLSKRKVEDMLAGARIDVDLDKKNPADFVLWKKDTEGLKWDSPWGPGRPGWHIECSAMSMDALGETFDIHGGGSDLKFPHHENEIAQSECVTGKEFAKVWMHTGSLRIDKEKMSKSLRNFITIKDALKHNTSEVLRFFLISSHYRSPLNYSEEGLSESKTSLDRLYNALKDLTLDENLVSKE

SEQ ID NO: 186822 - protein, 262 aa, Unknown
  Bacterial polypetide isolated from the Sargasso Sea
MSLQLQNTLSGKKEFFKPVNPNHVRIYACGPTVYNFAHIGNARMAVVNDLLVRVLKTQFKQVTYVSNITDIDDKIIEASKETGEDISVITNKYTEIYNNDMSALGVNLPDIQPRATDHIKEMIELIKKLIDENKAYEKEGHVLFHVPSFDNYGILSKRNRDEQIAGSRVEVAPFKKDPADFILWKPSPSPLPGWDSPWGFGRPGWHLECSVMSEKSLGLPFDIHSGGIDLVFPHHENEIAQTCSISENKDPKDFATYWFHNG

SEQ ID NO: 186823 - protein, 360 aa, Unknown
  Bacterial polypetide isolated from the Sargasso Sea
MNKQLNIFNTLSGKKEKFIPINTGKVGMYVCGPTVYDFPHIGNARPLVVFDVLFRLLKKLNGNDKVTYVRNITDIDDKIIEASKNKKIPIDKLTNDITKNFHEDCKYLNCLKPNFEPRATEHIKGMISMTENLLNNKHAYEKDKHVYFSVNSFKNYGKLSNKKPGELDAGSRVEISKLKNNPLDFVLWKPSSTDDPGWDSPWGRGRPGWHLECSVMSEKYLGKNFDIHGGGLDLVFPHHENEIAQSCCANKTDKFANYWLHNGYVTYNKEKMSKSLGNIVTMQKMKNKINGQVIRLALLSSHYKQPLDWNEKLVNESQSTLDKWYSLYEPVKESNLDENLVGPLLEDLNTPGFISKLHLL

SEQ ID NO: 186824 - protein, 296 aa, Unknown
  Bacterial polypetide isolated from the Sargasso Sea
MAVSLRLTNTLTRRTEPFTPLTPGKASIYCCGVTVYDLCHLGHARSYINWDVLRRFLIWRGLEVTFVQNFTDIDDKILKRAAEQNSSMTEVSERNIDAFHQDMDALGILRPDRMPRATQCLDGIRALIGELEAKGAAYSADGDVYFAVMKHAGYGKLSGRDLSEQQDNAAGRVADAEEARKQHPFDFALWKGAKPGEPSFPSPWGEGRPGWHIECSAMVRAELGDTIDIHLGGADLVFPHHENEIAQSEAATGQELARVWMHNGMVNVGGQKMSKSLGNFTTIRALLESGVSPMTL

SEQ ID NO: 186825 - protein, 260 aa, Unknown
  Bacterial polypetide isolated from the Sargasso Sea
GWDSPWGKGRPGWHIECSAMSEKLLGKTFDIHGGGQDLIFPHHENEIAQSECANGEKFANYWVHNGFVTVEGNKMAKSDGNFVTVNELKEKYQGEVIRFTMILTHYRQPLNWTNDNLQESKKTLDKWYQYFSEVDFKPDLSTKIDENVMNALNDDMNTPQAIAELHKLFKNCKSTNPDSLNKFLISAQFLGLMNDEPSQWLSWGKDNISVDQNKIESLIAQRNTARVNKDFSEADRIRDELENLGIVLEDKGTETTWKTK

SEQ ID NO: 186826 - protein, 457 aa, Unknown
  Bacterial polypetide isolated from the Sargasso Sea
MSLKLYNSLSSKKEVFKSISDKKVKTYGCGPTVYNDPHIGNFRTFVFYDLLNRVLQLNGYETETAVNITDIDDKIIDRVNQENTSLKEITSKYELSFLELSKSLKILPNNHNPRATEYVEEMIEFIQALINRDLAYEMNGNIFFDIEAYPKYGKFVNISDDLETEDNELSKKNRNDFTLWKAKKDSDGDIFWNSEWGKGRPGWHTECAVMIKTLFDGRIDIHCGGIDLKFPHHENESAQIEAIQKHNLSNYWLHAEHLNMDDVKMSKSLGNFIDVSTLIEKNGSDVVRLFLLSAHYRTKVSFSQKKLDECKKMIEKIKRFAKNFKIDNKNIELKFSSEHELFFDALNDDLNTPGAIGVFFSFISEMNKKIAENTINDADKEKSLVFLKLFNSIFDILDFNNLHDQNIPKELQDLLVSRQEARKNLDWKLSDSIRDKIESLGWQVEDTSSGQNLSKKK

SEQ ID NO: 186827 - protein, 443 aa, Unknown
  Bacterial polypetide isolated from the Sargasso Sea
MLKIYNTLTKKKESFVPIDENNVRYYSCGPTVYNNIHIGNARAFVCADLLAKVLKGIYKKVTFVSNITDIDDKIIEASVKEKISIKELSKRYFEQYKKDTKFLGIDDPDNQPFATDFIKEMIDFIKVLIDKDAAYVANGNVLFRVKSFKNYGILSERIIQEQDSGSRVDVETYKEDPNDFTLWKPSTDDEPGWDSPWGLGRPGWHLECSVMSEIVLGVPFDIHGGGNDLKFPHHDNEIAQTCAYHSNESAESFAKYWFHNGFLNLDNEKMSKSLGNVVYIDDLKKNFKGNEIRLALLSTHYRQPIPWSLELLEQSKNIYQKLNREFKKYNLKELKFYKDSKVGKALLDDLNTPLAIREMQRLVSSNDSDLEENISTFKYIFEGSDQDLSIDKKLSNEIEKLIEERNNARNNNDYEKADKIRDKLSEMNVKINDVNGKTEWEIL

SEQ ID NO: 186828 - protein, 461 aa, Unknown
  Bacterial polypetide isolated from the Sargasso Sea
MEPIVQYLKIFNTLNSKKETFKAIDSNHVKIYACGPTVYNYAHIGNARMAVVFDTFVRTLKAVYPKVTYVSNITDIDDKIIEAAKEQEVEISQITDKYTKIYNEDMARLNVLPPDIQPKATEFIPEMINLIEDLISKDFAYEKEGHVLFHVPLYLNYGKLSNRNREEQIAGSRVEVAPFKKDPADFILWKPSDDTQPGWDSPWGIGRPGWHTECSAMSEKTLGLPFDIHGGGRDLIFPHHENEIAQSCCSSASIDDPTSYARYWMHNGFVTIDGEKMSKSLGNIILVKDLIEDHHGEVIRLALLSSHYRQGLDWNEKIIHQSKKLLDKLYAILKDLENINQVDSIQSNKDVIGPLMDDLNTPGLIAELNKVVKEFSTIKDNEKPAVKSKLIFIGSILGILGDKNFNHVSDEFKNKIEELIQKRTEAKQDKNFDKADKIRQELLDLGVEIKDSSDGTSWNLK

SEQ ID NO: 186829 - protein, 388 aa, Unknown
  Bacterial polypetide isolated from the Sargasso Sea
MQNLLLSNTLSKKKEIFVPIDKNNIRMYVCGPTVYDFPHIGNARPLIVFDILFRVLKTIYGKDNVTYVRNITDIDDKIIKASNEKNIDFKKLTDEVTFSFNEDCKYLGCLKPTFEPKATDHIEEMIEMINSLLNKNYAYEKAGHVFFDINKFSSYGALSKKTIKDLDPGSRVEISKIKKNPGDFVLWKPSKNNEPSWDSKFGKGRPGWHIECSAMSKKYLSSSFDIHGGGLDLIFPHHENEIAQSFCANDKLLAKFWVHNGYVTMNKKKMAKSENNFVTINELKKKYNGQTVRLAMLSTHYTQPFDWNEKILKDAKTILDKWYEFYIDENIHISDSNKKFLLDDLNIPKMIANIHRLYKKAKEGEEDAAKQLTASCKFLGLFSENKET

SEQ ID NO: 186830 - protein, 332 aa, Unknown
  Bacterial polypetide isolated from the Sargasso Sea
MAKDIFLTNSLGGKKEKFTPKNEKSIGMYVCGPTVYDDPHIGNARPLVVFDILYKILKNRYGSTSVKYIRNITDIDDKIIKASNDQNISINDLTSKITENFHKDCNYLKCETPNSEPKATENIKQMIEMITELEKKGFAYSKDKHVYFEVKKFSDYGKLSNKKLDELIAGSRVEVSEIKKNPEDFVLWKPSTDKEPSWDSPWGKGRPGWHLECSVMSKRYLGEEFDIHGGGRDLIFPHHENEIAQSRCVNETNSFANYWVHNGFITLSNEKMAKSQGNIIKIKDFKNKYNGQVLRLALISAHYRQGLDWNEKLISECEKTLSKWVFSPYSDV

SEQ ID NO: 186831 - protein, 233 aa, Unknown
  Bacterial polypetide isolated from the Sargasso Sea
MNKDIFLTNSYGGKKEKFQPIDKNKVKMYVCGPTVYDDPHIGNARPLVVFDILFKVLKCKYGKDNVTYVRNITDIDDKIIQSAKDKKITISELTNKININFQQDCNYLNCEEPNFQPKATENINEMIDMISSLIEKGFAYESKKHIYFEVKKFKDYGKLSNKKIEDLISGSRVEVSSNKKNAEDFVLWKPSNEDEPSWPSPWGNGRPGWHLECSVMSKKYLGDKFDIHGGGRD

SEQ ID NO: 186832 - protein, 204 aa, Unknown
  Bacterial polypetide isolated from the Sargasso Sea
MLHLYNTRTREKAKFVPLQEGKVGLYVCGITVYDLSHMGHARTYLSFDVLVRYMRHLGLDVKYVRNITDIDDKIIARANENGESFEALTARTIAMMHEDFAAINLLEPDVEPTVSGHMDEIIEIIQRLMDKGYAYQAKSGDVLFDVSKYEDYGKLSKQDLDQLKAGARVEVAAGKDDPLDFVLWKTTKPGEPAWQSPWGEGRPG

SEQ ID NO: 186833 - protein, 228 aa, Unknown
  Bacterial polypetide isolated from the Sargasso Sea
MWWARLIFPHHENEIAQSECANEEKFANYWVHNGFVTVEGSKMAKSDGNFVTVNELKEKYQGEVIRLTMILTHYRQPLNWTNDNLQESKKTLDKWYQYFSEVDFKPDLSVKIDENVMNALNDDMNTPQAIAELHKLFKNCKSNDHDSLNQFLISAQFLGLMNDEPSQWLSWGKENISVDQNKIESLITQRNTARANKDFAEADRIRDELENLGIVLEDKGTETTWKTK

SEQ ID NO: 186834 - protein, 279 aa, Unknown
  Bacterial polypetide isolated from the Sargasso Sea
MTIKFYNSLTNQKEDFVPIQEGEVGMYVCGMTVYDHCHLGHARAMMAFDILARYLRYQDYKVNFIRNITDIDDKIIERANENKEKIEDLTARTIASMQEDFDQLGLVLPNNQPRATDHIEGMIKMITELIERGHAYHSESGDVFFAVRTFPEYGKLSNKNIEDLNPGSRIEEDESKRDPLDFVLWKSAKSNEPSWESPWGSGRPGWHIECSVMSLENLGEHFDIHGGGPDLLFPHHENEIAQSECASNCKLANYWMHSGLLKINGEKMSKSLGNFAMLK

SEQ ID NO: 186835 - protein, 355 aa, Unknown
  Bacterial polypetide isolated from the Sargasso Sea
GMVRPDVEPRATQHIGEIIELVQSLLDKEHAYVADNGDVMFIVDSYADYGKLSGQDLEQLQAGARVDVVDAKRNPLDFVLWKMSKPGEPTWDSPWGPGRPGWHIECSAMNSKHLGNHFDIHGGGSDLQFPHHENEIAQSCCAHGGDYVNTWMHSGMVMVDKEKMSKSLGNFFTIRDVLAHYDAETVRYFLMSGHYRSQLNYSEDNLKQARAALERMYTALRDLPAAAAAGGDEQVARFKEAMDDDFNTPEAYSALFDLVREINRQKGEDMAVAAALGARLRELGAVLGILQQDPDAFLKGDEADEEVAEIEQLIAQRNQARADKNWAAADAARNRLTEMGIVLEDSAGKTSWRRA

SEQ ID NO: 186836 - protein, 464 aa, Unknown
  Bacterial polypetide isolated from the Sargasso Sea
MGILKIHNTLGNELEEFIPINHKHVRVYACGPTVYNYAHIGNARMAVVNDLLIRFLRTIYPKVTYVSNITDIDDKIIAASQETKTPIKELTQKYTKIYNEDMAMLGVNLPDIQPRATDHINEMIDLTSKLIENNFAYEKDGHVLFHVPAFKKYGTLSSRNRDEQIVGSRVEVAPYKKDPTDFVLWKPSSESMPGWESPWGFGRPGWHLECSAMSEKTLGLPFDIHSGGADLIFPHHENEIAQTCCAHNNIEDIKSFSKYWFHNGFVNVEGEKMSKSIGNIKLVNELVKEYKGEVLRLTLLSAHYRQPLNWNRDIIKQNSTMLDRLYRSLKDLEKTDAYKDNNKIDESIIRGLYDDLNTPKVIAELNILNNKISNADEKTKGKIKYNLLEIGKIFGILQENPNKWLGYGKAGNIEETDIERLIKKRNEARGNKNFDMADQIRDELKNKGIEIEDTANGTIWRNVE

SEQ ID NO: 186837 - protein, 260 aa, Unknown
  Bacterial polypetide isolated from the Sargasso Sea
MKIKLYNSLSNKKEDFSPLVKDEVKMYVCGPTVYNDPHIGNARPAVVFDILYRLLLNQYKNVVYVRNITDIDDKIIDAANKRKVTIEEISDQYTESYHDDMKYLNNLSPTKEPKATDYIDEMVLIIQKLISKGFAYEKEKHVLFNVKKYDLYGKLSGRNLEDMIAGARVEVAPYKENEHDFVLWKPSDLDSPGWESPWGTGRPGWHIECVAMINKILGPVIDIHGGGQDLIFPHHENEIAQSCCANDNETFVRFWMHNGY

SEQ ID NO: 186838 - protein, 465 aa, Unknown
  Bacterial polypetide isolated from the Sargasso Sea
MPLQFYNTIKRKKDKFDPISKEMVKIYTCGPTVYDIAHIGNFRTFLFEDLLKRYLIFKGFNVYHVMNITDVDDKTIKRAKKNKKNFNKLTSKYADLFMKDLEFLNILPADVYPKATDHIDEMISMISKLEKNGIAYRSKDSSVYFRLSKDKDYGRLAKLNLSDLKTTDRITSDEYSKDDPQDFSLWKSWDADDGDIYWDSPWGRGRPGWHIECSAMSIKYLGEHFDIHCGGVDNIFPHHENELAQSLSATDKSFVNYWMHSEHLQVKDKKMSKQEGNFFTITDLISEGFLAEEIRFVMLSAHYRTKLTFSIDQCLESRTAIQRISALYNRLKKIPNRGSSKLKLPSERKDFIAAMDNDLDAPKALAILFTWIRLMNKKLDHNGDKNMNIQEINGSIEFLNQVDSIFGILLKEDFIPKEVQSLIEDREKYRKIGDWALADQVRDKIYDLGWIIEDGSDGTHVKPKK

SEQ ID NO: 186839 - protein, 312 aa, Unknown
  Bacterial polypetide isolated from the Sargasso Sea
MSLNLYDTFSNSKKKFEPIDPKNIRMYVCGPTVYDYPHVGNARPVIVFDILFRILQNVYGTEHVTYVRNITDVDDKIINASQENNEDINELTSRTINYFHTDAKYIGAMEPSFEPRATDHIDEMINIIETLIEKNYAYVADNNVLFSSTKFSKYGSLSGKNLEEMIAGSRVDVESYKQEASDFILWKPSKDNEPGWDSPWGKGRPGWHIECSAMSEKLLGKTFDIHGGGQDLIFPHHENEIAQSECANGEKFANYWVHNGFVTVEGSKMAKSDGNFVTVNELKEKYQGEVIRLTMILTHYRQPLNWTNDNLQ

SEQ ID NO: 186840 - protein, 153 aa, Unknown
  Bacterial polypetide isolated from the Sargasso Sea
MPLKLYNTLTRTKSSFEPLDKNKIRMYVCGPTVYDYAHIGNARPVIVFDLLSRILCHLFGKEHVLYVRNITDVDDKIIAAHQQSGEEINSITSRTIKAFHKDMRALGNLDPDEEPLATDHIPEMQTLIKILLTKGHAYENNGHVLFDVKSMPD

SEQ ID NO: 186841 - protein, 444 aa, Unknown
  Bacterial polypetide isolated from the Sargasso Sea
MFLYNSLTRKKEKLSKDKIKMYVCGVTVYDRPHLGHALSTVTFDVLHRFLEYSGYDVKRVQNFTDVDDKIINKSKELNISAQEVAEKYIDSFFEDMDALGVRRADVHPRATEDMKEIIELISSLIDNKAAYSSNGSVYFDVSYSSDYGKLSRRNVDEEIDGTRIENDPDKKNVEDFALWKKAPPDEPHWESPWGIGRPGWHIECSAMAKKHLGETIDIHGGGLDLIFPHHENEIVQSESATGLKPFSKIWVHNGLLKRAGDEKMSKSLGNSFDVRDALENYSGNAIRLWILQSHYRQPSTLDDDSLSIAQKSYQRIERALSLEGKNGFDTNKYLDDFEESMNDDLGTPSAVATIFDLVHEINVRNSKSQGIAEGVNLLKNLLNILGFDTENNKLEDKDIIDLLEKRNNFRIEKKYDQADKIRDQLLDLGIEILDSKDGSTYRKI

SEQ ID NO: 186842 - protein, 443 aa, Unknown
  Bacterial polypetide isolated from the Sargasso Sea
MLKIYNSLSKKKEDFVPNDPDHIKFYACGPTVYNKIHIGNARAFISADLLAKVLKGMYSKVTYVCNITDIDDKIIDAAKEENLSIKDISTKYFNQYQEDTALLGISKPDVQPFATDYIDDMIAYIEKLIASDNAYEKDGNVLFRVSSFPNYGCLSDRKLDEHESGSRVKVEDFKESPNDFTLWKPSLDDDPGWDSPWGRGRPGWHLECSVMSESTLDIPFDIHSGGNDLKFPHHDNEIAQTCAYHGNEDPTSFAKYWVHNGFLNLEDEKMSKSLGNVIYIDQLLKKYKGNEVRLALLSTHYRQPIPWSEDLLDQSHNIYVKLQNAFKKYGKIEEKFHANSKIAEILMDDLNTPLAIRTMQDLVSEPNENIENEIATFKYIFEGSNQDLSLSDEQVNEINELVKERDDARNSGDYDRADKIRDKLSKMNVSIKDVNGKTEWEIL

SEQ ID NO: 186843 - protein, 464 aa, Unknown
  Bacterial polypetide isolated from the Sargasso Sea
MTQLRLYNSLTNQKEKFIPIDPSHVRLYTCGPTVYNYAHIGNARPPIVSDILVRLLRHLYKKVTYVSNITDIDDKIINASKEQNRPISEITKKYEKIYNENLSELGIDPPDFQPRATEHIPEMIDQIKALIKNGHAYEAEGHVLFSVNTFPGYGSLSGRDKEEQIAGSRVEVAPYKKDPIDFILWKPSIEDQPGWDSPWGFGRPGWHLECSAMSEKTLGVPFDIHTGGQDLLFPHHENELAQCCGVHIKLDDISSYARYWIHNGMIRFDGDKMSKSLGNIQFINDLLNDHNGETLRLVLMSTHYRQPLNWSAKTIDQSKKTLDRLYRTIKSLNISLDNTNAKPAQEVIDALCDDLNTPEALGQFNLLMKDLENTEGSQKEEKLSIIISTARILGILQSDPDSWLGYQKVKTGMDVNKIEEMIENRNNCRAEKNFQRADEIRDELRSMGIEIEDTAEGTIWKSES

SEQ ID NO: 186844 - protein, 312 aa, Unknown
  Bacterial polypetide isolated from the Sargasso Sea
MSNEQPFQLFNTLSGNKERLEAIDPKHLKIYACGPTVYNYAHIGNARMAVVFDTLVRTLRVIYPKVTYVSNITDIDDKIIEAAMEQNVEITSITEKYTKIYNDDMLKLNVLAPDIQPKATEYIPEMIELIVELIKKDFAYEKEGHVLFHVPTYQNYGKLSKRNRDEQIAGSRVEVAPFKKDPADFVLWKPSTDEQPGWESPWGIGRPGWHTECSAMSKKTLGLPFDIHGGGRDLIFPHHENEIAQSCCTSASIDEPDSYAKYWMHNGFVTINGEKMAKSLGNIILVKDLAENYHGEVIRLALLSSHYRQGLD

SEQ ID NO: 186845 - protein, 359 aa, Unknown
  Bacterial polypetide isolated from the Sargasso Sea
MKIKLYNSNTKSKELFVPIDPKKVTMYVCGPTVYSYPHIGNARGPVIFDVLARLLRREFDLKYVRNITDLDDKIYQAADDEGVHISEVTQRYTRIYQEDMSALGVEKPDLEPLATEHIPEMIEMIEGLIIKGHAYENQGHVFFSVETFDDYGFLSNRTEDEQISGTRIKFSQIKNNQRDFVLWKPSTGQTPGWESPWGYGRPGWHLECSAMAKKYLGRTLDIHGGGSDLLFPHHENECAQSMCSHSGEPLANYWVHNGMIDFDNVKMSKSEGNLLLIRDLLKKIRPEVIRMAFLTTHYRKPINWNDALINDSEKKLDRLYGSIRQLGKISPGEPSEEVMNAIADDINTPKALSELFAIV

SEQ ID NO: 186846 - protein, 465 aa, Unknown
  Bacterial polypetide isolated from the Sargasso Sea
MLKLYNSYSNSIEKIDLNKREVKIYLCGPTVQSSPHLGHGRSAVVFDFLVRYLKYLKYNVIFVRNITDIDDKIIEKSFEENISYKELAMRVSKEFEYAYQKLNCIKPDKEPRATEFIKEIISYIETLIKNEYAYITKSGVYYDISKFDEYLLLSGRTKNEVISGTRVELEEDKNAPEDFALWKFSKENEPYWESPWGNGRPGWHIECSSMIEAILGRTIDFHCGGNDLIFPHHENEIAQSKGAYPKEQFVKYWLHNGMLNLSGKKMSKSDGNIKLLNEYIDEFSGPVLRFFFLKSQYRSPQEFNVNLLKESESTLNNLIDFTYGVDSELKSKEVLDIFEDSMNEDLNTPKMLGSLFKLINESDTLNEQKLSELKSSIKFVFNLLGFDLIKVDNNQKTDEELTKFFKKYEIKFENVNQAVSEFINKREDLRKQKDFESADKMRESILGIGISLEDGTDSGWSWKNS

SEQ ID NO: 186847 - protein, 460 aa, Unknown
  Bacterial polypetide isolated from the Sargasso Sea
MKSSTSFNLYNTLNGKKEVLKAIDPKHLKIYACGPTVYNYAHIGNARMAVVFDTLVRTLRSIYPKVTYVSNITDIDDKIIEAAIDQNVDISTLTEKYTQIYNEDMSKLNVLAPDVQPKATEYISEMIELIEDLISKGFAYEKEGHVLFHVPTYNNYGKLSKINREEQIAGSRVEVAPFKKDPSDFILWKPSTENQPGWESPWGFGRPGWHTECSAMSKKTLGLPFDIHGGGRDLIFPHHENEIAQSCCSSANIEDPSSYAKYWMHNGFVTIEGEKMSKSLGNIILVRELTDSYHGEVIRLALLSSHYRQGLDWNEKVIHQANKLLTKLYEIKDKLDELDTSNKTNNDLSVIEMLMDDLNTPGLIAELNKIVKDFNSSNKDKIVIKEKLTLIGSVLGILQDSTFNNISDELKIKVEKMISERDEAKNNKDYVSADMIRQQLLDIGIEINDTSEGTNWKLKS

SEQ ID NO: 186848 - protein, 213 aa, Unknown
  Bacterial polypetide isolated from the Sargasso Sea
MYVCGMTVYDDTHIGHARTFISFDLIVRYLRSINYEVHYIRNITDVDDKIIARAEELNISPKELTEKYIDSMNEDFMSLGMIEPDLEPRATDNIDSIISLIEILLEKGHAYEGDSDVYFSAESFDSYGKLSRRNLEDMLAGARVEVDTDKKNPADFVLWKKNTEGLKWDSPWGAGRPGWHIECSAMSMDALGETFDIHGGGSDLKFPHHENEM

SEQ ID NO: 186849 - protein, 465 aa, Unknown
  Bacterial polypetide isolated from the Sargasso Sea
MLKLYNSLTKKQEEIKIDKDDVRIYLCGPTVQSSPHLGHGRSAVVFDFFIRYLKYLNYSVLFARNITDIDDKIIEKSQEKNISYRELGDNVWKEFVLAHENLNCLVPDIEPRATAYIPEIIKYIEQLVHNGFGYVTSSGVYYDVSKFEEYLKLSGRSIEDVRTGTRVETEDDKKRAEDFALWKFSKENEPSWDSPWGDGRPGWHIECSTMISETLGKTIDFHCGGIDLIFPHHENEIAQSKGVEINENFANYWLHNGMLNLSGKKMSKSDGNVKLLNEYIDEYGGDVVRFFFLRAHYRSPQEFSEQLLEETKKTLSNLAEFTKDVVAEPNDDDTVDIFIKCMNDDMNTPKFLGEIFEKIKDSNNLDQENLLKIKQTVKFIFEILGFELNNSKQNIVEEKLLSKFFAKYNIQFNDIESAMSEFSLKREELRSNKKYGEADKMREDLLEIGIVMNDGENVGWYWKNS

SEQ ID NO: 186850 - protein, 317 aa, Unknown
  Bacterial polypetide isolated from the Sargasso Sea
MIKLFNTLSKKVEVFKPIDDLVKIYCCGVTVYDLCHLGHARSYIAWDVLRRFLIYSDFKVKYVQNFTDIDDKILKRAKEESSSMKEVSEKNIIEFHKDMDSLGIMRPDSMPRATNHICNICSFITILEDKGYAYSRDGDVYYSVFKNKNYGKLSNQNLQEQNINQQGRMVNEENSKKLNPQDFALWKKAKDDEPFFDSPWGKGRPGWHIECSAMVKNELGDTIDIHLGGSDLIFPHHENEIAQSEAANGKKLANYWLHNGMVNVNGQKMSKSLKNFKTIRELIKSGISPMTLRYFVMTVNYRKPLDFTEEALRSASE

SEQ ID NO: 186851 - protein, 239 aa, Unknown
  Bacterial polypetide isolated from the Sargasso Sea
MKISDTLTNQKKELEFSDKVRIYLCGVTVYDQSHIGHARTIIVFDTLRRFLEANGTQVELIQNFTDVDDKIINRAKEQGESASGLSTKYIQTYFEDSDRLNIRRATNYPKATEHIDDMINLIQNLVDKESAYVSKNGVYFRVSKFSEYGKLSKKKTEDLESGARIEVDESKESPLDFALWKFSDEQPNWESPWGKGRPGWHIECSAMSIKYLGKNFEIHGGGRDLIFPHHENEIAQSES

SEQ ID NO: 186852 - protein, 460 aa, Unknown
  Bacterial polypetide isolated from the Sargasso Sea
MKSEAPFKIFNSLNGQKEEFNPCDSDHIKIYACGPTVYNYAHIGNARMAVVFDTFVRTLRIFYPKVTYVSNITDIDDKIIEAALEQKVEISSITEKYTKIYNDDMSKLNVLMPDIQPKATEYIPEMIELIEDLISKDFAYVKDDHVLFHVPNYVNYGKLSKRNRDEQIAGSRVEVAPFKKDPADFVLWKPSDKSQPGWDSPWGIGRPGWHTECSAMSKKTLGLPFDIHGGGRDLIFPHHENEIAQSCCSSANIEDPSSYAKYWMHNGFVTIDGEKMSKSLGNIILVNELIESYHGEVIRLALLSSHYRQGLDWNEKIIHQANILLDKLYEIKFLLNDEIIEDTIETNLAPIAHLADDLNTPGLIAELHKLVKDFNNSHSNKSEIKINLNLISKALGILQDDSYKHVSEELKKQINTLILKRTEAKDNKDYELADKIRNELLDLGVEIKDTSSGTDWNLKS

SEQ ID NO: 186853 - protein, 438 aa, Unknown
  Bacterial polypetide isolated from the Sargasso Sea
MDIFLTNNLTNKKEQFVPNDKKHIGMYVCGPTVYDDPHIGNARPLVIFDILYKLLKKSYSNVTYVRNITDIDDKIIKASQEQKISVKELTEKITKNFLDDCKFLICEEPTHQPKATEHIKLMIEMIDQLIKKGYAYEINNHVYFELKKFSDYGKLSNKKLDDLIAGSRVEISENKKNSEDFVLWKPSKENEPYWDSPWGKGRPGWHLECSAMSKKFLGDQFDIHGGGIDLIFPHHENEIAQSRCVNDTKIFANYWVHNAFITISNEKMAKSQGNILKIKDFKNKMSGQVLRLALISSHYKQPLDWNEKLLDECQNTLDKWYRVYSSDIESVEINDEILKPLYEDLNTPGYIANLHKLYEQANKGKNVELFISACKFVGLLKENEKQWEKHKKDKVSISEIEINNKIELRNKARSNKNYKEADKIRNELFDKGGFNRGQ

SEQ ID NO: 186854 - protein, 392 aa, Unknown
  Bacterial polypetide isolated from the Sargasso Sea
MKLYLYNSYKREKESFEPIRDGYVGLYTCGPTVYDYAHIGNFRTFIFEDLLKRWLIHLGYDVKHIMNITDVDDKTIKKANDESVALNIITDRYTSCFMEDLKWLKMIPADEFPRATDYIDKMISMIQTLLDKNFAYKDNDGSVYFDINSFKEYGCLTNLNIKGQKQTKRINDDEYEKDSPQDFALWKGWKKEDGDIVWNAPWGKGRPGWHIECSAMSIDALGDHFDIHCGGIDNMFPHHENEIAQSVCSTGKPFVNYWLHSEFLLVDGGKMSKSLGNYYTIKDLINKGFSAESIRYQLLSGHYRKKISFSINKKHESDKVVARVSDFHELLSQKIKKISLDNSLPQIYSDFSNAMNDDLNTPQALAIFFEWMKSESKKIKDNSLSSEEISSA

SEQ ID NO: 186855 - protein, 453 aa, Unknown
  Bacterial polypetide isolated from the Sargasso Sea
MEIRLYNSKNKKKEIFRPINDENVTIYVCGPTVYGAHHIGNARPAVVFDILVKLLRNKYKKVTYARNITDVDDKIINAAFEENVEISEITKKSTNQYHSDMKILNVDEPDEEPYATQFISEMIVFIKDLIKKDNAYISQDHVLFDINSYDDYGKLSGRDPKDLIAGARVEIQDYKKNPLDFVLWKPSSENEIGWESPWGRGRPGWHLECSTMILEIFGETIDIHGGGEDLRFPHHENECAQSFCKNNGKDIANFWLHNGMVQMADSKMSKSLGNILLIKDLISDTPGEVIRLSLMSSHYRQPLKWSDELVSQSKKTLNNFYSYLKDYEDIENIDSFVNEDILNALSDDLNTPKAISILHSMFKNLKKNPDNIELRSSFLKSANLMGLLITKPSNWFLNEDNNIDTKMIDDLIEKRNQARISKDFSLADDIRDKLLTMGIVIEDKNDITTWKKR

SEQ ID NO: 186856 - protein, 447 aa, Unknown
  Bacterial polypetide isolated from the Sargasso Sea
MDIFLTNNLNNKKEHFVPKEKKNVGMYVCGPTVYDDPHIGNARPLVIFDILFKLLKNEFPSVIYVRNITDIDDKIIKSSQEQKISTKELTERVISSFFKDCEFLNCENPTHQPKATEHIDLMIEMINSLIKKGFAYENKKHVYFEVKKFSDYGKLSNKNLEDLVAGSRIEISENKINSEDFVLWKPSNSDEPAWDSPWGKGRPGWHLECSAMSKKFLGNEFDIHGGGIDLIFPHHENEIAQSRCANDTKVFANYWVHNAFITMSNEKMAKSQGNILKIKDFRNKISGQIIRLALMSAHYKQPLDWNDKLLNDCETTLDKWYKVYSPNLNSVKVSEEILKPLYEDLNTPGYIANLHKLYEKANRGENIDLFVSACKFIGLMSETSEQWNEFKKNRVSITESEIENLLSSRDKARENKNYKEADRIRDVLLDKGVLIEDKDGKTLWKFK

SEQ ID NO: 186857 - protein, 390 aa, Unknown
  Bacterial polypetide isolated from the Sargasso Sea
MLKLYNSYNNSIEKIDLNKREVKIYLCGPTVQSSPHLGHGRSAVVFDFLVRYLKYLKYNVIFVRNITDIDDKIIEKSFEEGISYKELAIRVSKEFDYAYQKLNCIKPDKEPRATEFIKEIISYIETLIKNEYAYITKSGVYYDISKFDEYLLLSGRTKNEVISGTRVELEEDKNAPEDFALWKFSKENEPYWESPWGNGRPGWHIECSSMIEAILGRTIDFHCGGNDLIFPHHENEIAQSKGAYPKEQFVKYWLHNGMLNLSGKKMSKSDGNIKLLNEYIDEFSGPVLRFFFLKSQYRSPQEFNVNLLKESESTLNNLIDFTYGVDSELKSKEVLDIFEDSMNEDLNTPKMLGSLFKLINESDTLNEQKLSELKSSIKFVFNLLGFDLIK

SEQ ID NO: 186858 - protein, 220 aa, Unknown
  Bacterial polypetide isolated from the Sargasso Sea
MNKDIFLTNSFGNKKVKFSPIDPKKIGMYVCGPTVYESPHIGNARPLVVFDILFKVLKCKYGKDSITYVRNITDIDDKIITSSIENKISVSELTGKITSIFHEDCKYLNCESPTHEPRATDNISLMIDMINKLIKNNFAYEKNSHVYFEVKKFDDYGKLSNKNLDELVAGARVEISKNKKNPEDFVLWKPSSNDEPYWDSPWGKGRPGWHLECSVMSKRF

SEQ ID NO: 186859 - protein, 302 aa, Unknown
  Bacterial polypetide isolated from the Sargasso Sea
MEIRLYNSKSKKKEIFHPVNDENVTMYVCGPTVYGAHHIGNARPAVVFDVLAKLLRNKYKNVTYARNITDVDDKIINAAFEQNVEISEITKKSTNQYHSDMKILNVEKPNKEPYATQFISEMILFIEDLIKKDNAYFSEGHVLFNIDSYKSYGDLSSRDPKDMIAGSRVEVQDYKKNPLDFVLWKPSNENEIGWDSPWGRGRPGWHLECSTMILEIFGETIDIHGGGEDLRFPHHENECAQSFCRNDGKQLANFWLHNGMVQMADSKMSKSLGNILLIKDLINEMPGEVIRLSLMSSHYRQP

SEQ ID NO: 186860 - protein, 337 aa, Unknown
  Bacterial polypetide isolated from the Sargasso Sea
TDHIAEMIEMIQGLIDKSHAYENQGHVFFSIDTFDDYGFLSNRSEEEQISGTRIKPSEIKKNQKDFVLWKPSTGDTPGWESPWGFGRPGWHLECSAMAKKYLGKTLDIHGGGSDLLFPHHENECAQSMCSHSGKPLANYWIHNGMIDFDNVKMSKSEGNLLLIRDLLKQIGPEVIRMAFLTTHYRKPINWNDALITDSEKKLDRLYGSIRKLGKVSPAEPTEEMINALADDINTPKALSELFAIAKRVNNAKSENESKQLASTLVGSANLLGLMNEDAEKWFENIDVDEKLIDRLLNEREAARSDKDFEKADQIRQEIESLGVSIEDGPDGPIWKKQ

SEQ ID NO: 186861 - protein, 407 aa, Unknown
  Bacterial polypetide isolated from the Sargasso Sea
MDIFLTNNLTNKKEQFVPKDKKHIGMYVCGPTVYDDPHIGNARPLVIFDILFRLLKNIFSKVTYVRNITDIDDKIIKSSQEQKISSKELTEKVTYSFLEDCKFLNCENPTHQPKATEHIDLMIEMINQLIKKGFAYENNNHVYFEVKKFSDYGKLSNKKLDDLIAGSRVEVSENKKNSEDFVLWKPSNTNEPSWNSPWGKGRPGWHLECSAMSKKFLGNEFDIHGGGIDLIFPHHENEIAQSRCANDSKIFANFWIHNAFITMSNEKMAKSQGNILKIKDYRNKMSGQIIRLALMSAHYKQPLDWNDKLINDCQNTLDKWYRIYSSDIKSVQVTEEVLKPLHEDLNTPGYIANLHQLYEKANKGEDKELFISACKFIGLFSENIQQWEKYKKDKATISESEINSKID

SEQ ID NO: 186862 - protein, 459 aa, Unknown
  Bacterial polypetide isolated from the Sargasso Sea
MLKIYNSITRQKQEFKPITPGKVGMYVCGVTVYDLCHIGHGRTFVSFDMIVRYLRYAGYEVNFQRNITDIDDKIIKRANENQEDCNTLTDRLIGEMHKDFDALNMIRPDFEPRATLHISEIIDMVERLLARGHAYVAADGDVLFSVASFPEYGRLSGQNLEQLQAGARVEVDDNKQNPMDFVLWKMSKPGEPTWESPWGPGRPGWHIECSAMNSKHLGLHFDIHGGGSDLQFPHHENEIAQSCCAHDTPYVNYWMHTGMVMVDREKMSKSLGNFFTIRDVLGHYDAETVRYFLLSGHYRSQINYSEENLKQARAALERLYTAIKDVDLMVAPAPAEEFVAKFKAAMDDDFNTPEAYSVLFDMVREINRLKATDMAQASAMAVAMKQLADVLGLLHQAPDAFFKGEGSDDEVAEIEALIVERNRARAEKDWPAADVARNRLNELGVVLEDGPSGTTWRKK

SEQ ID NO: 186863 - protein, 451 aa, Unknown
  Bacterial polypetide isolated from the Sargasso Sea
MKIKLYNSNTKSKELFVPIDPKKVTMYVCGPTVYSYPHIGNARGPVIFDVLARLLRREFDLTYIRNITDLDDKIYQAADDEGVHISEVTQRYTKIYQEDMTALGVEKPDLEPLATEHIPEMIEMIQVLIDKKHAYESQGHVFFSVETFDDYGFLSNRTEEEQISGTRIKSSEIKNNQRDFVLWKPSTGETPGWDSPWGFGRPGWHLECSAMAKKYLGRTLDIHGGGSDLLFPHHENECAQSMCSHSGEPLANYWVHNGMIDFDNVKMSKSEGNLLLIRDLLKEIRPEVIRMAFLTTHYRKPINWNDALISDSEKKLDRLYGSIRQLGKISPGEPSEEVLNAIADDINTPKALSELFAIVKNINNAKSDEESRKLASILIGSAHLLGLMNQDAEIWFENIEVDKALIDHLLTEREAARSNRNFERADQIRQEIESLGVTIEDGPEGPVWKKL

SEQ ID NO: 186864 - protein, 330 aa, Unknown
  Bacterial polypetide isolated from the Sargasso Sea
IDLMIQMINDLIKKGFAYENKKHVYFEVKKFSDYGKLSNKKLEDLVAGSRVEISENKKNSEDFVLWKPSNEDEPAWDSPWGKGRPGWHLECSAMSKKFLGDEFDIHGGGIDLIFPHHENEIAQSRCANDTKVFARYWVHNAFITLSNEKMAKSQGNILKIKDFRNKISGQIIRLALMSAHYKQPLDWNDKLLSDCESTLDKWYKVYSSNLKSVKISDEILKPLYEDLNTPGYIANLHKLYEKANKGEHVDLFVSACKFIGLMNETSKQWNDFKKNRVLITESEIKNMLSLRDKARENKNYKEADRIRDELLDKGVLLEDKDGKTLWKFKE

SEQ ID NO: 186865 - protein, 292 aa, Unknown
  Bacterial polypetide isolated from the Sargasso Sea
MNKQLNIFNTLSGKKEKFIPINTGKVGMYVCGPTVYDFPHIGNARPLVVFDVLFRLLKKLNGNDKVTYVRNITDIDDKIIEASKNKKIPIDKLTNDITKNFHDDCKYLNCLKPNFEPRATEHIKGMISMTENLLNNKHAYEKDKHVYFSVNSFKNYGKLSNKKPSELEAGSRVEISKLKNNPLDFVLWKPSSTDDPGWDSPWGRGRPGWHLECSVMSEKYLGKNFDIHGGGLDLVFPHHENEIAQSCCANKTDKFANYWLHNGYVTYNKEKMSKSLGNIVTMQKMKNKINGQ

SEQ ID NO: 186866 - protein, 370 aa, Unknown
  Bacterial polypetide isolated from the Sargasso Sea
MESSKNKKIPIEELPSKITKSFHDDCRYLNCLSPSSEPKATEHIKGMITMTENLLKNNYAYEKNNHVYFSINSFQNYGKLSRKNPEELVAGARVEISKLKKHPLDFVLWKPSSTEDPGWDSPWGRGRPGWHLECSVMSEKFLGKNFDIHGGGLDLIFPHHENEIAQSCCANKVDKFANYWLHNGYVTFNKEKMSKSLGNIITIEKMRKTINGQVIRLALLSSHYKQPLDWNENLIKDSQTTLDKWYTQFENTKEEVLNEDLLEPLLEDINTPGYIAKLHSLYDKASKGDTSSKKLFLAGCKLIGLLEEDLETWNKFKKTKLKIDEKTIQSKIKDRDQARKKGDYKLADSIRKELEIEGVIIEDKDNKTIW

SEQ ID NO: 186867 - protein, 84 aa, Unknown
  Bacterial polypetide isolated from the Sargasso Sea
MSLNLYNTLTNKKEVFKSIEPNVVGMYVCGITVYDHCHLGHARAYVAFDVLARYLKYLGYKLNYVRNITDVEDKIIKKAIENSE

SEQ ID NO: 186868 - protein, 328 aa, Unknown
  Bacterial polypetide isolated from the Sargasso Sea
MVKMIEDLIDKNYAYINNNHVYFEVKKFKDYGKLSNKNLEELVAGSRVEISENKKNAEDFVLWKPSKENEPSWDSPWGKGRPGWHLECSVMSKKYLGTKFDIHGGGRDLIFPHHENEIAQSRCANDTDTFANYWVHNGFITISNEKMAKSQGNILKINDLKKNINGQVLRLALITTHYKQPLDWNDKLLGECQKTLNKWYDCYIQVKKKVLIPDELLAPLYDDLNTPSYIANIHKLYEKAHQGNDQDKEVFTTACNFIGLLSETKDQWLKFKKEKSEISEEEILSKIKARDKARKDKDYKLSDKIRDELLNKGVLIEDKDGKTTWKLK

SEQ ID NO: 186869 - protein, 149 aa, Unknown
  Bacterial polypetide isolated from the Sargasso Sea
MSKDIFLTNNLTNKKEKFVPLDKNNIRMYVCGPTVYDDPHIGNARPIVVFDILFKIFKKNYSKVTYVRNITDVDDKIIKSSKENNISISELTNKVTQSFSEDCTYLNCDAPTYQPKATENIDLMIEMISELIKKGFAYENNNHVYFEVK

SEQ ID NO: 186870 - protein, 465 aa, Unknown
  Bacterial polypetide isolated from the Sargasso Sea
MESLRIYNTLARDKQVFVPRQSGEVRMYVCGITVYDYCHVGHARMLVVFDLVQRWLRAIGYRVTYVRNITDIDDKIIRRAVENGETIKSLTDRFIGAMHDDESALGIQRPDIEPRATEFIPQMLGMIETLETNGYAYQATDGDVNYSVRKFANYGKLSGKSLDDLRAGERVAANDAKEDPLDFVLWKRAKPEDPEGTSWASKYGMGRPGWHIECSAMGCTLLGEHFDIHGGGQDLQFPHHENEIAQSEGATGQTFVNYWMHNGFVQVDNEKMSKSLGNFFTIREVLERYDAEVMRFFIVRTHYRSPLNYSDVHLDDARASLTRLYTALKDVEADTLALDWNEPHAQRFAAAMNDDFNTPVAVATLFELAGEVNRTGDASLARQLKQLAGLLGLLGREPRAFLQQASGAAQAGGLAADEIEAKIAARVAAKQAKDYAEADRIRAELLETGIALEDKPGGSTEWRRV

SEQ ID NO: 186871 - protein, 272 aa, Unknown
  Bacterial polypetide isolated from the Sargasso Sea
KNSEDFVLWKPSVKDEPYWDSPWGPGRPGWHLECSAMSKKLLGDKFDIHGGGIDLIFPHHENEIAQSRCANDTEVFANFWIHNAFITMSNEKMAKSQGNILKIKDFRKKMSGQIIRLALMSAHYRQPLDWNDKLLIDCENTLDKWYRIKLDNFKPVKIPDEILKPLYEDLNTPGYIANLHGLYEKAIKDDNKDLFISACRFIGLLNETSEQWHNFKRDRVSLSEPEIEKMINLRDKARENKDYKEADRIRDELSDKGVLIEDKDGKTLWKFK

SEQ ID NO: 186872 - protein, 231 aa, Unknown
  Bacterial polypetide isolated from the Sargasso Sea
MGKIFDIHGGGLDLIFPHHENEIAQSCCNNATSSFANYWVHNGFVTFNKEKMSKSLGNIITISDAVKKYTGQVVRLALLSAHYTQPLDWNDELLSNQKNILDKWYNLYQEQKNYETLDVTDILLDDLNTPGFIAKIHELYNQANNGDSDKKLLFNSACRFIGLFNMSKTEWQNLKKKQIKISEDYIESKIEERIKAKNTGNYDIADKIREELSNAGILIEDEKGKTRWRYK

SEQ ID NO: 186873 - protein, 233 aa, Unknown
  Bacterial polypetide isolated from the Sargasso Sea
MNKDIYLTNSLGGKKEIFKPIDPKKVKMYVCGPTVYDDPHIGNARPLVVFDILFKVLKCKYGNKSVTYVRNITDIDDKIIESAKQKKISIDVLTENITNSFHNDCDYLNCEKPSFEPKATENISLMVEMINVLLKNKNAYEKNSHVYFDVSSFKDYGKLSNKNIDELKAGARVEVSENKKNPEDFVLWKPSNKDEPSWDSPWGKGRPGWHLECSAMSKKYLGDTFDIHGGGRD

SEQ ID NO: 186874 - protein, 271 aa, Unknown
  Bacterial polypetide isolated from the Sargasso Sea
MKNEVSFKIFNSLNGQKEEFNPCNPEHIKIYACGPTVYNYAHIGNARMAVVFDTFVRTLRIFYPKVTYVSNITDIDDKIIEAAHEQKVEISSITEKYTKIYNDDMAELNVLMPDIQPKATEYIPEMIELIEDLISKDFAYEKEGHVLFHVPNYDNYGKLSKRNRDEQIAGSRVEIAPFKKDPADFVLWKPSDKSQPGWDSPWGVGRPGWHTECSAMSKKTLGLPFDIHGGGRDLIFPHHENEIAQSCCSSANIEDPTSYAKYWMHNGFVTI

SEQ ID NO: 186875 - protein, 454 aa, Unknown
  Bacterial polypetide isolated from the Sargasso Sea
MVLKIHNTLSGTKETFEPVDKNHVRIYACGPTVYNFAHIGNARMAVVNDLLVNVLRTQFKRVTYVSNITDIDDKIIDAADELNEPIKNLTTKYTKIYNDDMGFLNVKLPDIQPHATDHISDMIDLIKKLIKNNYAYEKDGHVLFHVPSFSKYGVLSKRNRDEQIAGSRVEVAPFKKDPADFILWKPSPDPLPGWESPWGFGRPGWHLECSAMSEKTLGLPFDIHSGGMDLVFPHHENEIAQTCSLDDNHEPESFAKFWFHNGFVNVEGEKMSKSIGNIKLVYDLKKQYKGEVLRLTLLSAHYRQPLNWTKEIIDQNSKMLDRFYRSLKDLQDIEISSGSISEEIMESLLDDLNTPKVLAKLNTLSNTLSSANSEEKRNIKNNLIAVGKILGVMQEDPNIWLGYNQTANPEKEEIEGLINQRNEARRSKDFKLADQIRDKLKSKGIEIEDTKNGT

SEQ ID NO: 186876 - protein, 419 aa, Unknown
  Bacterial polypetide isolated from the Sargasso Sea
MLKIFNTLTRQKEEFKPIHAGEVGMYVCGITVYDLCHIGHGRTFVSFDVVARYLRFLGYKLKYVRNITDIDDKIIKRANENGESFVALVDRMIAEMHSDFDALNILRPDLEPRATHHIAEIIEITEQLIAKGHAYVADNGDVMFDVPTDPNYGQLSRQDLDQLQAGARVDVVDVKRNPMDFVLWKMSKEGEPSWPSPWGAGRPGWHIECSAMNCKQLGNHFDIHGGGSDLMFPHHENEIAQSTCAHDGEYVNYWMHSGMVMVDREKMSKSLGNFFTVRDVLKYYDAETIRYFLMSGHYRSQLNYSEENLKQARSALERLYTALRGTDKSVAPAGGEAFEARFIEAMDDDFNTPEAYSVLFDMAREVNRLKGEDMAAANGMAAHLRKLSSVLGLLEQDPEAFLQSGAQADDGEVAEIEAL

SEQ ID NO: 186877 - protein, 386 aa, Unknown
  Bacterial polypetide isolated from the Sargasso Sea
DIDDKIIEAAVEQNVEISVITKKFTKIYNEDMAKLNVLAPDVQPKATEYIPEMIDLIKELIEKDFAYEKDGHVLFHVPTYENYGKLSNRIKDEQIAGSRVDVADFKKDPADFVLWKPSTGVQPGWESPWGIGRPGWHTECSAMSEKTLGLPLDIHGGGRDLIFPHHENEIAQSCCTAAENSNPESYAKYWMHNGFVTIDGEKMSKSLGNIILVNELTQKYHGEVIRLALLSTHYRQALDWNDNVIHQAKKLLDKLYSLLNELNDVKESKEPDNDLIEILLDDLNTPGLIANINKLIKNAESREEDDKPNLKSNLLLIGKLMGILEDQSYNQISDEFKDKVDSLIEDRSNAKKKRDFELADKIRSELIELGVEINDSPEGTTWKVVK

SEQ ID NO: 186878 - protein, 260 aa, Unknown
  Bacterial polypetide isolated from the Sargasso Sea
NEPSWISPWEKGRPGWHLECSVMSKKFLGDKFDIHGGGMDLIFPHHENEIAQSRCANENETFANYWVHNGFITISSEKMSKSQGNILKIGDFKNKVSGQVLRLALISAHYKQSLDWNDKLLSECEKTINKWYESYTDIKKQVLIPEDYLSPLYDDLNTPGYIANLHKLFDKSQKGSIKDKEIFVSACNFIGLLNENKNTWDQFKQSKSVISEEEIKQKITERNNARKNKDYKAADKIRDELLDKGVLIEDKDDKTLWKFK

SEQ ID NO: 186879 - protein, 131 aa, Unknown
  Bacterial polypetide isolated from the Sargasso Sea
MIKLFNTLNKKVEVFKPIDDEVKIYCCGVTVYDLCHLGHARSYIAWDILRRFLIYSDFKVKYVQNFTDIDDKILKRAKEENSSMQEVSEKNIIEFHKDMDALGIMRPDSMPRATNHICNICSFHTILEEKG

SEQ ID NO: 186880 - protein, 276 aa, Unknown
  Bacterial polypetide isolated from the Sargasso Sea
IKKNPEDFVLWKPSTDKEPSWESPWGKGRPGWHLECSVMSKRYLGEEFDIHGGGRDLIFPHHENEIAQSRCANETNSFANYWVHNGFITLSNEKMAKSQGNILKIKDFKNKYNGQVLRLALISAHYRQGLDWNEKLISECEKTLSKWYSAYSVVHKSTILPDELLDPLYDDLNTPGYIANLHSLYSKASTGTNEDKATFVKACNFIGLLTDTSEEWLQTKKNTISLSEDEINSKIAERNKARDEKNYELADKIRKDLLDKGILIEDKDGTTSWKLK

SEQ ID NO: 186881 - protein, 393 aa, Unknown
  Bacterial polypetide isolated from the Sargasso Sea
MKNLKISNTLTRTKELFKPINSKNITMYACGPTVYDDPHVGNARSLVVFDLLFRVLKKIYGDNNVTYVRNITDVDDKIIDIAKEKNLPIEKITSEVTNQFHLACKNLNCLNPTVEPKATEHINEMIKMTDSLIKKDFAYINNEHVYFKISSFKNYGKLSNKNLDELKAGSRVEVSSFKKNPLDFVLWKPSREKEPGWDSPWGRGRPGWHLECSVMSEKYLGKKFDIHGGGLDLVFPHHENEIAQSCSNNSIERMANYWVHNGFLTMDKEKMSKSLGNIVSISNAVKKYNGQIIRLALLSSHYKQPLDWSEKLLEHQRSTLDKWYSLYEKKSISKETPQCFETLLDDLNTPEYISKLHQLYNEALKGDNKQKEYFNNACRLIGIFNEDKKDWEQ

SEQ ID NO: 186882 - protein, 364 aa, Unknown
  Bacterial polypetide isolated from the Sargasso Sea
MALSIYNTLSKVKEPFKPLEGNSVRMYVCGMTVYDFCHIGHARVMVAFDVVTRWLRQRGYDVTYVRNITDIDDKIIRRANENGEPFEALVERMIAAMHEDEARLSVLRPDIEPRATGHIAGMHQMIQTLIDKGYAYAPGNGDVYYRVGKFVGYGKLSRKKIEDLKIGARIEVDEAKEDPLDFVLWKGVKPGEPSWQSPWGAGRPGWHIECSVMSTCCLGETFDIHGGGPDLVFPHHENEIAQSEAATGKQYANAWMHAGAVRVDGEKMSKSLGKLLHHSRGAGEVPPGGGALPAGVQSLPQPDQLLGREPQGSQGRPGAFLQRPQRLAGSRACRWRGVRRALRRGDGRRFQLAGSLRRVVRDDP

SEQ ID NO: 186883 - protein, 461 aa, Unknown
  Bacterial polypetide isolated from the Sargasso Sea
MPLVLYDTWSRTLRAFSPIRADHVGLYCCGPTVYDHAHIGNLRTYVFEDVLRRALALNGYSVRHVVNITDVGHLVSDADEGEDKMEKGSRRTGESAWAIAEHYTAAFMNDWRALNLLEPSLWCRATDHIAEQIDFIAAIERNGYAYRTTDGVYFDTSKQDDYGFLARLDAAGLQPGKRVAPGEKRHATDFALWKFTPPDTVRQMEWDSPWGRGFPGWHIECSAMSAKYLSPWFDIHCGGEDHIAVHHSNEIAQTLACHGTRLANFWMHGHFLMLDAGKMSKSGGDFVRLSTLTGRGIDPLAYRYLCLSAHYRSNLRFSMEALDAAQSALDRLRRAYVQWPEGGTPDDVYVDRFRLEVDQDLNLPRALAVLWDLVRSDLPAATRRATVDCFDAVLGLRLADWREDVSAIPADIARLAAERERARAAKDWNAADRLRDRLKTESWQVEDSASGQVLRRLDKAQ

SEQ ID NO: 186884 - protein, 470 aa, Unknown
  Bacterial polypetide isolated from the Sargasso Sea
MPLALYDTWSRTVRPFTPVRAGQVGMYCCGPTVYDHAHIGNLRTYVFEDLLRRVLARNGYAVRHVVNITDVGHLTSDADEGEDKMEKGSRRTGESAWAIARRYTEAFVRDWRALNLLEPTVWCRATDHIAEQIAFIDTLDRGGYVYRTDDGLYFDTSRQDDYGYLARLDRAGLQAGKRVALGGKRSITDFALWKFSPADVKRQMEWDSPWGRGFPGWHIECSAMSAKYLGTLFDIHCGGEDHIAVHHSNEIAQTRAAHGTQLANYWMHGHFLTFDDDTKMSKSSGDFVRLETLQSRGVDPLAYRYLCLTAHYRSKLHFTWASLDAAHTALNRLRHLYAGWPDGGCADADFVARFDAEVNEDLNLPRALAVLWDLVRSNLPPATLKATVDSFDDVLGLGLREWRPVAFDIPEHVHVLLGERERARADKDWAQADRIREALSAEGWRVEDTPEGQRLFGMVMGSSDTAGAPQ

SEQ ID NO: 186885 - protein, 195 aa, Unknown
  Bacterial polypetide isolated from the Sargasso Sea
MNKDIYLTNSLGGKKEKFKPIDTKKVKMYVCGPTVYDDPHIGNARPLVVFDILYKVLKCKYGNKSVTYVRNITDIDDKIIESAKQKKISIDVLTKNITNNFHNDCNYLNCEKPSFEPKATENISLMIEMINVLIKNKNAYEKNSHVYFDVSSFKDYGKLSNKNIDELKAGARVEISENKKNQEDFVLWKPSNKDE

SEQ ID NO: 186886 - protein, 390 aa, Unknown
  Bacterial polypetide isolated from the Sargasso Sea
MLKLYNSLTKKQEEIKIDQDDVRIYLCGPTVQSSPHLGHGRSAVVFDFFIRYLKYLNYSVLFARNITDIDDKIIEKSQEKNISYRELGDNVWKEFVLAHENLNCLVPDIEPRATAYIPEIIKYIEQLVENGFGYVTSSGVYYDVSKFDKYLELSGRSIEDVRTGTRVETEDDKKRAEDFALWKFSKENEPSWDSPWGDGRPGWHIECSTMISETLGKTIDFHCGGIDLIFPHHENEIAQSKGVDINENFANYWLHNGMLNLSGKKMSKSDGNVKLLNEYIDEYGGDVVRFFFLRAHYRSPQEFSEQLLEETKKTLSNLAEFTKGVVAEPNDNDTIDIFIKCMNDDMNTPKLLGEIFEKIKNTNNLDQENTLKIKQTVKFIFEILGFELCT

SEQ ID NO: 186887 - protein, 339 aa, Unknown
  Bacterial polypetide isolated from the Sargasso Sea
YIPEMIELIVELIEKDFAYEKEGHVLFHVPTYQNYGKLSKRNRDEQIAGSRVEVAPFKKDPADFVLWKPSTDEQPGWESPWGIGRPGWHTECSAMSKKTLGLPFDIHGGGRDLIFPHHENEIAQSCCTSASIDEPDSYAKYWMHNGFVTINGEKMAKSLGNIILVKDLAENYHGEVIRLALLSSHYRQGLDWNEKVIHQANKLINKLYEIKDDLDDVTISDKNENNLDAISILMDDLNTPGLITELNNIVKEYNSSDSEKVNIKSRLNLISSVLGILEDETFNEISEEFKNKINDMVLKRSEAKNNKDFKTADAIRDQLIELGVEINDSSDGTEWKLKS

SEQ ID NO: 186888 - protein, 218 aa, Unknown
  Bacterial polypetide isolated from the Sargasso Sea
FPHHENEIAQSRCANENQIFANYWIHNGFITISNEKMSKSQGNILKIGDFKKKVSGQVLRLALMSAHYKQSLDWNDKLLFDCQKTINKWYDSYTEIKKQVLIPDEYLLPLYDDLNTPGYIANLHKLFEKSQKGTNKDKETFISACNFVGLLNESKKSWDEFKQGNLSISEEEIKQRITERNNARKNKDYKEADKIRNELLDKGVLIEDKDDKTLWKYK

SEQ ID NO: 186889 - protein, 268 aa, Unknown
  Bacterial polypetide isolated from the Sargasso Sea
MNKDIFLTNSLGNKKAKFIPIDPKKIGMYVCGPTVYDNPHIGNARPLVVFDILFKVLKCKYGNSSVSYVRNITDIDDKIISSSIEKNISIDDLTKNITNIFHQDCKYLNCEVPTNEPKATENISLMIEMINKLVQNKFAYEINNHVYFEVKKFKDYGKLSNKNLDELIAGARVEISENKKNPADFVLWKPSTENEPAWDSPWGKGRPGWHLECSVMSKKFLGDKFDIHGGGMDLIFPHHENEIAQSRCANENETCANYWVHNGFITIS

SEQ ID NO: 186890 - protein, 451 aa, Unknown
  Bacterial polypetide isolated from the Sargasso Sea
MGNDIFLTNNLSNKKEKFVPIDEKNIKMYVCGPTVYDDPHIGNARPIVVFDILYKIFKKKYPKVTYVRNITDVDDKIINSSKDKNISISELTENVNKSFQKDCSYLNCDIPTHQPKATEHIDLMIKMISDLINKGFAYEENQHIYFEVKKFKDYGKLSNKNLDELIAGSRVEVSDNKKNSQDFVLWKPSKDDEPSWASPWGKGRPGWHLECSAMSKKFLGNEFDIHGGGIDLLFPHHENEIAQSRCANDTKVFANYWLHNAFITISNEKMAKSQGNILKIKDFRNNVSGQVLRLAIMSTHYKQPLDWNDKLLNDCQNTINKWYKVYTSDYKAVEIDDEILKPLYDDLNTPGYIANLHKLYDKAQKGNSSDKALFISACKFVGLLNETENQWLEFKKNKYSINETEILEKIEQRNKAREDKNYKEADKIRDELLDKGVLIEDKDGKTTWKFK

SEQ ID NO: 186891 - protein, 396 aa, Unknown
  Bacterial polypetide isolated from the Sargasso Sea
MDEIYLYDSLSNKKRKFEPIDQNHIRIYACGPTVYNYAHIGNARMAVVFDSFVRLLRNKYPNVTYVSNITDIDDKIIEAANESNIPINELTKKYTDIYNADMSYLNVLPPDIQPKATEYVEDMINFIDKLIQKDKAYEKDGHVFFHVPSYEGYGKLSNREIDQQLAGSRVQVSDIKKNQQDFVLWKPSNKNQPGWESPWGIGRPGWHTECCVMSEVNLKIPFDIHGGGQDLLFPHHENEIAQSCASVNSDNPEDYAKYWIHNGFVTIDGEKMSKSLNNIILLNDLLKEHDGETIRLALLSSHYRKSLDWNDNVIKQSKVLLDKVYDFLDTCDDDLEGEIDESLIENFSNDLDIPKVLTSINELLKNRNSLNTQTIKQSLLFAGSILGVFDKKPSEG

SEQ ID NO: 186892 - protein, 313 aa, Unknown
  Bacterial polypetide isolated from the Sargasso Sea
EENQHIYFEVKKFKDYGKLSNKNLDELIAGSRVEVSDNKKNSQDFVLWKPSKDDEPSWASPWGKGRPGWHLECSAMSKKFLGNEFDIHGGGIDLLFPHHENEIAQSRCANDTKVFANYWLHNAFITMSNEKMAKSQGNILKIKDFRSNVSGQVLRLAIMSAHYKQPLDWNDKLLNDCQNTIDKWYKVYASNYKAEEIDDETLKPLYDDLNTPGYIANLHKLYDKAQKGNSTNKALFISACKFVGLLNETENQWLEFKKNKHSINETEILKKIEHRNKAREDKNYEEADKIRDELLDKGVLIEDKDGKTIWKFK

SEQ ID NO: 186893 - protein, 452 aa, Unknown
  Bacterial polypetide isolated from the Sargasso Sea
MSKELNIFNTLSGKKEKFIPINKDKVGMYVCGPTVYDFPHIGNARPLVVFDVLYRLLLKIFGKDKVTYVRNITDIDDKIIESSKNNKIPIDMLTTSTTKSFHDDCKYLNCLKPNFEPKATEHIKGMIAMTEKLLKNKNAYEKDKHVYFSVSSFKNYGKLSKKNTEELVAGARVEVSKSKKDPLDFVLWKPSTAEDPGWDSPWGRGRPGWHLECSVMSEKFLGKNFDIHGGGLDLVFPHHENEIAQSCCANKADKFANYWLHNGYVTFNKEKMSKSLGNVVSIEKMRGAINGQVIRLALLSTHYKQPLDWNENLINESQNTLDKWYTQFEKTSQGDLDDDLLKPLLEDINTPGYISKLHLLYDKASKGDKSSKKLFLSGCKLIGLLEEDLETWRKFKKTKSKIDEKTIKSKIKDRENARKKGDYKLADSIRKDLEGSGVIIEDKGDKTTWKYK

SEQ ID NO: 186894 - protein, 460 aa, Unknown
  Bacterial polypetide isolated from the Sargasso Sea
MKSLKSFKIFNSLNGKKEKLDPIDPNHIKIYACGPTVYNYAHIGNARMAVVFDTLVRALRIFYPNVTYVSNITDIDDKIIDAANEQNIEISTITEKYTKIYNDDMAKLNVLIPDIQPKATEYISEMIELIEDLIIKDFAYEKDGHVLFHVPNYSNYGKLSKRNREEQIAGSRVEVAPFKKDPSDFVLWKPSYDSQPGWDSPWGIGRPGWHTECSAMSKETLGLPFDIHGGGRDLIFPHHENEIAQSCCSTAHIDDPTSYAKYWMHNGFVTIEGEKMSKSLGNIILVNELTDSHHGEVIRLALLSSHYRQNLDWNEKIIYQSSKLLDKLYEIKKDLKNEKTSKINHKNTDVISALADDLNTPELIVKLNKIIKEYNSSNKDKQKTKDQLDLISEALGILKDDSYKKVSQELEEKINTLIADRTKAKINRNYDLADKIRKELTDLGVEIKDTSDGTDWNLKI

SEQ ID NO: 186895 - protein, 310 aa, Unknown
  Bacterial polypetide isolated from the Sargasso Sea
MHVYFEVKKFKDYGQLSNKKLDELVAGSRIEVSDNKKNPEDFVLWKPSETDEPSWDSPWGKGRPGWHLECSAMSKKYLGKEFDIHGGGVDLLFPHHENEIAQSRCANDSKVFANYWLHNAFITMSNEKMAKSQGNILKIKDFRNIKSGQVLRLALMSAHYRQPLDWNDKLLEDSENTINKWYNVYLNIEKQPKISDEILKPLLDDLNTPGYITNLHKLYEKASKGSDEDKRIFISACHFVGLLNESKEDWLKFKKSKVSISESEILFKINQRNKARINKNYDEADKIRNDLLDKGVLIEDKDGKTVWKFK

SEQ ID NO: 186896 - protein, 349 aa, Unknown
  Bacterial polypetide isolated from the Sargasso Sea
MNKDIFLTNSLSNNKDKFSPLNSKKIGMYVCGPTVYDNPHIGNARPLVVFDILFKVLKCKYGHNSVTYVRNITDIDDKIITSSIEKKISIADLTKKITNIFHEDCKYLNCENPTHEPKATENISLMIEMINKLIKNKFAYEVSNHVYFEVKKFKDYGKLSNKNLDELIAGSRVEVSENKKNPADFVLWKPSTESEPSWESPWGKGRPGWHLECSVMSKKFLGDKFDIHGGGMDLTFPHHENEIAQSRCANENEVFANYWIHNGFITISSEKMSKSQGNVLKISDFKNKVNGQVLRLALISAHYKQPLDWNDKLLNECQKTINKWYESYIELNKQVLIPERLSFSHYMMI

SEQ ID NO: 186897 - protein, 287 aa, Unknown
  Bacterial polypetide isolated from the Sargasso Sea
RGRTFKKDPADFVLWKPSTNEQPGWESPWGIGRPGWHTECSAMSKKTLGLPFDIHGGGRDLIFPHHENEIAQSCCTSASIDEPDSYAKYWMHNGFVTINGEKMAKSLGNIILVKDLAENYHGEVIRLALLSSHYRQGLDWNEKVIHQANKLINKLYEIKDDLNDVTISDKNENNLDAISILMDDLNTPGLITELNNIVKEYNSSNSEKENIKSRLSLISSVLGILEDETFNEISEEFKNKINDMVLKRSEAKNNKDFETADAIRYKLLELGVEINDSSDGTEWKLKS

SEQ ID NO: 186898 - protein, 119 aa, Unknown
  Bacterial polypetide isolated from the Sargasso Sea
MNKDLYIFNSLSGEKELFRSIKPNEVSLYVCGPTVYSSSHMGHARSAIVFDTIVKFLRFINLKVTYVRNFTDIDDKIINRANEEKVDHKEISMKYKLEYIEDMKNLGCIEPDYQPSVSE

SEQ ID NO: 186899 - protein, 138 aa, Unknown
  Bacterial polypetide isolated from the Sargasso Sea
MNKDIFLTNSLGNKKVKFTPINPKKIGMYVCGPTVYDNPHIGNARPLVVFDILFKVLKCKYGNNSVTYVRNITDIDDKIISSSIEKKISISDLTKKITDIFHDDCKYLNCENPTHEPKATENINLMVEMINTLIKNKF

SEQ ID NO: 186900 - protein, 455 aa, Unknown
  Bacterial polypetide isolated from the Sargasso Sea
MSEIYLYDSLSNKKRKFEPIDQNHVRIYACGPTVYNYAHIGNARMAVVFDSFVRLFRNKYPNVTYVSNITDIDDKIIEAANESNIPINELTKKYTDIYNADMSNLNVLPPDIQPKATEYVEDMVNFIDKLIKNDKAYEKDGHVFFNVPSYGAYGKLSNREIDQQLAGSRVQVSDIKKNQQDFVLWKPSSESQPGWESPWGIGRPGWHTECCVMSEVNLKIPFDIHGGGQDLLFPHHENEIAQSCASVNSDNPEDYAKYWIHNGFVTIDGEKMSKSLNNIILLNDLLKEYDGETIRLALLSSHYRKSLDWNENVIKQSKVLLDKVYDFLNTCDDDPEGEIDQSLIENFSNDLDIPKVLTSINELLKNKNSSNLRTIKQSLLFAGSILGVFNKKPSEWNVQIEMSNSEMAEIEKLINERKALKENKDFIGADAIRDSLLEKGIELIDSEDGTTWKSK

SEQ ID NO: 186901 - protein, 491 aa, Unknown
  Bacterial polypetide isolated from the Sargasso Sea
MRFTNSLTSRTEAFEPLTEGKASIYCCGVTVYDLCHLGHARSYINWDVLRRYLIWRGYDVTYVQNYTDIDDKILNRANEEGITMQAVSERNIEAFEVDMGRLNILPADRMPRATGCIEGIQTLISELESKGAAYSSDGDVYFDISKAKNYGKLSGRDPNDQQQGASGRTADGEESRKRHPFDFALWKGAKAGEPSWESPWGPGRPGWHIECSAMVRQELGQTIDIHLGGGDLVFPHHENEIAQSETANGTTLAKLWMHNGMVNVGGTKMSKSLGNFTTIRALLDSGISPMTLRLFVLQAHYRKPLDFTAESLEAAAAGWKGLNAALNLGDRHGENLGWSTAAPLTEGAMTADGVPADTALAELEQRFISAMDDDLNSSGGLAVLFDLAKPLRALANLLERGEDAALPKQELKGLEGRWQLLRHLAAVLGLRSEAEAATCLDDGAIDAAIAARKAAKAAKNYAEADRIRDELAAQGVELIDKPGGITEWIRS

SEQ ID NO: 186902 - protein, 273 aa, Unknown
  Bacterial polypetide isolated from the Sargasso Sea
NPEDFVLWKPSNKDEPGWDSPWGKGRPGWHLECSAMSKKYLGDTFDIHGGGRDLIFPHHENEIAQSRCANNNKSFSNYWIHNGFITIANEKMAKSQGNIFKIRDFYQRYNGQVLRLALISTHYKQAMDWSDDLLTQSKKTLNKWYECQKKPEGKVLIPDDDLIPLYDDLNTPGYISNIHKLYDKAAKGSDKDKEIFTTACNFIGLLTEPKSKWQEFKKNILEISEEEILQKIKDRNTARDNKNYQLADEIRNELLDKGILIEDKDDKTTWKIK

SEQ ID NO: 186903 - protein, 455 aa, Unknown
  Bacterial polypetide isolated from the Sargasso Sea
MDYHLFNTLSGKKEILKPGDPKHVKIYACGPTVYNYAHIGNARMAVVFDTFVRTLRFIFPKVTYVSNITDIDDKIIEAAVEQNVEISVITKKFTKIYNEDMAKLNVLAPDVQPKATEYIPEMIDLIKELIEKDFAYEKDGHVLFHVPTYENYGKLSNRIKDEQIAGSRVDVADFKKDPADFVLWKPSTGVQPGWESPWGTGRPGWHTECSAMSEKTLGLPLDIHGGGRDLIFPHHENEIAQSCCTAAENSNPESYAKYWMHNGFVTIDGEKMSKSLGNIILVNELTQKYHGEVIRLALLSTHYRQALDWNDNVIHQAKKLLDKLYSLLNELNDVKESKEPDNDLIEMLLDDLNTPGLMANINKLLKNAESREEGDKPNLKSNLLLIGKLMGILEDKSYNQISSEFKDKVDNLIEDRSNAKKKRDFVLADKIRSELIDLGVEINDSPEGTTWKVVK

SEQ ID NO: 186904 - protein, 299 aa, Unknown
  Bacterial polypetide isolated from the Sargasso Sea
MSSLQLTNSLSRKKEVFKPINPNKVSLYACGPTVYDNPHVGNARSLVVFDVLFRVLKAIYGPNVNYVRNITDVDDKIIEASKRNKKDINEITSDVTKVFHENCKSLNCLKPTVEPKATEHIKEMIEMSSSLISKGFAYENKGHVYFSVNSFKNYGKLSNKNLEELKAGSRVEVSDLKKNPMDFVLWKPSDNDDPGWDSPWGRGRPGWHLECSVMSEKYLGKNFDIHGGGLDLIFPHHENEIAQSCSNNSSDSFANYWVHNGFVTFNKEKMSKSLGNIITISQAVKKYSGEVVRLALLSA

SEQ ID NO: 186905 - protein, 70 aa, Unknown
  Bacterial polypetide isolated from the Sargasso Sea
MLKIYNTLTRQKEEFKPIHPGKVGMYVCGVTIYDHCHIGHGRTFVAFDVVARYLRYSGYQLNYVRNVTDV

SEQ ID NO: 186906 - protein, 362 aa, Unknown
  Bacterial polypetide isolated from the Sargasso Sea
ETIKHFHVDCNKLKNISPDFEPKATDHIKEMVELIDTLIEKDFAYEKSGNVFFRVKNYEHYGRLSHRTIDEMQAGARVEVSGVKENSADFTLWKPSSKDLPGWDSPWGRGRPGWHIECSAMSKKYLGETFDIHGGGADLIFPHHENEIAQSCCANNKQLMAKYWVHNGYVNLDQKKMSKSLGNFKTIYDLLKKFNGEVIRYFLLQAHYRAPLNFKQEYILEAKSSLSRLYRSIKGFEKNGDPDNEILFHLKNDLNTPKAFARAHFLSEQSNKGSREAGQLLKNSSALLGILEDDTETWFKNNPIDLKIEYQLTETNIENMIEDRRIAKENKDFKAADKIRDNLLNNGIVLEDNLNGTSWRRS

SEQ ID NO: 186907 - protein, 147 aa, Unknown
  Bacterial polypetide isolated from the Sargasso Sea
MTLSLYNTLSRAKEEFIPADPGRVTVYVCGPTVYSYAHIGNARPAVVFDVLVRLLRHQWPNVVFARNITDIDDKINAAAADQGVPIGTITEKFEKIYLDDMDSLGVLPPDIDPHATDHIPEMIAMMEKLIADGHAYAADGHVLFNVP

SEQ ID NO: 186908 - protein, 443 aa, Unknown
  Bacterial polypetide isolated from the Sargasso Sea
MLKIYNSLSKKKEDFVPNDPDHIKFYACGPTVYNKIHIGNARAFISADLLAKVLKGMYSKVTYVCNITDIDDKIIDAAKEENLSIKDISTKYFNQYQEDTALLGISKPDIQPFATDYIDDMITYIEKLIASDNAYEKDGNVLFRVSSFPNYGCLSDRKLDEHESGSRVKVEDFKESPNDFTLWKPSLDDDPGWDSPWGRGRPGWHLECSVMSESTLDIPFDIHSGGNDLKFPHHDNEIAQTCAYHGNEDPTSFAKYWVHNGFLNLEDQKMSKSLGNVIYIDQLLKKYKGNEVRLALLSTHYRQPIPWSEDLLDQSHNIYVKLQNAFKKYGKIEEKFYADSKIAEILMDDLNTPLAIRTMQDLISEPNEKIENEIATFKYIFEGSNQDLSLSDEQVNEINELVKERDDARNSGDYDRADKIRDKLSKMNVSIKDVNGKTEWEIL

SEQ ID NO: 186909 - protein, 410 aa, Unknown
  Bacterial polypetide isolated from the Sargasso Sea
RTFFCFDVMVNFFKFLGYEVNYVRNITDIDDKIIEKAKKEQVPFNLITDKFIKAMNDDFKALDIQPPNLEPKVSEHIEDILKMIENLEVNDFAYSKEDSDVYFDIEKFPDYGKLSNRVQDDLDSGSRVEIDKNKKNPNDFVLWKKTNEEPSWNSKWGPGRPGWHIECSAMSNKYLGANFDIHGGGLDLKFPHHENEIAQSECANNSDFANYWIHVAPLNVDGKKMSKSLGNYLTIRDLLNDYHPEVLKTFFLLTHYRKPINYTNDSIKESKNILDKLYESLKDVKKFNSSEVENEIIDSFKSALKDDFNTSKALKILQKISQGINSNKSDKKAKAKLSNTLKVLGNLLGILSNSSRDYFQYDSSKKISNEDIELMIKERNQARLNKDFKKADLIREKLSSLNITLEDDGE

SEQ ID NO: 186910 - protein, 249 aa, Unknown
  Bacterial polypetide isolated from the Sargasso Sea
GRPGWHLECSAMSKKYLGDKFDIHGGGRDLIFPHHENEIAQSRCANGTEVFSNYWVHNGFITLSNEKMSKSHGNILKINDLKNSINGQVLRLALMSTHYRQPLDWNDNLINESQKTIDKWYKSYVEVDRLKLISDEDLYPLYDDLNTPKYIANLHRLFEKSQSGNLENKKEFVSACNFVGLLKETKDEWINFKKNNSVLSDEIIETKIKERNDARDDKNYELADKIRNELLEKGVQIEDKDGKTSWKFK

SEQ ID NO: 186911 - protein, 228 aa, Unknown
  Bacterial polypetide isolated from the Sargasso Sea
DIHGGGRDLIFPHHENEIAQSRCANDTDVFANYWVHNGFITISNEKMAKSQGNILKIKDFKKNINGQVLRLALISSHYKQPLDWNDKLLDECQKILNKWYECYVDVKKKILIPNDILEPLYDDLNTPGYIANIHKLYNKAQNGDIKDKEIFTTACNFIGLLKDTKNEWIKFKKRKSDLSEEEILFKIKERDKARKNNDYKLSDKIRDELLNKGVLIEDKDGKTTWKLK

SEQ ID NO: 186912 - protein, 360 aa, Unknown
  Bacterial polypetide isolated from the Sargasso Sea
KISTKKLVEQTQKVYHEDLKSLSILEPTHEPKATEYISKMIDMITSLIQKDYAYVSSNHVLFESKKFKNYGALSKFSLKDIISGARVEVAEYKKNPEDFVLWKPSKDNEPYWESPWGKGRPGWHIECSAMIAELLGPTIDIHAGGLDLIFPHHENEIAQSCCYHDQNMANYWLHNGFINFEGEKMSKSLGNITIMNDLLTLHNPISIKYAILTTHYRQPIDFSNDLLKYSSNIVSKWRDFIKKATNNHLDQDFLKALEDDLNTPQALMRLQQIFNDLKKAPEDIELSNYFNNGLSLLGLVPHFQNTELSLDNDDIENMIARRADAKSNKNFELADQIREELLQNGIILEDTKSGTKWKKT

SEQ ID NO: 186913 - protein, 193 aa, Unknown
  Bacterial polypetide isolated from the Sargasso Sea
MDKDIFLTNSLGNQKEKFNPISSKKIGMYVCGPTVYDNPHIGNARPLVVFDILFKVLKCKYGNKAVNYVRNITDIDDKIIKASIEKKISISDLTKKITKIFHDDCNYLNCEAPSHEPKATENISLMIEMIIKLIKNNNAYESNQHVYFDVNKFKDYGKLSNKNLDELISGARVEISENKNNPADFVLWKPSSE

SEQ ID NO: 186914 - protein, 456 aa, Unknown
  Bacterial polypetide isolated from the Sargasso Sea
MSEIYLYDSLSNKKKKFEPIDQNHVRIYACGPTVYNYAHIGNARMAVVFDSFVRLLRNKYPKVTYVSNITDIDDKIIEAANESNIPINELTKKYTDIYNADMSNLNVLHPDIQPKATEYVEDMVNFIDKLIQKDKAYEKDGHVFFHVPSHEGYGKLSNREIDQQLAGSRVQVSDIKKNQQDFVLWKPSSKSQPGWDSPWGIGRPGWHTECCVMSEVNLKIPFDIHGGGQDLLFPHHENEIAQSCASVNSDNPEDYAKYWIHNGFVTIDGEKMSKSLNNIILLNDLLKEHDGETIRLALLSSHYRKSLDWNENVIKQSKVLLDKVYDFLDNCDDDPEGEIDQSLMENFSNDLDIPKVLTSINEILKNKNSSSPGTIKQSLLFAGSILGIFDKKPSEWNMQIEISDSELAEIEKLINERKTLKENKDFTGADAIRDSLLEKGIELIDSEDGTTWKSKS

SEQ ID NO: 186915 - protein, 413 aa, Unknown
  Bacterial polypetide isolated from the Sargasso Sea
MIPHIGNARPLIIFDILFKLLKKKFESVTYVRNITDIDDKIIKSSQEQKISTKELTEKVTKSFLEDCKFLNCENPTHQPKATEHIGLMIEMINELIKKGFAYENESHVYFEVKKFSDYGKLSNKNLEELIAGSRVEISENKKNSEDFVLWKPSNDNEPSWDSPWGKGRPGWHLECSAMSKKFLGEEFDIHGGGIDLIFPHHENEIAQSRCANDTKAFANYWVHNAFITMSNEKMAKSQGNILKIKDFREKMSGQVIRLALMSAHYKQPLDWNEKLINDCQNTLDKWYRIYSPEIKSADIPEMILKPLYEDLNTPGYIANLHQLYDKANKGEDLDIFISACKFIGLFNEDSKQWDSFKKNKASISEEQIKKMIDLRNKARENKNYKEADEIRNKLLDKGVLIEDKDDKTLWKFK

SEQ ID NO: 186916 - protein, 264 aa, Unknown
  Bacterial polypetide isolated from the Sargasso Sea
MKIKLYNSNTKSKELFVPIDPKKVTMYVCGPTVYSYPHIGNARGPVIFDVLARLLKREFDLTYVRNITDLDDKIYQAADDEGKHISEVTQRYTRIYQEDMSALGVEKPDLEPLATEHIPEMIEMIEGLIIKGHAYENQGHVFFSVETFDDYGFLSNRTEDEQISGTRIKSSEIKNNQRDFVLWKPSTGQTPGWESPWGYGRPGWHLECSAMAKKYLGRTLDIHGGGSDLLFPHHENECAQSICSHSGEPLANYWVHNGMIDFDN

SEQ ID NO: 186917 - protein, 288 aa, Unknown
  Bacterial polypetide isolated from the Sargasso Sea
MKKDIFLSNSLGNKKEKFIPINEDKIGMYVCGPTVYDYPHIGNARPLVIFDILYKVLKCKFGKNKVTYIRNITDIDDKIIEASIEKKISIDDLTKKITNIFHEDCKYLNCEVPTHEPKATENILLMIEMIKKLLDNKFAYENNNHVYFEVNKFKDYGKLSNKNLDELISGVRVEISKYKKNPADFVLWKPSKSNEPSWESPWGKGRPGWHLECSVMSKKFLGNKFDIHGGGMDLIFPHHENEIAQSRCANENEILANYWVHNGFITISSEKMSKSKGNILKIEDLKKR

SEQ ID NO: 186918 - protein, 238 aa, Unknown
  Bacterial polypetide isolated from the Sargasso Sea
SAMSKKFLGNEFDIHGGGIDLIFPHHENEIAQSRCANDSKIFAKYWVHNAFITMSNEKMAKSQGNILKIKDFRNKISGQVLRLALMSAHYKQPLDWNDKLINDCQNTLNKWYRIYSTDIKSAKVKEEILKPLYEDLNTPGYIANLHKLYEKANKGEDKELFISACKFIGLFNEDNQQWEKYKKDKATISESEINSKIDLRNKARANKDYNEADRIRDELLNKGVLIEDKDGKTLWKFK

SEQ ID NO: 186919 - protein, 377 aa, Unknown
  Bacterial polypetide isolated from the Sargasso Sea
DKIIKASNDKKISIKDLTLKISESFHDDCKYLKCEQPTEEPKATDNINQMVDMITDLENQGYAYSNNNHVYFEVNKFEDYGKLSNKKLDELIAGSRVEVSEFKKNPEDFVLWKPSTADEPSWDSPWGKGRPGWHLECSAMSKRYLGDEFDIHGGGRDLIFPHHENEIAQSRCANGTKSFANYWVHNGFITLSNEKMAKSQGNILKIKDFKTKYNGQVLRLALITSHYRQGLDWNDKLISECEKTLTKWYSAHIEVKERITVSDDILSPLYDDLNTPGYIANLHSLYFKASSGTDEDKNIFVSACNFIGLLTDTKEEWMSFKKNSINISEDEIRSKIEERNKARSDKNYELADKIRQDLLDKGILIEDKDGTTSWKLK

SEQ ID NO: 186920 - protein, 457 aa, Unknown
  Bacterial polypetide isolated from the Sargasso Sea
MSLKLYNSLSSKKEIFKSISDKKVKTYGCGPTVYNDPHIGNFRTFVFYDLLNRVLQLNGYETETAVNITDIDDKIIDRVNHENTSLKEITSKYELSFMELSKSLKILPNNHNPRATEYVEEMIEFIQALIDQSLAYEMKGNIFFDIEAYPKYGKFVNINDELETEDNELLKRNRNDFTLWKAKKDSDGEIFWNSEWGKGRPGWHTECAVMIKTLFDGRLDIHCGGIDLKFPHHENESAQIEALQKHNLSNYWLHAEHLNMDDEKMSKSLGNFIDVNNLIENNGSDVVRLFLLSAHYRTKVSFSQKKLDECKKMIEKINRFAKNFKFDDQSIELKFSDDHNLFIDALNDDLNTPEAIGVFFSFISEMNKKIAENSINESDKEKSLVFLKLFNSIFAILDSNNLQDHKIPKEIQTLLISRQEARENQDWKLSDSIRDKIESLGWHVEDTSSGQKPSKKN

SEQ ID NO: 186921 - protein, 263 aa, Unknown
  Bacterial polypetide isolated from the Sargasso Sea
MSLDIFLTNNLTNKKEKFIPKDKNNVRMYVCGPTVYDDPHIGNARPVVVFDILFKILKNKYPNVTYVRNITDVDDKIIKSSKENNISISELTKKITQSFNEDCIYLNCEQPNHEPKATEHISEMIEMISELIKKGFAYENNKHVYFEVKKFKDYGQLSNKKLDELVAGSRIEVSDNKKNPEDFVLWKPSETDEPSWDSPWGKGRPGWHLECSAMSKKYLGNEFDVHGGGVDLLFPHHENEIAQSRCANDSKAFANYWLHNAFI

SEQ ID NO: 186922 - protein, 277 aa, Unknown
  Bacterial polypetide isolated from the Sargasso Sea
MNKDIFLTNSYGGKKEKFQPIDENNIKMYVCGPTVYDDPHIGNARPLVVFDLLFKVLKCKYGNDKVTYVRNITDIDDKIIQSAKDSKISIKDLTTKINNNFQEDCNYLNCEKPSFQPKATENIKEMIEMISILVEKGFAYQSKNHIYFEVKKFKDYGKLSNKKIDDLISGSRVEVSTNKKNAEDFVLWKPSNDDEPSWTSPWGHGRPGWHLECSAMSKKYLGKKFDIHGGGRDLLFPHHENEIAQSCCANGTEVLSNHWVHNGFITQSNEKMSKSQG

SEQ ID NO: 186923 - protein, 489 aa, Unknown
  Bacterial polypetide isolated from the Sargasso Sea
MIKLFNTLSKRVEVFKPIDDVVKIYCCGVTVYDLCHLGHARSYIAWDVLRRFLIYSDFKVKYVQNFTDIDDKILKRAKEESSSMKEVSEKNIIEFHKDMDSLGIMRPDSMPRATNHICNICSFITILEDKGYAYSRDGDVYYSVFKNKNYGKLSNQNLHEQNINQQGRMVNEENSKKLNPQDFALWKKAKNDEPFFDSPWGKGRPGWHIECSAMVKDELGDTIDIHLGGSDLIFPHHENEIAQSEAANGKKLANYWLHNGMVNVNGQKMSKSLKNFKTIRELIKSGVSPMTLRYFVMTVNYRKPLDFTEDALRSASEAWKNINVALSFMELTKGVFRSIDKDESIEEEYKEKISFELSQKKLKFSEALGNDLNTAGAIAIIYDLAKPLKNFLNQFQRVEGFKIDQNEKFFLLENFKTLAKLTEVLGLKKEVLVKESKITEEEISSLINERLKAKMEKNYAKADEIRNLLKEKGIELIDQSKEITTWIRV

SEQ ID NO: 186924 - protein, 249 aa, Unknown
  Bacterial polypetide isolated from the Sargasso Sea
MIRIFNTLQKEIQDFVPLEKKHVKVYVCGPTVYDKIHIGNARPLVVFDVLVRLLKSNFEKVTYVRNITDVDDKINNQSHETGIPINELTKETIKHFHNDCLSLQNILPDIEPKATDHINEMIEMIKVLIDKGFAYESCGNVMFRVNRYKNYGLLSKRTLEEMIAGSRIEIAGYKEDPSDFILWKPSSNDLPGWESPWGRGRPGWHIECSAMSKKYLGKTFDIHGGGIDLVFPHHENEIAQSCCANDTEI

SEQ ID NO: 186925 - protein, 219 aa, Unknown
  Bacterial polypetide isolated from the Sargasso Sea
IFPHHENEIAQSRCANDTDVFANYWLHNGFITISNEKMAKSQGNILKIKDLKKSINGQVLRLALISAHYKQPLDWNDKLLNECQKILNKWYDCYVEVKKSVLIPEEFLEPLYDDLNTPGYISNIHKLYDKAQNGSIEDKEIFTTACNFIGLLTDTKDQWLKFKKEKLDISEEEILSKIKERDKARENKDYKLSDEIRNELLNKGVLIEDKDGKTTWKLK

SEQ ID NO: 186926 - protein, 387 aa, Unknown
  Bacterial polypetide isolated from the Sargasso Sea
VTYVRNITDIDDKIINSSKEKNISISELTEKITKTFHDDCNYLNCETPTHEPKATENIKLMIEMIEELISKEYAYESEKHVYFKVKNFEDYGKLSNKKLEDLIAGSRVDISEKKHNPEDFVLWKPSKENEPYWSSPWGNGRPGWHLECSVMSKKYLGETFDIHGGGRDLIFPHHENEIAQSVCANNKKFANYWVHNGFITISKEKMSKSQGNILKIDSLKNKYNGQVLRLALMSSHYRQPLDWNDQLMEECYKTLDKWYSCYLKLEKKILIDDDDLLPLYDDLNTPGYISVLHKLFDKAKSGNQQDKEKFIAGCNFVGLLEQSKEEWLSFKKGKIKISEEEINLLINKRNEARNSKNYELADKIRNELLDKGVLIEDKDGKTTWKIK

SEQ ID NO: 186927 - protein, 460 aa, Unknown
  Bacterial polypetide isolated from the Sargasso Sea
MSLQLQNTLSGKKEFFKPVNPDHVRIYACGPTVYNFAHIGNARMAVVNDLLVRVLKTQFKQVTYVSNITDIDDKIIEASKETGEDISVITNKYTEIYNNDMSALGVNLPDIQPRATDHIKEMIELIKKLIDENKAYEKEGHVLFHVPSFDNYGILSKRNRDEQIAGSRVEVAPFKKDPADFILWKPSPSPLPGWDSPWGFGRPGWHLECSVMSEKSLGLPFDIHSGGIDLVFPHHENEIAQTCSISENKDPKDFATYWFHNGFVNVEGEKMSKSIGNIRLVHDLNKKYKGEVLRLTLLSAHYKQPLNWTEEIIEQNSKMIDRLYRVLLELSEVEIDSNLPSDSIMESFLDDLNTPKVIAKLNEEANDASSASDERKKEIKKNLLSAGKILGILEDDPGNWLGYNQKDTENTEEIERLINERNEARRSKNFNLADTIRDTLKDKGIEIEDTDKGTIWRKSR

SEQ ID NO: 186928 - protein, 388 aa, Unknown
  Bacterial polypetide isolated from the Sargasso Sea
NARPLVIFDILYKILKNNFSKVTYVRNITDIDDKIIKSSQDQKISTTELTEKITLSFLEDCKFLNCESPSHQPKATEHINLMIEMINLLIKKGFAYEKNNHVYFEVKKFSEYGKLSNKNLEDLISGSRIEVSENKKSSEDFVLWKPSNRDEPSWESPWGNGRPGWHLECSAMSKKFLGSEFDIHGGGIDLIFPHHENEIAQSRCANDTKTFAKYWVHNAFITMSNEKMAKSQGNILKIKNFRNNTSGQVIRLALMSAHYKQPLDWNYKLISDCQNTLNKWYRIYSSDIKTVQVTKEVLKPLYEDLNTPGYIANLHQLYEQANKGENKELFISACKFIGLFNENIEQWEKYKKDKALINETEITSKIDLRNKARADKDYKEADRIRDEL

SEQ ID NO: 186929 - protein, 386 aa, Unknown
  Bacterial polypetide isolated from the Sargasso Sea
MRLYDTAHQAVVDLELDNHVRMYVCGITPYDSTHLGHAATYLTYDLIIRRLEDLGHTVEMVRNVTDVDDSILPKARELGIDFLQLAEQEMERFGKDMDALNMRPANFEPRATESIDSMLDLIQQLQDGGHTYVSEGTTYFDVTTFPSFGKLSHLTEKEMKELAAERGGNPDNPAQRNPLDFVLWQPSAEDEPKWDSPFGIGRPGWHIECSAMCMNALGQTIDIHGGGGDLIFPHHECEIAQSEAVNGSPFSRYWVHAGLVAYQGTKMSKSLGNLVFVSDLREEIDPRAIRLALMAHHYRSDFEWFDDEGPKAQTDLDLLIEACAITKPISDGQLMDEVREALDDDLNAPRARELLLNSARTILEDSSQRHESCVAAAAALCGIEIR

SEQ ID NO: 186930 - protein, 324 aa, Unknown
  Bacterial polypetide isolated from the Sargasso Sea
MNQSTHNFPNIELYNTLSHQKEHFKTVVPGKVGMYLCGPTVYKPSHIGHMVGPVIFDTIKRHLVYSGWDVTWVVNITDVDDKLIAESKNRGTSMAALAEEMTTDYLDNLAALGVDGIDTMPKATDHIEGIIQFIAGLVEKDFAYPADGDVYFDVAKDEDYGKLTNRTLEKTQGEGGAAASRKRSAADFALWKKAKSGEPSWESPWGPGRPGWHIECSAMSEALLGSHFDIHGGGLDLVFPHHENEIAQSESLHDCPMATYWMHNGLMQAAGAAGKVGGRPRDGGATPDDLAATKISKSTGAEPFRELLSRHRPEAIKLLLLSTH

SEQ ID NO: 186931 - protein, 151 aa, Unknown
  Bacterial polypetide isolated from the Sargasso Sea
MGNDIFLTNNLSNKKEKFVPIDEKNIRMYVCGPTVYDDPHIGNARPLVVFDTLYKIFKKKYPKVTYVRNITDIDDKIINSSKTKNISISELTENINKSFQKDCSYLNCEIPTFQPKATEHIDLMIEMISYLINKGFAYEENQHVYFEVKKF

SEQ ID NO: 186932 - protein, 368 aa, Unknown
  Bacterial polypetide isolated from the Sargasso Sea
MLKIYNSITRQKQEFKPINPGKVGMYVCGVTVYDLCHIGHGRTFVSFDMIVRYLRYAGYEVNFQRNITDIDDKIIKRANENQEDCNTLTDRLIGEMHKDFDALNMIRPDFEPRATLHIAEIIDMVERLLARGHAYVAADGDVLFSVASFPEYGRLSGQNLEQLQAGARVEVDDNKQNPMDFVLWKMSKPGEPTWESPWGPGRPGWHIECSAMNSKHLGLHFDIHGGGSDLQFPHHENEIAQSCCAHDTPYVNYWMHTGMVMVDREKMSKSLGNFFTIRDVLGHYDAETVRYFLLSGHYRSQINYSEENLKQARAALERLYTAIKDVDLTVAPAPAEEFVAKFKRQWTMTLTPQKPIQCCLIWCVRSTV

SEQ ID NO: 186933 - protein, 336 aa, Unknown
  Bacterial polypetide isolated from the Sargasso Sea
PRATEHIKGMITMTENLLSNKHAYEKDKHVYFSVNSFKNYGKLSNKKPGELEAGSRVEISKLKNNPLDFVLWKPSSSDDPGWDSPWGRGRPGWHLECSVMSEKYLGKNFDIHGGGLDLVFPHHENEIAQSCCANKTDKFANYWLHNGYVTYNKEKMSKSLGNIITMQKMKNKINGQVIRLALLSSHYKQPLDWNEKLVNESQSTLDKWYNLYEPVKGSNLDDNLVSPLLEDLNTPGFISKLHLLYEKASKGDKSSKKLFLEGCKLIGLMEENQESWKNFKKTKINIDENTIELKIKERENARKKGNYKLADDIRKELEENGISIEDKNNKTIWKYK

SEQ ID NO: 186934 - protein, 329 aa, Unknown
  Bacterial polypetide isolated from the Sargasso Sea
IMIEMISDLIKKGFAYEENQHVYFEVNKFKDYGKLSNKKLDELIAGSRVEVSDNKKNSQDFVLWKPSKDDEPSWESPWGKGRPGWHLECSAMSKKLLGNEFDIHGGGIDLLFPHHENEIAQSRCANDTKVFANYWLHNAFITMSNEKMAKSQGNILKIKNFRNNLSGQVLRLALMSAHYKQPLDWNDKLLNDCQNTISKWYNVYSSGYHEEEVDDEILKPLYDDLNTPGYIANLHKLYEKAQKGNSTDKALFTSACNFIGLLNETEIEWLEFKKNKLSINEAEILDKIEQRNKARKDKNYEEADKIRDELLDKGVLLEDKDGKTTWKFK

SEQ ID NO: 186935 - protein, 446 aa, Unknown
  Bacterial polypetide isolated from the Sargasso Sea
MDFELFNTYSNKTELFTPLDDNDIRIYVCGPTVYDYIHVGNARPLIIFDVLVRFLKLIYPKVTYVRNITDVDDKIIVQANQNKESINNLTERTIKAFSDDADALFVKKPDFEPRATEHIQEMLKMIKVLLENGNAYLSDGHVLFSVSSMPNYGKLSGMNLSEMIDGARVEVSDYKKEPADFVLWKPSKTGELGWHSDFGFGRPGWHIECSAMSEKYLGKQFDIHAGGLDLIFPHHENEIAQSCCAFNTEFMAKYWMHNGYITVNNEKMSKSEGNFITVRDALKKHDGETIRYAILSGHYRSPIDFSFKALKEAKSALDRLYRASENFEHDNVIDEEFLSCLSNDLNSPQAISRLHELASEYNKGNKNAGQLLKSSAQILGLLNYDTSKWFTKDVSDDENEINNLIAERDKARSDKNFKLADEIRDKLKEMGVSIEDSNSGTKWRVD

SEQ ID NO: 186936 - protein, 283 aa, Unknown
  Bacterial polypetide isolated from the Sargasso Sea
WHIECSAMVKDELGDTIDIHLGGSDLIFPHHENEIAQSEAANGKKLANYWLHNGMVNVNGQKMSKSLKNFKTIRELIKSGISPMTLRYFVMTVNYRKPLDFTEEALRSASEAWKNINVALSFLDLTKGAFKSIDKNESIEDEYKEKISFELSQKKLKFSEALGNDLNTAGAIAIIYDLAKPLKNFLNQFQRVEGFKIDLNEKFFLLENFKTLEKLTEVLGLKKEVLVKESKIKEEEISMLINERLKAKKEKNYTKADEIRNLLKEKGIELIDQSKEITTWIRV

SEQ ID NO: 186937 - protein, 163 aa, Unknown
  Bacterial polypetide isolated from the Sargasso Sea
MSQKDLYIYNSLTSSKEKFKSLRNNSVGMYVCGPTVYSEVHLGNCRTFISFDVIYRYLTHLGYKVRYVRNITDVGHLEDTGEDKISKKAKIEQVEPMEIAQKYTNSFREILKEFNVLDPSIEPTASGHITEQISIIEDLIQKNLAYISNGSVYFDISNYNDID

SEQ ID NO: 186938 - protein, 325 aa, Unknown
  Bacterial polypetide isolated from the Sargasso Sea
GRDPNEQQQGASGRTADGEESRKRHPFDFALWKGAKAGEPSWDSPWGPGRPGWHIECSAMVRQELGLTIDIHLGGGDLVFPHHENEIAQSETANGTTLAKLWMHNGMVNVGGTKMSKSLGNFTTIRALLDSGISPMTLRLFVLQAHYRKPLDFTAEALDAAASGWKGLNSALLVGERHGESLGWSTAPGEVSPELEEQRQRFMEAMDDDLNSSGGLAVLFELARPLRALANRLERSDAIHPEDKLLCGQWQLLQDLAGALGLATEITAPACASDDSARIHDLIEARKAAKANKDYGEADRIRAELKAEGVELIDKPGGVTDWIRA

SEQ ID NO: 186939 - protein, 453 aa, Unknown
  Bacterial polypetide isolated from the Sargasso Sea
MNKDIYLTNSLGGKKEIFKPIDPKKVRMYVCGPTVYDDPHIGNARPLVVFDILFKVLKCKYGNSSVLYARNITDVDDKIIEGAKNKNITINKLTEDTTKRFNEDCNYLKCEKPSFEPKATENIPLMIDMINILIKKNNAYENKSHVYFNVSSFKDYGKLSNKNVDELFAGARVEVSENKKRPEDFVLWKPSTKDEPGWDSPWGRGRPGWHIECSAMSKKFLGDTFDIHGGGRDLLFPHHENEIAQSRCANENKSLSNYWIHNGFITVSNEKMAKSQGNVFKIKDFYERYNGQVLRLALISTHYRQAMDWNENLLTQSKKTLDKWYECQKKPEGKVLIPDDDLVPLYDDLNTPGYISNIHKLYDKAAKGSDKDKEIFTTACNFIGLLTEPKSKWQEFKKNILEISEEEILQKIKDRNTARDNKNYQLADEIRNELLDKGILIEDKDDKTTWKIK

SEQ ID NO: 186940 - protein, 299 aa, Unknown
  Bacterial polypetide isolated from the Sargasso Sea
MKTLKIHNTLGNNLEEFKPIDPLNVRVYACGPTVYNYAHIGNARMAVVNDLLIRFLKTLYPKVTYVSNITDIDDKIIAASQENKISIKELTEKYTKIYNEDMSILGVNQPDIQPKATDYIKEMINLIEKLIKNNFAYEKDGHVLFHVPSFKNYGMLSGRNRDEQITGSRVEVAPYKKDPTDFVLWKPSPSPLPGWESPWGLGRPGWHLECSAMSEKTLGLPFDIHSGGADLIFPHHENEIAQTCAAHKSNDDLKSFSKYWFHNGFVNVEGEKMSKSIGNIKLVHDLVKKYKGEVLRLTL

SEQ ID NO: 186941 - protein, 396 aa, Unknown
  Bacterial polypetide isolated from the Sargasso Sea
MKNNQLNLSNTITGKRETFVPINPKKIGMYVCGPTVYDFPHVGNARPLVVFDVLYRVLSKIFGKTNVNYVRNITDIDDKIIESSKNKKISIDELTTTITKSFHDDCKYLNCLKPNSEPKATEHIKGMINMTENLLKNNHAYEKDNHVYFSINSFESYGKLSNKNPEELVAGARVEISKLKKHPLDFVLWKPSSKEDPGWESPWGRGRPGWHLECSVMSEKFLGKNFDIHGGGLDLIFPHHENEIAQSCCANKVEKFANYWLHNGYVTFNKEKMSKSLGNIVTIEKMRKTINGQVIRLALLSSHYKQPLDWNENLIKESQATLDKWYSLYENTQEDNLNNDLLQPLLEDLNTPGYIAKLHLLFEKSSKGDVSSKKLFLAGCKLIGLLEEDFETWEKF

SEQ ID NO: 186942 - protein, 248 aa, Unknown
  Bacterial polypetide isolated from the Sargasso Sea
MDIYFTNNLTNKKEQFIPRDIKNVGMYVCGPTVYDDPHIGNARPLVIFDILFKLLKNKFTSVTYVRNITDIDDKIIKSSKEQNISSKELTEKITKNFLNDCSYLNCESPTHQPRATEHIDLMIKMINKLIKKGFAYENNKHVYFEVKKFSDYGKLSNKKLEDLIAGSRVEVSEDKKNSEDFVLWKPSNEDEPSWDSPWGKGRPGWHLECSAMAKKFLGNEFDIHGGGIDLIFPHHENEIAQSTCANDT

SEQ ID NO: 186943 - protein, 88 aa, Unknown
  Bacterial polypetide isolated from the Sargasso Sea
MLSKPLVLYNSLSGKKEEFKPLKKNHLGIYVCGPTVYSNVHLGNCRTFISFDIIYRYFMHKGYKVRYVRNITDVGHLEDDGQDRINKK

SEQ ID NO: 186944 - protein, 106 aa, Unknown
  Bacterial polypetide isolated from the Sargasso Sea
MIKLFNTLSKKVEVFKPIDDVVKIYCCGVTVYDLCHLGHARSYIAWDVLRRFLIYSDFKVKYVQNFTDIDDKILKRAKEESSSMKEVSEKNIIEFHKDMDSLGIMR

SEQ ID NO: 186945 - protein, 227 aa, Unknown
  Bacterial polypetide isolated from the Sargasso Sea
FDIHGGGIDLVFPHHENEIAQSRCANQTKVFANYWIHNAFITMSNEKMAKSQGNILKIKNFRKKISGQVIRLALMSAHYKQPLDWNNKLLDNCQSTLDKWYRVYSQDIKSIKLTDEILKPLYEDLNTPGYIANLHQLYEKANMGQNKELFLSACKFIGLLNENKEQWENYKKINASITVTDIESKIDLRNKARANKDYKEADRIRDDLLNKGVLIEDKDGKTLWKFK

SEQ ID NO: 186946 - protein, 287 aa, Unknown
  Bacterial polypetide isolated from the Sargasso Sea
DFWSKGVEISENKNNPADFVLWKPSSENEPSWESPWGKGRPGWHLECSVMSKKYLGDKFDIHGGGIDLIFPHHENEIAQSRCANENETFANYWIHNGFITISSEKMSKSQGNVLTIDDLKNKVNGQVIRLALISAHYKQPLDWNEKLLSESEKTINKWYESYTELKKQVLIPQDHLSPLYDDLNTPGYIANLHKLFESSQKGSTKDKEIFVSACNFIGLLNEDKETWEKFKQSKSKISKEEIEKKIEERNIARKNKDYKAADNIRDELLDKGVLIEDKDDKTLWKFK

SEQ ID NO: 186947 - protein, 250 aa, Unknown
  Bacterial polypetide isolated from the Sargasso Sea
AGKTGWHLECSVMSKKYLGDKFDIHGGGIDLIFPHHENEIAQSCCANDTEVFSNYWVHNGFITLSNEKMAKSQGNILKISDFKNNVNGQALRLALISAHYRQPLDWNDKLLEESQKTIDKWYKSYVELNKPKLISDDDLYPLYDDLNTPKYIANLHKLYEKSQSGNLEDKQEFISACNFVGLLTETKDEWEKFKKNKSDLSDEIIEIKIKERNQARDDKNYELADKIRNDLLEKGVQIEDKGGKTSWKFK

SEQ ID NO: 186948 - protein, 246 aa, Unknown
  Bacterial polypetide isolated from the Sargasso Sea
MGNDIFLTNNLNNKKEKFVPIDEKNIKMYVCGPTVYDDPHIGNARPIVVFDILYKIFKKKYPKVTYVRNITDVDDKIINSSKSKNISISELTENVNKSFQKDCSYLNCDIPTHQPKATEHIDLMIEMISNLINKGFAYEENQHVYFEVKKFKDYGKLSNKNLDELITGSRVEVSDNKKNSQDFVLWKPSKADEPSWASPWGKGRPGWHLECSAMSKKFLGNEFDIHGGGIDLLFPHHENEIAQSRC

SEQ ID NO: 186949 - protein, 453 aa, Unknown
  Bacterial polypetide isolated from the Sargasso Sea
MNRDIYLSNSLGGRKEKFKPINPKKVRMYVCGPTVYDDPHIGNARPLVVFDILFKILKCKFGNSSVVYVRNITDVDDKIIEGAKQKKILINKLTTDITKRFNEDCDYLNCEKPSFEPKATENIPLMIDMIKILIKKNNAYENNSHVYFDVSSFKDYGKLSNKNVDQLFAGARVEVSENKKRPEDFVLWKPSLKEEPGWDSPWGRGRPGWHIECSAMSKKYLGDTFDIHGGGRDLLFPHHENEIAQSRCANDNKSLSNFWIHNGFITVSNEKMSKSLGNIYKIKDFYKKYNGQVLRLALMSTHYKQAMDWSDDLLLQSQKTLDKWYEHQKKPEGKVLIPDEDLNPLYDDINTPGYISNIHKLYDKAAKGSDKDKEIFTMACNFIGLLNEPKSKWLKFKKNILEISEEEILRKIKDRDKARDNKNYELADKIRNELLDKGVLIEDKDDKTTWKLK

SEQ ID NO: 186950 - protein, 162 aa, Unknown
  Bacterial polypetide isolated from the Sargasso Sea
MGNDIFLTNNLNNKKEKFVPIDEKNIRMYVCGPTVYDDPHIGNARPIVVFDILYKIFKKKYAKVTYVRNITDVDDKIINSSKDKNISIAELTENVNKSFQKDCSYLNCDIPTHQPKATEHIDLMIEMISDLINKGFAYEENQHVYFEVKKFKDYGKLSNKNL

SEQ ID NO: 186951 - protein, 400 aa, Unknown
  Bacterial polypetide isolated from the Sargasso Sea
KPVKNGQVKMYVCGPTVYDFAHIGNARPVVVFDLFYRMFLQSYGEANVTYVRNFTDVDDKINERSKKLGIKIGELTNSTIEDYLFDMDSLGALRPNFMPRATNYIEHMIEMIKKLIESNNAYSDDGGHVMFSVRTFKDYGQLSRRTIEEMKAGARVEVAQNKRDPMDFVLWKPSTDNQPGWESPWGRGRPGWHIECSAMSKELLGHSFDIHGGGIDLAFPHHENELAQSLCANPGKSFAKYWLHNGMLTVEGNKMSKSLGNFVTVRELLEDGISGDAIRLALISSHYRQPLDWTKKRLNECGETIKRWKELTLGKKEIGFQSNKVLEAIYDDLNTPKAISEMHHLAKNGDYEGLLASLRFMGFLDTRTAKNKPEIESEVKKLVESLIERRKQAKLDKNLS

SEQ ID NO: 186952 - protein, 163 aa, Unknown
  Bacterial polypetide isolated from the Sargasso Sea
MDIFLTNNLTNKKEQFIPKDKKNIGMYVCGPTVYDDPHIGNARPLVIFDILFKLLKNTFPKVTYVRNITDIDDKIIKSSQEQKISARELTEKVTSSFYEDCKFLNCENPTYQPKATEHINLMIEMINQLIKKGFAYENNNHVYFEVKKFSDYGKLSNKKLEDL

SEQ ID NO: 186953 - protein, 233 aa, Unknown
  Bacterial polypetide isolated from the Sargasso Sea
MKIFNTLSGKKEIFEPIEDNKIRMYVCGMTVYDDTHIGHARTFLSFDLIVRYLRSIDYEVQYIRNITDVDDKIIARSEELNISPSELTKDCINSMHVDFQALGMISPDAEPRATENIDSIISLITKLIDKGHAYVSESDVYFSTESFEEYGKLSKRKLEDMLSGARIDIDLDKKNPADFVLWKKDTEGLKWDSPWGPGRPGWHIECSAMSMDALGETFDIHGGGSDLKFLIRK

SEQ ID NO: 186954 - protein, 236 aa, Unknown
  Bacterial polypetide isolated from the Sargasso Sea
MIKLFNTLSKKVEVFKPIDDVVKIYCCGVTVYDLCHLGHARSYIAWDVLRRFLIYSDFKVKYVQNFTDIDDKILKRAKEESSSMKEVSEKNIIEFHKDMDSLGIMRPDSMPRATNHICNICSFITILEDKGFAYSRDGDVYYSVFKNKNYGKLSNQNLQEQNINQQGRMVNEENSKKLNPQDFALWKKAKDDEPFFDSPWGKGRPGWHIECSAMVKDELGDTIDIHLGGSDLIFPH

SEQ ID NO: 186955 - protein, 254 aa, Unknown
  Bacterial polypetide isolated from the Sargasso Sea
ESPWGRGRPGWHLECSVMSEKFLGKNFDIHGGGLDLIFPHHENEIAQSCCANKVDKFANYWLHNGYVTFNKEKMSKSLGNIVTIEKMRKTINGQVIRLALLSSHYKQPLDWNENLIKESQNTLDKWYTQFENTKEDALTQDLLEPLLEDINTPGFIAKLHSLYDKASKGDQSSKKTFLAGCKLIGLLEEDLEIWNKFKKTTSKIDEKNIQNKIKNRDQARKKGDYKLADNIRKELESKGVIIEDKDNKTIWKYK

SEQ ID NO: 186956 - protein, 342 aa, Unknown
  Bacterial polypetide isolated from the Sargasso Sea
MSKDIFLTNNLTNKKEKFVPLDKSNIRMYVCGPTVYDDPHIGNARPIVVFDILFKIFKKNYPKVTYVRNITDVDDKIIKSSKENNISISELTSKVTKSFSEDCHYLNCEKPTHQPKATENIDLMIKMISELIKKGFAYQNNKHIYFEVKKFKDYGQLSNKKLEELIAGSRVEVSENKKNSEDFVLWKPSEDEEPSWESPWGKGRPGWHLECSAMSKKFLGDKFDVHGGGIDLLFPHHENEIAQSRCANDTKILAKFWMHNAFITMSNEKMAKSQGNILKIKDFRNKISGQVLRLALLSAHYKQPLDWNDKLLDDCQNTINKWYNSYLDIENNSKVSDEILQP

SEQ ID NO: 186957 - protein, 307 aa, Unknown
  Bacterial polypetide isolated from the Sargasso Sea
YFKVKNFNDYGKLSNKNLDDLIAGSRVELSDNKDSPEDFVLWKPSNDDEPSWNSPWGKGRPGWHLECSVMSKKYLGNTFDIHGGGRDLIFPHHENEIAQSVCANKTKKFANYWVHNNFITNSKEKMAKSQGNILKISDYKKKYNGQVLRLALMSTHYSQPLDWNDKLMDECNRTLDKWYNCFVPVNKKVLIEDNDLKPLYDDLNTPGFIAVLHKLFDKAKDGTFEDKEIFSTACKFVGLLDQSKDEWDSFKKQNLKLSENDILKKIEERNKARDKKDYELADKIRNELLDKGILIEDKDGKTIWKIK

SEQ ID NO: 186958 - protein, 282 aa, Unknown
  Bacterial polypetide isolated from the Sargasso Sea
MIKLFNTLSKRVEVFKPIDDVVKIYCCGVTVYDLCHLGHARSYIAWDVLRRFLIYSDFKVKYVQNFTDIDDKILKRAKEESSSMKEVSEKNIIEFHKDMDSLGIMRPDSMPRATNHICNICSFITILEDKGYAYSSDGDVYYSVFKNKNYGKLSNQNIQEQNINQQGRMANEENSKKLNPQDFALWKKAKDDEPFFDSPWGKGRPGWHIECSAMVKDELGDTIDIHLGGSDLIFPHHENEIAQSEAANGKKLANYWLHNGMVNVNGQKMSKSLKNFKTIREL

SEQ ID NO: 186959 - protein, 252 aa, Unknown
  Bacterial polypetide isolated from the Sargasso Sea
MDIFLYNSLSKQKEKFTPIDPKSIKMYVCGPTVYDEPHIGNARPVIVFDLLFRLLRYKYGNDKVNYVRNITDVDDKINKIALQKYPDLDINEAIREITNKIEVIFKDTAIKLGCLEPSKEPRATEHVTEMINIIDSLLINKKAYVNEGHVIFDINSYSNYGHLSNKSKEDLMAGVRIEVATYKRDPLDFVLWKPSAVNEPSWDSPWGRGRPGWHIECSAMSAKYLGEVFDIHGGGIDLAFPHHENEIAQSCS

SEQ ID NO: 186960 - protein, 254 aa, Unknown
  Bacterial polypetide isolated from the Sargasso Sea
PGWHTECSAMSKKTLGLPFDIHGGGRDLIFPHHENEIAQSCCSSANIEDPTSYAKYWMHNGFVTIDGQKMSKSLGNIILVNELTESHHGEVIRLALLSSHYRQGLDWNEKIIHQASILLDKLYEIKFLLNGENTEYSSETNLEPIAYLADDLNTPGLIAELHKLVKDFNTSNSNKSEIKIHLNLISQALGILQDDSYKKISEELESKIHSLILKRKVAKDSKDYELADKIRNELFDLGVEIKDTSSGTDWNLKS

SEQ ID NO: 186961 - protein, 307 aa, Unknown
  Bacterial polypetide isolated from the Sargasso Sea
MKINLYNSSTKSKELFVPIDPKKVTMYVCGPTVYSFPHIGNARGPVIFDVLANLLRREYQLVYVRNITDLDDKIYQAAEEEGVQISEITQRYTKIYQEDMNALGVRDPDIEPLATDHIAEMIEMIQGLIDKSHAYENQGHVFFSIDTFNDYGFLSNRSEEEQISGTRIKPSEIKKNQKDFVLWKPSTGDTPGWDSPWGFGRPGWHLECSAMAKKYLGKTLDIHGGGSDLLFPHHENECAQSMCSHSGKPLANYWIHNGMIDFDNVKMSKSEGNLLLIRDLLKQIGPEIIRMAFLTTHYRKPINGMML

SEQ ID NO: 186962 - protein, 242 aa, Unknown
  Bacterial polypetide isolated from the Sargasso Sea
MRLTNTLTRRIEPFTPLTPGKVSIYCCGVTVYDLCHLGHARSYINWDVLRRFLIWRGLEVTFVQNFTDIDDKILKRAAQQDSSMTEVSERNIDAFHQDMDALGILRPDRMPRATQCLDGIRSLIGELEAKGAAYSADGDVYFAVMKHAGYGKLSGRDLSEQQDNAAGRVADAEEARKQHPFDFALWKGAKPGEPSFPSPWGEGRPGWHIECSAMVRAELGDTIDIHLGGADLVFPHHENEIA

SEQ ID NO: 186963 - protein, 331 aa, Unknown
  Bacterial polypetide isolated from the Sargasso Sea
IHKIIDSGHGYVENNHVLFNTEKDNNYGCLSRKKLDEMIDGARVEVAEYKKSPRDFVLWKPSDNDSFGWDSPWGYGRPGWHIECTSMIKKIIGDDCTLDIHGGGNDLIFPHHENEIAQGSCISTSKYCNYWFHNGIVLVNKKKMSKSLGNVILLDDLLKEHSSSVIRLALLSAHYRQPLNWTEQTIINAKNLYKKLVSAVGIITEDMFSYAAEATYLPFSQCGEIQDILSDDLNTPEVINYLSRLAKTARNNSDDAMKLAQSMKFIGLDLAKKSYMNLPDDKDIINLIKQRDEFRIKKDFKSADEVRDKLLDMGVELRDSDGKTTWKYSED

SEQ ID NO: 186964 - protein, 459 aa, Unknown
  Bacterial polypetide isolated from the Sargasso Sea
MLQIFNTLTRKKESFVPLVPGKVSMYVCGITIYDFCHVGHARTYVAFDVMNRYLRFSGYDVTYVRNITDVDDKIIKRANENGESCDALTARYTVAMHDDFNALGLMPADIEPRVTTHMAEIIELIETLVAKGYAYIASDGDVLFDVSKYEAYGQLSQQNLDMLQSGARVEIDQAKDDPLDFVLWKMAKPNEPSWSSPWGEGRPGWHIECSAMSAKHLGKHFDIHGGGSDLQFPHHENEIAQSCCAHDTPYVNTWIHTGMVQVDKEKMSKSLGNFFTVKDVLADYNAEAVRYFLISSHYRSQLNYSAENLLQAHSALGRLYTALREVKAATDVDMNNDYVKTFRAAMDDDFNTALALPVLFELARDINKEKATDPTKASQLAGLLIKLGSVMGILQGDAETFLQSGTDSDDVAEIEALITQRNTARANKDWAAADAARDALVAKGIILEDKAGVTTWRRG

SEQ ID NO: 186965 - protein, 234 aa, Unknown
  Bacterial polypetide isolated from the Sargasso Sea
MNKQLNIFNTLSGKKEKFIPINTSKVGMYVCGPTVYDFPHIGNARPLVIFDVLFRLLKKLNGDDKVTYVRNITDIDDKIIEASKNKNIPIDRLTNDITKNFHDDCKYLNCLKPNFEPRATEHIKGMISMTENLLNNKHAYEKDKHVYFSVNSFKNYGKLSNKKPGELEAGSRVEISKLKNNPLDFVLWKPSSLDDPGWDSPWGRGRPGWHLECSVMSEKYLGKNFDIHGGGLDL

SEQ ID NO: 186966 - protein, 237 aa, Unknown
  Bacterial polypetide isolated from the Sargasso Sea
NFPHHENEIAQSKGAHPKEQFVKYWLHNGMLNLSGKKMSKSDGNVKLLNEYIDEFSGPILRFFFLKSQYRSPQEFNVNLLKESETTLNNLIDFTYGVDSELKSKEVLEIFENSMNEDLNTPKMLGSLFKLINESNTLNEQKLLELKSSIKFVFNLLGFDLIKVENNEKTDEELTKFFKKYDINFENINQAVSEFINKREDLRKQKDFASADKMRESILGIGISLEDGTDSGWSWKNS

SEQ ID NO: 186967 - protein, 454 aa, Unknown
  Bacterial polypetide isolated from the Sargasso Sea
MDLMLYDTFTNSKKKFEPIDPNNVRMYVCGPTVYDYAHVGNARPVIVFDILFRLLQKIYGSENVTYVRNITDVDDKIIHAANDQNEDIGILTEKTINYFHDDAKYIGALKPTFEPRATEHIPEMIELIEKLISKEFAYVADGNVLFSSNKFKEYGKLSGKNLDEMVAGSRVGVESYKKEESDFVLWKPSKEDEPSWKSPWGDGRPGWHIECSAMSEKLLGENFDIHGGGQDLIFPHHENEIAQSECANNNKFANYWVHNGFVTVEGNKMSKSDGNFVTVNELKDSFQGEVIRLTMISTHYRQPLNWTKDNLNESKKTLDKWYTFLSNFNDDELKDANNDNEIMETLLDDINTPKAISVLHQKFKDCQSGDKGLVSNFLYSANMLGLLNEKPSEWLSWKKENLNINTAQVELLIAQRNEARSNKNFDDADRIRDELDKMGVILEDQGGETTWKVK

SEQ ID NO: 186968 - protein, 237 aa, Unknown
  Bacterial polypetide isolated from the Sargasso Sea
FDIHGGGNDLQFPHHENEIAQSCCAYPESEFARYWLHNEMLQVDGKKMSKSLGNFFTVRDLLDKGYPGEVIRFVFLSTHYSKPMDWNNSKALEAKNILRKWRVLLKNNFEIVPLPEEAIKILSDDLNTAGVISLLHNYASNGEIGKLKAGANFLGILTQELSDWCADVDMSSLEGLFADLRKRAIESKNFENIDELRSKLTNAGVDVQIGKSNVTLVPNASFDLQEVNKIINFYGLN

SEQ ID NO: 186969 - protein, 209 aa, Unknown
  Bacterial polypetide isolated from the Sargasso Sea
NYWIHSGLLKIGGEKMSKSLGNFALIKDLIKQYHFEVIRLFLISSHYRSELSFDEGSLNQARAALERLYTTLQLNDEDAENTAKDNPFIEAFEMAMNDDLNTPKAVSILFDLAKELNSNKEMNSRSEQLYAFKTIANNLGLLTDKPENFFKFGAEVDDFFIQEKIDARNLARNEKDFARADEIRDELSDMGVLLDDGPDGTTWKIEKPN

SEQ ID NO: 186970 - protein, 452 aa, Unknown
  Bacterial polypetide isolated from the Sargasso Sea
AVNLNQEDVRIYLCGPTVQSSPHLGHGRSAVVFDFFIRYLKHLNYSVLYVRNITDIDDKIIQKSQEKNINYRELAESVWEEFVQAHENLNCLVPDIEPRATAYVPEIVQYIDQLINNGYGYITKSGVYYDVSKFDDYLKLSGRSTEEVKTGTRIETVEDKKSPEDFALWKFSKEGEPSWDSPWGVGRPGWHIECSTMINQTLGKTIDFHCGGIDLIFPHHENEIAQSKGVEKNENFVNYWLHNGMLNLSGKKMSKSDGNVKLLNEYIDQYGGEVVRFFFLRAHYRSPQEFSQDLLEESKKTLNNIREYTKGTESDPVDPKVLEIFEACMNDDMNTPKLLGEIFQMIKESNNLNDFEGNQRKQTIKYIFEILGFQLKLTDQSNKDEKLLSEFFSMYDIKFTEIDTAMNDFISIRNKLRNEKKYGEADEMRDSILKIGIVINDGENVGWYWKNS

SEQ ID NO: 186971 - protein, 388 aa, Unknown
  Bacterial polypetide isolated from the Sargasso Sea
REGEVGVYVCGMTVYDNCHLGHARAMMAFDILARYLRYQNYKVNFTRNITDIDDKIIERANENKETIDALTDRTIASMQEDFFKLGLELPTNEPRATDHIEGMIKMISTLIDKGHAYHSEGGDVFFAVRTFPEYGKLSNKNIDDLNPGSRIEEDGSKKDPLDFVLWKSAKANEPSWDSPWGLGRPGWHIECSVMSLENLGEHFDIHGGGPDLLFPHHENEIAQSECASDHKFANYWMHSGLLKINGEKMSKSLGNFAMLKDLFASYHPEVIRYYLISSHYRSSLNFDNDSLDQARSALTRLYQALSFAPSEESDLHDDSVKEFKDSMNDDLNTPEALSTLFGLAKSINSSQDTQDQSMYASTMRELGKVLGLLNDSSEAFFQYGAKFN

SEQ ID NO: 186972 - protein, 430 aa, Unknown
  Bacterial polypetide isolated from the Sargasso Sea
VYNYAHIGNARMAVVNDLLIRFLKILYPKVTYVSNITDIDDKIIAASKESAIPIIELTQKFTKIYNEDMAMLGVSLPDIQPKATEYITEMIQIIKRLINNDFAYVKDGHVLFHVPAFKKYGSLSGRNRDEQIIGSRVEVAPYKKDPTDFVLWKPSAVSLPGWESPWGFGRPGWHLECSAMSEKTLGLPFDIHSGGADLIFPHHENEIAQSCAVHNKLDDLCAFSKYWFHNGFVNVEGEKMSKSIGNIKLVHDLVKEYKGEVLRLTLLSAHYRQPLNWTRDIIKQNSTMLDRLYRTLKDLEKIDAYAENNEIEERIITGLYDDLNTPKVIAELNMLTNSINTADIRTKQKIKFNLLEIGKIFGILQENPDTWLGYGQSKNIDQDAIEVLIKERNEARRNKNFDMADEIRKKLKEKGVEIEDTSEGTVWRSI

SEQ ID NO: 186973 - protein, 294 aa, Unknown
  Bacterial polypetide isolated from the Sargasso Sea
GARIGVDEEKQNPADFVLWKQAEEGLTWDSPWGRGRPGWHIECSAMSMDALGKTFDIHGGGIDLKFPHHENEIAQSVCATGEDFAKCWMHTGPLRIDKEKMSKSLDNFITIKEAINTFPPEVIRFFLISNHYRSPINYSEEGVLEAKNSLDRLYTSLVDLDLTGEKPTDQAKVVSPFTEAMQDDFNVPSAIAALFEIAKSINLAKENGDIKQANILGATLVNLSEPLGILQQKTEEYFRIGATLSDEEIQNLIDARNKAREDKNFELSDQIRDSLLERGIVLEDTDKGTTWKVR

SEQ ID NO: 186974 - protein, 303 aa, Unknown
  Bacterial polypetide isolated from the Sargasso Sea
REYGKLSGKNLDEMVAGSRVGVESYKKEESDFVLWKPSKEDEPSWKSPWGDGRPGWHIECSAMSEKLLGENFDIHGGGQDLIFPHHENEIAQSECANNNKFANYWVHNGFVTVEGNKMSKSDGNFVTVNELKDSFQGEVIRLTMISTHYRQPLNWTKDNLNESKKTLDKWYTFLSNFNGDELKDANNDNEIMETLLDDMNTPKAISVLHQKFKDCQSGDKDLVSNFLYSANMLGLLNEKPSEWLSWKKENLNINTAQVELLIAQRNEARSNKNFDDADRIRDELDKMGVILEDQGGETTWKVK

SEQ ID NO: 186975 - protein, 328 aa, Unknown
  Bacterial polypetide isolated from the Sargasso Sea
GHAYVSENHVLFNVMSYSSYGRLSHRKIEDMEAGSRIEVASYKKSPFDFVLWKPSTKDLPGWDSPWGRGRPGWHLECSAMIKKFLGETIDIHAGGQDLIFPHHENEIAQSTCANDGKVFANYWLHNGFLSIGDEKMSKSLGNMQLVRDLLQDYSGEVIRMALLSAQYRQPIEWSQNTLKSAKKMLDRIYGSIRGIEFSQKTDDTANIAQSVLEALCDDLNTPKAIAEIFELVKKLNKEKDLYQKKLITKQIYASGRLLGFLQSDPETWFSDITGRDVSEDEIKRLIEMRNQARLKKDFKEADSVRKKLEDMDIIIEDTPSGVRWSFKS

SEQ ID NO: 186976 - protein, 350 aa, Unknown
  Bacterial polypetide isolated from the Sargasso Sea
GHIIEQIQMIKKIIENGFAYEKNGSVYFDLKQFNKKYKYGSLSNRNLEELINESRELKGSEEKKNPQDFALWKKAGKKHIMKWQSPWGDGFPGWHIECSAMGHKYLGEKFDIHGGGIDLKFPHHDCEIAQSESVYGHNPANYWIHTNMLTLNGKKMSKSIGNSVFPDEIFDGSNKIFSKKFNPMTLKFFMYQAHYRNTLDISNDALIAAEKGFEKIIKLKNDINGLVESDESDFNADEWVNQCYDALNDDFNSPRLIAKLFDLYKIVQDIKIRNKHINSKNLKILKKFFPIFYSEILGLDDNTSSNVKYDAILNLILELREKERLNKNYKTSDYIRDQLQEFGVNINDKK

SEQ ID NO: 186977 - protein, 408 aa, Unknown
  Bacterial polypetide isolated from the Sargasso Sea
IVRYLRSINYEVHYIRNITDVDDKIIARAEELNISPKELTEKYIHSMNEDFMSLGMIEPDSEPRATDNIDSIISLIEILIEKGHAYEGDSDVYFSAESFNSYGKLSRRNLEDMLAGARVDIDTDKKNPADFVLWKKNTEGLKWDSPWGAGRPGWHIECSAMSMDALGETFDIHGGGSDLKFPHHENEIAQSECVTGKEFAKVWMHTGSLRIDKEKMSKSLKNFVTIKDALEINSPEVLRLFLISSHYRSPLNYSEVGLNEAKNSLDRLYNSLQDLEYETKEYFQTKYSDKFHKAMGDDFNTPSAISVLFEIARQINTLKKKNKFEEASLLAKELVSLSNILGLLQDKAKNYFRQGIGISDEEIEGYILKRNQARKEKDFELSDKIRDELLEKGIILEDKESGTTWKKA

SEQ ID NO: 186978 - protein, 396 aa, Unknown
  Bacterial polypetide isolated from the Sargasso Sea
DKIINRAKEQGESASGLSTKYIQTYFEDSDRLNIRRATNYPKATEHIDDMINLIQNLVDKESAYVSKNGVYFRVSKFSEYGKLSKKKTEDLESGARIEVDESKESPLDFALWKFSDGQPNWESPWGKGRPGWHIECSAMSIKYLGKNFEIHGGGRDLIFPHHENEIAQSESFTSEQFAKIWMHAGMITINGEKMSKSVGNVKSINHVLESWGPNVARLFCISGHYSKPIDYTEDLLKENLIRLRQIETCYYELRLAEESQETEDISSLLEESREKFDAALNDDFNTSLGLSVFFNMIKTINSLAAEEKITKKIAEQALPVLEYMLEVLGIEIQTVSDEEIESVFELINKRETLRGEKQFEEADKIRDQIAGLGISLIDHKNKTLWMKKEAIKSEKQ

SEQ ID NO: 186979 - protein, 460 aa, Unknown
  Bacterial polypetide isolated from the Sargasso Sea
MYFKYISKIMSNDIFLTNNLTNKKEKFVPIDEQNVRMYVCGPTVYDDPHIGNARPIVVFDILYKIFKKNYPKVTYVRNITDVDDKIIKSSKENNISISELTNKVTKSFSEDCSYLNCERPSHQPKATDNIDLMIEMVSELIKKGFAYENNNHVYFEVKKFKDYGQLSNKKLEDLIAGSRIEVSENKKNSEDFVLWKPSASDEPFWDSPWGKGRPGWHLECSAMSKKFLGHEFDVHGGGIDLIFPHHENEIAQSRCANGTKVFANFWLHNAFITMSNEKMAKSQGNILKIKDFRNKISGQVLRLALMSAHYKQPLDWNDKLLEDCQNTINKWYNVYVESKNNTDISNEILKPLYDDLNTPGYIANLHELYEKAQKGDDNDKAAFVSACQFVGLLNQNQEEWLSFKISKASISEEEISQKINERNQARENKNYEEADKIRNELLDKGVLIEDKDGKTTWKLK

SEQ ID NO: 186980 - protein, 280 aa, Unknown
  Bacterial polypetide isolated from the Sargasso Sea
NQGSFIFRLEDTDRNRLVEAAESNLLKMLEWAGLDIDEGPRIGGKFGPYRQSERLEIYRDHVDRLLEHGDAYPCFCSEERLEKLKTFQRSEGLTPRYDNHCRKLQKKEVETKTQSGEKHVIRMKIPENQETFRLNDLVRGTVAIESTQVEDQVILKSDGFPTYHLAVVVDDHLMQISHVVRGEEWLPSFPKHLLLYRYFGWESPEFIHLPLILNEERAKLSKRHGAVSVEEFRERGYLPQALLNFIALLGWNPGDDQEVLSLEEMVHEFRFERVSKSGAV

SEQ ID NO: 186981 - protein, 240 aa, Unknown
  Bacterial polypetide isolated from the Sargasso Sea
MSEGVRVRFAPSPTGPLHVGGLRAALYNYLHAKKNNGTFILRVEDTDQKREVGGSYEYIEESLRWCGLIPDESPSKGGSFGPYKQSQRKNIYEKYIEVLVEKGAAYYAFDKAEDLDMHRKNHKKKGKTFIYNAHNRLKLVNSLSLDKKSVEKLLKTAPYVVRFKMPDKEMVVFKDEIRGKIEVSSRELDDKVLFKSDKMPTYHFANVVDDHMMKITHVIRGEEWLPSLPLHVLLYESFGW

SEQ ID NO: 186982 - protein, 271 aa, Unknown
  Bacterial polypetide isolated from the Sargasso Sea
MSKVATRFAPSPTGALHIGGVRTALFNWLFSKNQKGTFHLRIEDTDKERSKEEYKIQIIKSLKWIGIEHDGEEYIQSQKIEDHIKIANELLKKGNAYKCYCSAEEIEEQKKRARQKKMPYIYNRKWRDSDEKDAPKDIKPVIRFKSKINGNSKLKDLVQGDIEIENNTIEDFIILRNDGTPTYNLSATVDDHQMGMTHIIRGDDHKINTFKQIQIYQAMGWDVPEFAHIPLIHTIEGKKLSKRDNASTLDDYSKIGIMPDALRNYLLRLGW

SEQ ID NO: 186983 - protein, 327 aa, Unknown
  Bacterial polypetide isolated from the Sargasso Sea
IKIPYVYDRKWRDRNEIEAPKDIKPVIRFKSKIDGTSILKDKVQGNVEIENNTIEDFVILRNDGTPTYNLSAAVDDHQMNMTHIIRGDDHKINTFKQIQIYEAMGWALPTFAHIPLIHTIEGKKLSKRDKASTLEDYSKIGIMPDALRNYLLRLGWSYEDKEIFTLDESVKYFNLEGIGKSPSKLDLSRILSMNEHYIKSIDEKELFNQLINYCEIFKKKIIGEKKDKIKKSLTFLKNKAKTLEDIYNNSQYIINDEVNFNKEDLKLIDANAQKIISEFKDNIKEISNFTRENLEPIVQELIKSNKTNFKGVGQPLRVALTGSKFGP

SEQ ID NO: 186984 - protein, 312 aa, Unknown
  Bacterial polypetide isolated from the Sargasso Sea
MTVRTRFAPSPTGYLHIGGVRTALFNWLFARHHGGQFVLRIDDTDNARNINEALQPILDGLRWLGIDWDEGPDVGGPYAPYFQSERSGRYQNAAQKLLESGHAYRDFATPADLDAERKAAQAAGVPFIYSRRFASFDDASAERFLAEGRASVVRLKMPREGSLVLTDAVRGRVEFAWEREQDHVIQRSDGTCLYHLANVIDDHDLAISHVIRAEEHLSNTPRQAFIAQSLGYELPTYAHLPLVAEPGSRTKLSKRKLAKYLKNNDFKQVMEHGLKIAERTGLKPEADTFNPVIVDFYRAVGYLPWAIDNYFG

SEQ ID NO: 186985 - protein, 332 aa, Unknown
  Bacterial polypetide isolated from the Sargasso Sea
DTDTIRSKEEYTTQILDSLSWLGLDWDEPLVYQSGRSKEYKNYLNQLIDSGIAYRCFCSKNDLDGSRAKGHYKYSGKCRNISMETIKERLNQGISFTYRIRIPDGKTKYNDLIYGKIEISNDELDDFIIFRSDGTPTYNFTAVIDDHDMLITHIIRGEDHLSNTPKQIILHKALGFEIPTFAHLPMILGSDKKRLSKRHGAPGIQFFKEDGYLPLPLINYLALLGWNSGDKDEIFTLESLIEKFDLKKIQKKGAVWDPKKLNWLSGQHIINLQTDFILDSIRNIKPEWGKGYEISYLVNIIEILKIRSRSLKDIINQSELYFNGPDEYDPIG

SEQ ID NO: 186986 - protein, 202 aa, Unknown
  Bacterial polypetide isolated from the Sargasso Sea
MSFNCRFAPSPTGPLHIGGVRTALFNWLLAKKNKGKYFLRIEDTDKERSKEEFKKQIITSLAWLGIKHDGDEYIQSKNISKHVAVAEELLKKGFAYKCYCSEEEINEQKEKCKKQGMPYVYNRKWRDAKDLKIPDGVKPVIRFKSKISGNTIIKDLVQGDRNISNSTIEDFVILRKDNTPTYQLSATVDDHEMKITHVIEEM

SEQ ID NO: 186987 - protein, 314 aa, Unknown
  Bacterial polypetide isolated from the Sargasso Sea
HLGNIRSALYPWAFARATGGDFILRIEDTDLERSSQAAVDVIIEGMAWLGLNHDEGPFYQMQRMDRYKAVLAELQAAGHVYPCYMSVAELDALRERQMVAKEKPRYDGTWRPEVGKTLPAIPEGVQPVLRFKNPQGGVVAWDDKVKGRIEISNDELDDLVIARPDGTPTYNFCVVVDDIDMAITHVIRGDDHVNNTPRQINIFRALGKEPPVYAHLPTVLNEQGEKMSKRNGAKPVTQYRDEGYLPDAMVNYLARLGWSHGDDEIFSREQFLQWFNLDHLGRSAAQFDEAKLRWVNAQHLKAMADDALAALVAP

SEQ ID NO: 186988 - protein, 294 aa, Unknown
  Bacterial polypetide isolated from the Sargasso Sea
MKVTRFAPSPTGNLHIGGVRTALFNYVFSKQSGGLFLIRVEDTDRERSKKEYEEDIISGLEWLGISPDKTPIRQSERSDIYQKAADKLIDSGNAYWCDCSPEDLEEMREQQAAAGKKPMYDGRSRNLGLERSDKTVLRLATPLEGETVVNDLIRGEITFNNSELDDLILLRSDGTPTYHFCNVVDDFDQGVTTVIRGEDHISNTPRQIHIQKALGYPDLEYAHLPLVLGEDKKRLSKRHAATSLNAYKEMGFTKETIINALALLGWSTENEIFSIDELIESFQLENVQKAAAGI

SEQ ID NO: 186989 - protein, 269 aa, Unknown
  Bacterial polypetide isolated from the Sargasso Sea
MVESPVRVRFAPSPSGELHLGGARTALFNYLFSKQNNGNFFLRIEDTDQKRSDKIYIDQIIESLNWFGIRWDEPVIFQSKKFNDYRTYVDMLVKKEFAYPCFCSKKTLQKEKDKGNFLYSRTCRNLSDSEVKSRFNQGGSFVYRFKTPPGKTVFTDTIYGHNETDNDEIGDFIILRSDGSPTYNLCAVVDDHLLAITHVIRGEDHLSNTPKQILIYNALKLKQPTFSHLPMILGSDKKRLSKRFGAQGIQNFKNDGYLNITLMNYLAML

SEQ ID NO: 186990 - protein, 272 aa, Unknown
  Bacterial polypetide isolated from the Sargasso Sea
MKVTRFAPSPTGNLHIGGVRTALFNYVFSKQSGGLFLIRVEDTDRERSKKEYEEDIISGLEWLGISPDKTPIRQSERSDMYQKAADKLIDSGNAYWCDCSPEDLEEMREQQAAAGKKPMYDGRSRNLGLERSDKTVLRLATPLEGETVVNDLIRGEITFNNSELDDLILLRSDGTPTYHFCNVVDDFDQGVTTVIRGEDHISNTPRQIHIQKALGYPDLEYAHLPLVLGEDKKRLSKRHAATSLNAYKEMGFTKETIINALALLGWSTENEI

SEQ ID NO: 186991 - protein, 241 aa, Unknown
  Bacterial polypetide isolated from the Sargasso Sea
MRTALFSWLFARQNQGSFIFRLEDTDRNRLVEAAESNLLKMLEWAGLDIDEGPGIGGDYGPYRQSERLEIYRDHIDRLLGQEDAYPCFCSEERLEKLKTFQRSEGLTPRYDNHCRKLQKKEVETKIQSGEKHVIRMKIPENQETFRLNDLVRGTVEIESTQVEDQVILKSDGFPTYHLAVVVDDHLMQISHVVRGEEWLPSFPKHLLLYRYFGWEPPEFVHLPLILNEERAKLSKRHGAVA

SEQ ID NO: 186992 - protein, 308 aa, Unknown
  Bacterial polypetide isolated from the Sargasso Sea
MVQGEVNIANSIIEDFVILRQDGSPTYQLSAVVDDHQMKITHVIRGDDHKINTFKQKQIYEAMKWDVPEFAHIPLIHSEKGSKLSKRDKASTIDDYIKIGILSDALRNYLLRLGWSHKDKEVFTTDESIELFNLKGVGKSPSKLDMSRILSLNEHYIKHIDEKELFKFLKIYSQKFKKSIDPSKENLLIKSMSFLKNKAKTLEDIYQNSQYIVQENIQIAPEDYKLLDVSSKNIIKDFLGEFDKISKITKENTEKILKELINKHKTNFKGVGQPLRIALTGSRFGPGIYDIILSLDKNEVVKRLKAIN

SEQ ID NO: 186993 - protein, 273 aa, Unknown
  Bacterial polypetide isolated from the Sargasso Sea
ALFNWLFSKNKKGKFYLRIEDTDKERSKEEYKKQIIDSLAWIGINHDDKEYIQSKNISKHKEIAQELLKNGFAYKCYCSEEEIKEQKEKCKKMGIPYVYNRKWRDSKGIEIPKNINPVIRFKSKISGNSIVKDLVQGEINISNSIIEDFVILRQDGSPTYQLSAVVDDHLMKISHVIRGDDHKINTFKQKQIYEAMKWSIPEFAHIPLIHSEKGSKLSKRDNASTIDDYIKIGILSEALRNYLLRLGWAHKDKEIFNSEESIKLFDLKGMENL

SEQ ID NO: 186994 - protein, 172 aa, Unknown
  Bacterial polypetide isolated from the Sargasso Sea
MTTTTRFAPSPTGLLHLGNIRTALINWLYAKNSGGKFILRIDDTDQERSKDEYISQIKYDLEWLGIDYDETFNQSSRFERYKEQFEKLKSDGRIYACYETPEELERKRKLQMAAGGKQVYDRSALKLTEQQIKDYENDGRKPHWRFLLQTERMKWNDLLKGEIDIDLTSLSD

SEQ ID NO: 186995 - protein, 261 aa, Unknown
  Bacterial polypetide isolated from the Sargasso Sea
MSKVATRFAPSPTGALHIGGVRTALFNWLYSKNHNGKFFLRIEDTDKERSKDEYKNQIIQSLKWIGINYDGEEYIQSKKIEDHIRVANQLLKNGFAYKCYCSSEEIEEQKKRARQKKIPYIYNRKWRDKKESDISQNIEPVIRFKSKIDGKSILKDLVQGDVEIDNNTIEDFIILRNDGTPTYNLSASVDDHQMNMTHIIRGDDHKINTFKQMQIYQAMKWEMPSFAHIPLIHTIDGKKLSKRDKASTLDDYSKIGIMPDA

SEQ ID NO: 186996 - protein, 277 aa, Unknown
  Bacterial polypetide isolated from the Sargasso Sea
MKKVATRFAPSPTGPLHIGGVRTALFNWLYSKNHNGKFFLRIEDTDKERSKEEFKLQILNSLKWIGINHDGEEYIQSKNIESHIKVVNKLLETGNAYKCYCSSDEIEEQKLRAKQKKIPYIYNRKWRDKSEIEAPQGVKPVIRFKSKIEGSTKINDIVQGDIEIENNTIEDFIILRRDGTPTYNLSASVDDHIMDMTHIIRGDDHKINTFKQIQIYEALQWEKPLFAHIPLIHTLEGKKLSKRDNASTIDDYEKIGIMPDALRNYLMRLGWSYKDKE

SEQ ID NO: 186997 - protein, 202 aa, Unknown
  Bacterial polypetide isolated from the Sargasso Sea
MSKVATRFAPSPTGALHIGGVRTALFNWLYSKNQKGTFHLRIEDTDKERSKEEHKIQIINSLKWLGIEHDGEEYIQSSKIDDHVKIANELLKNGFAYKCYCSPDEIEEQKKRARQKKIPYIYNRKWRDADEKDAPKEIKPVIRFKSKIEGSSILKDLVQGDVEIENSTIEDFVILRNDGTPTYNLSATVDNHQMGMTHIIRG

SEQ ID NO: 186998 - protein, 321 aa, Unknown
  Bacterial polypetide isolated from the Sargasso Sea
EEIEEQKKRAKQKKIPYVYDRKWRDVSEDKAPKDIKPVIRFKSKIEGSSTLNDLVQGDVEIENNTIEDFVILRNDETPTYNLSATVDDHIMKMTHIIRGDDHKINTFKQIQIYEALGWEVPLFAHIPLIHTIDGKKLSKRDNASTLEDYSKIGILPDALRNYLLRLGWSYKDKEIFDLNESIKYFTLEGIGKSPSKLDMSRILSMNEYYIKNSNENTLYEKLREYCDKYKDKIKEDKENTIKNSLNFLKNKAKTLEDIFNNSKYILNDKVIFNENDKTLINDDAKKIIRLFEENILELKVFNRENLEQIVNKLIKSNNTNF

SEQ ID NO: 186999 - protein, 299 aa, Unknown
  Bacterial polypetide isolated from the Sargasso Sea
LDDFIIERSDGSATYNLCVVVDDLDSNISHVIRGDDHVNNTFKQINVFKALNKNVPIYGHVPMILGEDGKRLSKRHGALGVREYAALGILPEALKNYLLRLGWSLGDDEIFNGEDMKKSFQSGILNKSPATFSMDKLLWFNKYYLDQMSIAQLMEVVALKDFDGSEYSKTVLETIRDRCSTLNEFSTNADYFFKDPEDYDPSLLNKHCKEHTFNHLSLLKEQLEALDIWEQAHIKETIDKVVSNLEIGFGKIGLPLRLALTATVNSPSIDLVCDILGKEITSRRLESFLTKIQNLKTDQ

SEQ ID NO: 187000 - protein, 299 aa, Unknown
  Bacterial polypetide isolated from the Sargasso Sea
DNRHRSLSKEEIETFISQGRTSVIRFKIDEKIDIKWVDQIRGEIKWQGKDLGGDLVLSRRAKGYEIGDPLYNLAVVVDDNFMNITHVVRGEDHISNTAKQILIYKALNFNLPTFSHTPLILNSEGKKLSKRDCVTSIDEFREMGYLPEALSNYMAFLGWSPKSADREILSLEEISEIFDLSEINKAGAKFSWEKLNWINAQYIKNMESIKLMEILRKYWDDHGWEPPSQEWANKLAILIRDSMTLLKDSIDQSKPFFLIPTIQKEGQDFLENPESKVSLKLILNYLIEQNTIKLNKEKA

SEQ ID NO: 187001 - protein, 118 aa, Unknown
  Bacterial polypetide isolated from the Sargasso Sea
SDGVYGDVEIPWDAVDMQVLLKADGMPTYHMANVVDDHMMKITHVARGEEWLASVPKHILLYTYLGLEPPQFFHLPLMRNPDKSKLSKRKNPTSISYYSALGYLPEALMNFLGLFFIQ

SEQ ID NO: 187002 - protein, 180 aa, Unknown
  Bacterial polypetide isolated from the Sargasso Sea
MSKVATRFAPSPTGALHIGGVRTALFNWLFSKNQKGTFHLRIEDTDKERSKEEHKIQIIKSLKWIGIEHDGEEYIQSQKMEDHIKIANELLKKGNAYKCYCSAEEIEEQKKRARQKKMPYIYNRKWRDADEKDAPRDIKPVIRFKSKIEGNSKLNDLVQGDVEIENNTIEDFIILRNDGT

SEQ ID NO: 187003 - protein, 44 aa, Unknown
  Bacterial polypetide isolated from the Sargasso Sea
MNNPRVRFAPSPTGYLHIGGARTALFNWLFAKQNKGQFLLRIED

SEQ ID NO: 187004 - protein, 260 aa, Unknown
  Bacterial polypetide isolated from the Sargasso Sea
TYNLSASVDDHQMKVTHIIRGDDHKINTFKQMQIYLAMKWELPSFAHIPLIHTVEGKKLSKRDKASTLDDYSKIGIIPDALRNYLLRLGWSFKDKEIFTLEESIKHFSLEGIGKSPSKLDISRILSMNEHYIKHMNENDLFVHLKKYCEVYKDKIDNKSEKIKKSLSFLKNKAKTLEDIYINAQYLIKDKIKISSEDQRLLDNLAKTILEDFLKEFENLSNINKENLEKIINDLIKNNKTNFKGVGQPLRVALVGSKFGP

SEQ ID NO: 187005 - protein, 301 aa, Unknown
  Bacterial polypetide isolated from the Sargasso Sea
MKRGNLVFDLSKIDDFIILKADGMPTYHLANVVDDSEMKISHVLRGEEWISSTPKHLLIYNFINAKVPEFIHLPLIFGKDKSKLSKRHGANSIIEYKNQGLLPNALLNYLALLGWSPGNDLEFLNPDDIAKLFEIRGLSTSPSIFDPKKLSWVNGVHIRELNDKKLSEIIKEKVKLNSAYNNRYDEDNYLKIASLIKERIKSLHDIYPLIKFFFDYDLPKKELIKCGNLKNNEIKDLIIMLIEDFKLLIENKRIDTQNIEDLLRKNCKELELKVRDYLSLIRNCITGSEISPPLFESIEIL

SEQ ID NO: 187006 - protein, 278 aa, Unknown
  Bacterial polypetide isolated from the Sargasso Sea
INSLKWMGIEHDGEEYIQSEMIGEHVTIAKRLLENGNAYKCFCSAEEIEEQKKRAKQKKIPYVYNRKWRNIAEDQAPKDIKPVIRFKSKIEGTSSLKDLVQGDVEIENNTIEDFVILRNDETPTYNLSASVDDHNMEMTHIIRGDDHKINTFKQIQIYEALGWEIPQFAHIPLIHTIDGKKLSKRDNASTLEDYSKIGILPESLRNYLLRLGWSYKDKEIFNLDESIKLFNLEGIGKSPSKLDISRILSMNEYYIKNSEEDILYNKLKEYCEIYKDKI

SEQ ID NO: 187007 - protein, 262 aa, Unknown
  Bacterial polypetide isolated from the Sargasso Sea
IQVAKELLKNGHAYKCYCSSEEIEEQKKRAKQKKIPYIYDRKWRDKKEVDAPKNIEPVIRFKSKIEGSTILKDLVQGDVQIENNTIEDFIILRNDGSPTYNLSVAVDDQQMKVTHIIRGDDHKINTFKQMQIYNAMQWELPNFAHIPLIHTTEGKKLSKRDKASTLDDYSKIGIMPEALRNYLLRLGWSFKDKEIFTLEESIEHFNLEGIGKSPSKLDKSRILSMNEYYIKNISEKDLFDRFNEYCKNYKQVIGANKEDKIK

SEQ ID NO: 187008 - protein, 259 aa, Unknown
  Bacterial polypetide isolated from the Sargasso Sea
MAQYITRFAPSPTGNLHIGSARTALLNYIITQQIHSSKFYLRIEDTDKKRSNKEFTQNILNGLSWLGIKWENNVQIQSERIDRHKQVVKNLLEKKFAYKCNCSEEKLNKKRDFLKKNKNSSKKICTDCKNNNDVQNLSENFVVRLKLPDEGELIINDKIQGKVTVKNKELDDFILLRKDQTPTYMLSVVVDDNDLGVNYIIRGDDHLNNTFRQYYIYKFLNWNIPEYAHIPLIHGEDGSKLSKRHGAVDILDFKKNGYL

SEQ ID NO: 187009 - protein, 102 aa, Unknown
  Bacterial polypetide isolated from the Sargasso Sea
MSKVATRFAPSPTGPLHIGGVRTALFNWLYSKNQNGNFFLRIEDTDKERSKEEYKKQIINSLKWIGINFDGEEYVQSKKIDDHIKVAHELLNKGSAYKCYCS

SEQ ID NO: 187010 - protein, 148 aa, Unknown
  Bacterial polypetide isolated from the Sargasso Sea
MNVVTRFAPSPTGFLHIGGARTALFNYLFTKRYKGKFLLRIEDTDKARSTDKAIKAIISGLEWLNLNHDGKIVFQSNNSLRHKKIADELLKCDNAYRCYLTNEEQNQIRNDCIKRGLPFRSPWRIKKYNNKNENSYVIRIKMPDEGFT

SEQ ID NO: 187011 - protein, 219 aa, Unknown
  Bacterial polypetide isolated from the Sargasso Sea
ILEGMNWLGLTWDEGPYYQTKRFDRYNEIIAQMLEQGTAYKCYCSRERIDALREAQAANGEAQKYDGCCRDLPARDTDEPFVVRFKNPIGGSVVFDDHVRGRIEFSNDALDDLIIARTDGVPTYNFCVVVDDWDMGITCVVRGEDHINNTPRQINILKALGAPIPEYAHVSMILGDDGAKLSKRHGAVSVMQYRDDGYLPEALLNYLVRLGWSHGDQEV

SEQ ID NO: 187012 - protein, 226 aa, Unknown
  Bacterial polypetide isolated from the Sargasso Sea
MSRWASGNRRSVAAPVTRCVATESKIEIKVPPNDGTVRVRFAPSPTGNLHVGGARTALFNWLYARRMGGKFILRVEDTDTARSTRESEDAMVRDLKWLGLDWDEGPDVDGPYGPYRQSERGAIYKQLAQQLVDEGYAYPCFCTDEELAAMKEEQEAKKLPPKYMGKWATASKEEVDAEMAKGTPHTYRFRVPEGERVEIDDMIRGKVGWDTDTLGDFVLLRSNGMP

SEQ ID NO: 187013 - protein, 300 aa, Unknown
  Bacterial polypetide isolated from the Sargasso Sea
LDPAEAQRRIAAGESHVIRMKVPSEGVCQVNDMLRGTVEIGWDRMDMQVLMKADGLPTYFLANVVDDHLMGITHVLRGEEWLPSAPKLIKLYEYFGWEQPQLCYMPLLRNPDKSKLSKRKNPTSVTFYERMGFLPQAMLNYLGRMGWSMPDEREKFTLNEMIEHFDINRVSLGGPIFDLEKLSWLNGQWLRELPVEQFAAEVQKWAFNPQYMMQIAPHVQQRVETFSQIAPLAGFFFSGALPLDPALFAHKKLDATQVRQVMQLILWKLEALRQWEKERITACITLVAEHLGFKLRDVMP

SEQ ID NO: 187014 - protein, 201 aa, Unknown
  Bacterial polypetide isolated from the Sargasso Sea
MKCRFAPSPTGLLHIGNARSAVLNWAYAQKNNGKFILRIDDTDQSRSTKEFENKIKENLSWLGLNWDNTFNQSERLDIYKINIEKLKKNGRLYPCFETSEELSLKKKSLLASGKPPIYDRSSLELTESQIKEKINLGLKPHWRFKLEENLIKWDDLIKGEVRFDTKYLSDPILIREDGSLLYHLPFCIDDIEERDTHIIRR

SEQ ID NO: 187015 - protein, 272 aa, Unknown
  Bacterial polypetide isolated from the Sargasso Sea
NVFYCRFAPSPTGPLHIGGVRTALFNWLLAKKNKGKYFLRIEDTDKERSKDEFKKQIITSLAWLGIEHDGDEYIQSKNISKHVTIAEKLLKKGYAYKCYCSEEEINEQKEKCKKQGIPYIYNRKWRDAKDLKIPEGIKPVIRFKSKISGNTIIKDLVQGDRNISNSTIEDFVILRKDNTPTYQLSATVDDHEMKITHVIRGDDHMINSFKQRQIYEAMGWEVPNFAHIPLIHSEQGKKLSKRDNASTLEDYIKIGVISDALRNYLLRLGWSY

SEQ ID NO: 187016 - protein, 274 aa, Unknown
  Bacterial polypetide isolated from the Sargasso Sea
MVITRFAPSPTGFLHIGNVRAALMNYLLAKKSNGIFILRIDDTDQERSKQEYVDAIKTDLEWLGLEWDRIEYQSSRLDLYNSASDKLRSIDLLYECFETPSELDLKRKKQLNMGKPPVYDRAALALSDEEKLNLRDNRGGGHWRFKLEQNRIEWKDGILKDLSIDAASVSDPVLIRADGQYLYTLASVVDDIDMGITHVVRGSDHVTNTATQIQMIKALGGDIPKFAHHSLLTGPGGEALSKRLGTLALKDLREAGIEPAALCSLMSRLGSSQA

SEQ ID NO: 187017 - protein, 281 aa, Unknown
  Bacterial polypetide isolated from the Sargasso Sea
MNPIVRFAPSPTGQLHIGGVRTALFNYAFAKKHDGTFLIRIEDTDKERSKDEYTVQILDSLKWLGLEFKGEPIKQSTRTERYNEVINYLLETGNAYRCFTSSDELQELREKSESYLYPGIWRDRSTEEIESKLKDGAPFTIRLRIPESGKVDFEDLVYDKISTDISELDDFIIARSDGSPTYNLTVVVDDHDMNISHVIRGEDHISNTPKQLMIYKAMNWDSPAFGHLPMILGSDGKRLSKRHGAKGTQAYKELGYFSDSLINYLALLGWNPGNEDEIFNL

SEQ ID NO: 187018 - protein, 254 aa, Unknown
  Bacterial polypetide isolated from the Sargasso Sea
DELNAMREAQMASKQAPRYDNRHRNLSPEQVAAYQAEGRQATVRFRIDDSRSIQWKDLVRGSMSWSGADLGGDMVIARRAPADQIGDPLYNLVVVVDDAAMEITHVIRGEDHIANTAKQLLLYEALGLPLPEFAHTPLILNQEGRKLSKRDGVTSVSDFRGMGYTASALANYMTLLGWSPPEGMGERFSLVDAAKVFDFQRVNKAGARFDWGKLNWLNGQVLHELGAAELNRRLTPLWQEAGFEVANRSQAWWS

SEQ ID NO: 187019 - protein, 119 aa, Unknown
  Bacterial polypetide isolated from the Sargasso Sea
MLKVATRFAPSPTGPLHIGGVRTALFNWLFSKNQGGKFYLRIEDTDKERSKEEYKNQIIQSLKWIGIEHDGEEYIQSKKINDHINVANELLKNGNAYKCYCSNEEIEEQKKRSRQKKIP

SEQ ID NO: 187020 - protein, 274 aa, Unknown
  Bacterial polypetide isolated from the Sargasso Sea
AYDEIRGELTFYSNELEDKVILKSDGMPTYHLANVVDDNDMKITSVVRGEEWLSSLPVHYLLYEFFGWIPPKFYHLPLILKTGGAGKLSKRDADEQGHPVFAVKWEDSNGFKEHGFVPEGLNNYLALLGWSNKEEKEKYTMEELVESFNYGEINKSGARFDFKKALWINHLHLKDLDSKRILDLSEQTKKLLVERYGEPEAIEIVELVKERLNTSKDIDKELSVFIKQPKEINASAIEKINREVIFSVLNFCKLNSELINSPFELKNELMKFGA

SEQ ID NO: 187021 - protein, 240 aa, Unknown
  Bacterial polypetide isolated from the Sargasso Sea
MKKVATRFAPSPTGPLHIGGVRTALFNWLYSKSQKGDFYLRVEDTDKERSKDEYKDQIVKSLKWIGINYDGEEYIQSRKIKDHIKVANELLKNGYAYKCYCSSEEIEEQKKRARQKKIPYIYDRKWRDKSETDAPKDIKPVIRFKSKINGTSVFKDLVQGDVEIENNTIEDFIILRNDGTPTYNLSASVDDHQMNMTHIIRGDDHKINTFKQIQIYLAMKWNLPSFAHIPLIHTIEGKKY

SEQ ID NO: 187022 - protein, 172 aa, Unknown
  Bacterial polypetide isolated from the Sargasso Sea
MSESLIRTRFAPSPTGLLHIGGARTALFAWLFAKSNSGSCLLRIEDTDNERSKPEYTNEIINSFNWMGVNFDEDVVYQSKNYERHLEVAKELLKNGKAYYCNCSKERLDQLRKEQQERGESAKYDGKCRNLSISESENTVIRFKNSDEGSVVFKDLIKGQIEFSNEEMETSS

SEQ ID NO: 187023 - protein, 295 aa, Unknown
  Bacterial polypetide isolated from the Sargasso Sea
IQSKNISKHVAVAEELLKKGYAYKCYCSEEEINEQKEKCKKQGMPYVYNRKWRDAKDLRIPEGVKPVIRFKSKISGNTIIKDLVQGDRNISNATIEDFVILRKDHTPTYQLSATVDDHEMKITHVIRGDDHMINSFKQRQIYEAMGWEVPNFAHIPLIHSEQGKKLSKRDNASTLEDYIKIGVISDALRNYLLRLGWSYKDKEIFTKQESIDLFDLSGVGKSPSKLDMNRIYSINETYIKSIDQKDLFNFFKEYVSKYKKPVDQSKDNMLLKSMGFLKNKAKTLEDIWNNAPIYY

SEQ ID NO: 187024 - protein, 214 aa, Unknown
  Bacterial polypetide isolated from the Sargasso Sea
MKKVATRFAPSPTGPIHIGGIRTALFNWLYSKNQNGNFYLRIEDTDKERSKDEYKKQIIQSLKWIGITHDGEEYIQSKKIDDHIKIANELLKNGHAYKCYCSNEEIEEQKKRSRQKKIPYFYDRKWRNKKETDAPKDIKPVIRFKSKIEGSTILKDLVQGDVEIENNTIEDFIILRNDGTPTYNLSASVDDHQMNMTHIIRGDDHKINTFKQIQ

SEQ ID NO: 187025 - protein, 284 aa, Unknown
  Bacterial polypetide isolated from the Sargasso Sea
ITYQSQRFSHYIDKVEELLNKDWAYYDKVEKNEKTRGTDLALAYDNRLNKEGHVIRFRNQRENTISINDSVHGEIKFDPKVFFDVVILRSNGVPTYNLTSVVDDIDMEITHLIRGDDHLSNLPVQVNLFKSFEADVPIFCHLPMIHGTDGKRLSKRHGAVDINHFLRQGYRVDALINYLVKTGWSHGDKEIFSIKELLELFDLDRVTKSAATFDIDKLNWLNQHYIKNDDIENVAEQILPYLHDHNPPIEACNDDYLKNILLLGIEREFSLKNIANSITYFYQD

SEQ ID NO: 187026 - protein, 286 aa, Unknown
  Bacterial polypetide isolated from the Sargasso Sea
SKSNKGKCLLRIEDTDKDRSKEEYTNSILKSFSWMGIEFDEEPVYQSKNISLHLKAIKKLIEEGHAYYCHCSQERLDKLRKDQQKAGEKPKYDGKCRELNLEKSDSSVVRFKNSREGAVTFNDLVRGEITISNNELDDLIILRSDGSPTYNLSVVVDDMNMGITHVIRGDDHINNTPRQINICKALGGEEITFGHVPMILGDDGKRMSKRHGAISVVDYKNMGILSEAFLNYLVRLGWSLGDKEVFTLDELINCFSEGKINSAPSSFSMEKLTWFNKEHLDLVEED

SEQ ID NO: 187027 - protein, 227 aa, Unknown
  Bacterial polypetide isolated from the Sargasso Sea
FYLRIEDTDKERSKEEFKKQILDSLAWIGLNHDDKEYIQSLNIKKHKEIAEELLKKGFAYKCFCTEEEIKEQKEKCKKQGIPYLYNRKWRDQENLEVPKNINPVIRFKSKISGNSVVKDLVQGEISVANSIIEDFVILRKDGSPTYQLSAVVDDHLMKITHVIRGDDHKINTFKQKQIYEAMKWNIPEFAHIPLIHSEKGSKLSKRDNSSTINDYIKIGILSDALRN

SEQ ID NO: 187028 - protein, 285 aa, Unknown
  Bacterial polypetide isolated from the Sargasso Sea
MVRVRFAPSPTGPIHIGGVRTALYNYLYKLNRGGEFILRIEDTDSSRRVDGAEKYIYDVLDYYKIKVDEGPREGGGFGPYRQSERKKIYNKYIDLLIEKGLAYYCYASKEELLSAREDKGFSYNSKTRMLFKNSLSLNEEENLSLLKKKKYVVRLKVEADVELSITDLLRGTIKVNSNNLEDKILVKGDGLPTYHFANVVDDYLMKITTIIRGEEWLPSLPIHKLIYDALGWEMPNTVHLPLILNPSGLGKLSKRDAIRNNYSIFPIKWEELDGLKEKGFTRWTS

SEQ ID NO: 187029 - protein, 137 aa, Unknown
  Bacterial polypetide isolated from the Sargasso Sea
MSKVATRFAPSPTGPLHIGGVRTALFNWLFSKNQKGSFFLRIEDTDKERSKEEYKNQIIQSLKWIGIENDGNEYIQSKKINDHIKVANVLLKNGHAYKCYCSNEEIEEQKKRAKQKKIPYIYDRKWRDKNEIDAPKN

SEQ ID NO: 187030 - protein, 298 aa, Unknown
  Bacterial polypetide isolated from the Sargasso Sea
MIITRFAPSPTGTLHIGGVRTALFNYVYAKQNNGKFLVRIEDTDQVRSKSEFEENIINGLHDMGLKPDADPVRQSERKHLYLDAAHRIIESGQGYYCNCSPERLDELRNTQMKAGKKPMYDGKCRDKGLEKSENTVLRLKTPNDGEVRFNDLVRGEVVFNNSELDDLILLRSNGTPTYHLCVVVDDADQGVTTVIRGEDHLSNTPRQIHIQQALELPAMEYAHLPLVLGENKKRLSKRDSVTSLDEYISKGYLQTSMINMLGRLGWSKGDKEIFYIDDLLKDFRIQEVQKAGAVFDLK

SEQ ID NO: 187031 - protein, 307 aa, Unknown
  Bacterial polypetide isolated from the Sargasso Sea
MPKQGSTSFTDLVKGEIQVSNDQLEDFIIERSDGSATYNFCVVVDDLDSKITHVIRGDDHVNNTFKQINVFKAFNENVPTYGHVPMILGEDGKRLSKRHGALGVGEYSSQGILPEALKNYLLRLGWSKGDQEIFDYHEMEETFVEGTLNQSPATFSMDKLLWFNKHYLDSKSEEQLINAINNKKFDGSDYSNSVLLAIRERCSTLNDFIVHSSYFFKDPEDFEDTLINKHCKEGTHGYLSLLKSYLSELEMWDQISIKEVIDKTVSEVDVGFGKIGLPLRLALTATVNSPSIDLVCEILGKNISLRD

SEQ ID NO: 187032 - protein, 318 aa, Unknown
  Bacterial polypetide isolated from the Sargasso Sea
SKNQKGIFHLRIEDTDKERSKEEYKKQIIESLKWIGIKADEEEYVQSTKIKKHIEIANKLLDKGFAYKCYCTEQDIEEEKKRAKQKKLPYIYNRKCRNIKDVPENIDPVVRFKSKIEGSTTLKDLVQGDVNIENATIEDFVILRKDSTPTYNLSAAVDDNEMNITHIIRGDDHKMNTFKQMQIFQSMNWNLPTYVHIPLIHTSEGKKLSKRDKASTLDDYKKIGIMPNALRNYLLRLGWSFQDKEIFTLEESIKHFNIEGIGKSPSKLDMSRILSINEHYIKNIDENDLYNHLKKFCEIYKNKIDNKEEKIKKSLTFL

SEQ ID NO: 187033 - protein, 113 aa, Unknown
  Bacterial polypetide isolated from the Sargasso Sea
MRLRFAPSPTGYLHVGGLRTALYNFFLAKQSKGSLILRIEDTDQNRLVQDAEENLIAMLSWAGINFDEGPHLQGKYGPYRQSERLSIYKKYYLQLIEQGNAYPCFYSKQRLHD

SEQ ID NO: 187034 - protein, 294 aa, Unknown
  Bacterial polypetide isolated from the Sargasso Sea
DSNELEDKVILKSDGMPTYHLANVVDDNNMKITSVVRGEEWLSSLPVHYLLYEFFGWKPPKFYHLPLILKTSGAGKLSKRDADEQGHPIFAVKWEDSDGFKEHGFIPEGLNNYLALLGWSNKEEKEKYTMEELVKSFNYEEINKSGARFDFKKALWINHLHLKDLESKRILDLSEQTKKLLVERYSEPEAIEIIELVKERLNTTKDIDKELSVFIKQPKEIDVSAIEKINREVIFSVLNFCKLNNEFINSSSELKNELMKFGAENDISFGNIMKTLRLSLVGSLSGPDLFKIID

SEQ ID NO: 187035 - protein, 116 aa, Unknown
  Bacterial polypetide isolated from the Sargasso Sea
MKKVATRFAPSPTGPLHIGGVRTALFNWLYSKNQKGDFYLRIEDTDKERSKDEYKKQIIQSLKWIGITHDGEEYIQSKKIDDHIKIANKLLKNGNAYKCYCSSEEIAEQKKRARQK

SEQ ID NO: 187036 - protein, 220 aa, Unknown
  Bacterial polypetide isolated from the Sargasso Sea
MSKNTIKVRFAPSPTGELHLGGARTALFNWLFAQRQNGSFFLRIEDTDKERSKTQYTEQIIDSMKWLGLNWKTPVVYQSGRTERYKHYLNILFKNDLCYRCFCSKDELQQSKVDGHFLYPGTCRNLSEHEIKTKLNQGITFTIRIKIGSGKTMFNDLVYGKNVTDHNELDDFIIIRSDGTPTYNFSVVVDDYEMEISHVIRGDDHLSNTSKQIIIYRALG

SEQ ID NO: 187037 - protein, 211 aa, Unknown
  Bacterial polypetide isolated from the Sargasso Sea
LHIGGVRTALFNWLYSKNQKGSFFLRIEDTDKERSKDEYKNQIIKSLKWIGIENDGNEYIQSKKIDDHIKVANELLKNGHAYKCYCMSEEIEEQKKRAKQKKIPYIYDRKWRDKSESDAPKNVKPTIRFKSKIVGTSILKDLVQGDVEIENNTIEDFIILRNDGSPTYNLSASVDDHQMNITHIIRGDDHKINTFKQMQIYSAMKWELPSF

SEQ ID NO: 187038 - protein, 102 aa, Unknown
  Bacterial polypetide isolated from the Sargasso Sea
MSIITRFAPSPTGYLHLGGARTALFNWLFAKRYGGQFLLRIEDTDRARSNDLAIQQILNGMQWLGLDWDGDLVFQHSRSERHVEVAKSLLESGRAYKCFSSP

SEQ ID NO: 187039 - protein, 146 aa, Unknown
  Bacterial polypetide isolated from the Sargasso Sea
MSKVATRFAPSPTGALHIGGVRTALFNWLYSKNQKGTFHLRIEDTDKERSKEEYKNQIINSLKWIGIEHDGDEYIQSTKIKDHIKVANELLKNGNAYKCYCSSEEIEEQKKRAQQKKIPYIYNRKWRDADEKDAPKDIEPVIRFKS

SEQ ID NO: 187040 - protein, 310 aa, Unknown
  Bacterial polypetide isolated from the Sargasso Sea
MKDLVQGDVQIDNNTIEDFVILRNDGSPTYNLSASVDDHQMKVTHIIRGDDHKINTFKQMQIYLAMKWDLPSFAHIPLIHTSEGKKLSKRDKQSTLDDYSKIGIMPDALRNYLLRLGWSFKDKEIFTLEESIKHFSLEGIGKSPSKLDMNRILSMNEHYIKNMNENELFDHFTNYCENYKEKINSNANKIKKSLSFLKNKAKTLEDIYNNSQYLIKDKIQISSDDAKLLDDLSKKILNEFLKKYEKLTSINKENLEKIINSLISDNKTNFKGVGQPLRIALVGSKFGPGIYDIILSLDKNDVIQRLKVIS

SEQ ID NO: 187041 - protein, 178 aa, Unknown
  Bacterial polypetide isolated from the Sargasso Sea
MIKQPSVRFAPSPTGKLHLGGARTALFNWLYAKRYEGKFFLRIEDTDTERSKKEYTDQILNSLQWLGLDWSEPIIYQSKRSLIYKEAVQKLLDNRLAYRCFLTKEELELAREKSKKEGGDFHVPKTYRDISLNDQKSLLNSGQSFTIRLKVPLKGVTSFEDEIYGKINVNNKEIDDFI

SEQ ID NO: 187042 - protein, 310 aa, Unknown
  Bacterial polypetide isolated from the Sargasso Sea
WIGIKHDGDEYIQSKKIDSHVKVANELLKSGNAYKCYCSTEEIEEQKKRAKQKKIPYVYNRKWRNMNEAEAPKDIKPVIRFKSKIDGTSILKDLVQGDVEIENNTIEDFVILRNDGTPTYNLSASVDDHNMNITHVIRGDDHKINTFKQMQIHVVMKWKLPSYAHIPLIHTIDGKKLSKRDKASTLDDYSNIGIMPDALRNYLLRLGWSYKDKEIFTLDESIKHFNLEGIGKSPSKLDISRILSMNEHYIKSIDESELFTQLTKYCENYKQRIPSEKENKIKSSLVFLKNKAKTLDDIYNNSKYIIQDKI

SEQ ID NO: 187043 - protein, 187 aa, Unknown
  Bacterial polypetide isolated from the Sargasso Sea
MSFNCRFAPSPTGPLHIGGVRTALFNWLLAKKNKGKYFLRIEDTDKERSKDEFKEQIITSLAWLGIEHDGDEYIQSKNISKHVTVAEELLKKGFAYKCYCSEQEINEQKEKCKKQGIPYVYNRKWRDAKDLKIPEGVKPVLRFKSKISGNTIIKDLVQGDRNISNSTIEDFVILRKDILHIPTIGYG

SEQ ID NO: 187044 - protein, 311 aa, Unknown
  Bacterial polypetide isolated from the Sargasso Sea
KKYSDELVAKGHAFPCFCSAQRLDEVRAQQMANKETPRYDGHCMHLDPAEAQRRIAAGESHVVRMKVPSEGVCVVPDMLRGDVEIPWDRMDMQVLMKADGLPTYFLANVVDDHLMGITHVLRGEEWLPSAPKLIKLYEYFGWEQPALCYMPLLRNPDKSKLSKRKNPTSITFYERMGYLPQAMLNYLGRMGWSMPDEREKFSLAEMIEHFDINRVSLGGPIFDLEKLSWLNGQWLRELPVETFAAEVQKWALNPEYLMKIAPHVQGRVETFSQIAPLAGFFFSGALNLDAKLFEHKKLSPDQVRQLMQLIL

SEQ ID NO: 187045 - protein, 164 aa, Unknown
  Bacterial polypetide isolated from the Sargasso Sea
MSKVATRFAPSPTGPLHIGGVRTALFNWLFSKNQNGTFHLRIEDTDKERSKDEYKDQIIKSLKWIGIGYDGSEYIQSSKINDHINIANELLKNGHAYKCYCSNEEIEEQKNRAKQKKIPYIYDRKWRDKSENEAPKNIKPTIRFKSKIDGSTILKDLVQGDIEI

SEQ ID NO: 187046 - protein, 291 aa, Unknown
  Bacterial polypetide isolated from the Sargasso Sea
RFKSKIDGTSIFKDLVQGDVEIDNNTIEDFIILRNDGTPTYNLSASVDDHQMNMTHIIRGDDHKINTFKQIQIYQAMKWELPSFAHIPLIHTIEGKKLSKRDQASTLDDYSKIGIMPDALRNYLLRLGWSYKDKEIFTLDESIKFFNLEGIGKSPSKLDMSRILSMNEHYIKNINENDLFNQLTEYCKLYKSEIQSDKKDKIKKSLTFLKNKAKTLEDIFNNGLYIIKDEVDYNKDDLKLIDDKARKVISNFNDQFQKIDVPSREILEPIVNELIKSHGTNFKGVGQPLRI

SEQ ID NO: 187047 - protein, 318 aa, Unknown
  Bacterial polypetide isolated from the Sargasso Sea
MFNEEIEEQKNRAKQKKIPYIYDRKWRDKSEADAPKDIKPTIRFKSKIDGSTILKDLVQGNIQIENNTIEDFIILRNDGSPTYNLSASVDDHQMNITHIIRGDDHKINTFKQMQIYLAMKWEIPSFAHIPLIHTTEGKKLSKRDKASTLDDYSKIGVMPEALRNYLLRLGWSFKDKEIFTEEESIKYFNLEGIGKSPSKLDMSRILSMNEHYIKNIDENKLFNRLIKYSEIYKEKIPNKKGDKIKSSLAFLKNKAKTLEDIYKNSKYIIQDKVTINQEDIKLIDNKAKKIVSEFSNSISKIEKFKQRKLKSQFINDLI

SEQ ID NO: 187048 - protein, 293 aa, Unknown
  Bacterial polypetide isolated from the Sargasso Sea
KTYRDYTESQQQELVDQGKPFTVRLKIPDGITEFDDLVYGNIKVNNNDLDDFIIARSDGTPTYNFVVTIDDSDMNITHVIRGDDHLANTPKQILVYKALGLNVPTFAHLPMILGADKKRLSKRHTATNVQEYRDKGYTSEAILNYLSLLGWNPDSEQEIFNLDDLIDGFNLEQVQKKPATFDEKKLLWVSGQHMAKISIDIVILELEKLNPSWGQGQSDKYKSDVLSLTKDRSKTLTDLMEISDTFFVDHIIYDMDIKNKIWNEISSQIIDDLLNAINIEENFDKQTLESILK

SEQ ID NO: 187049 - protein, 238 aa, Unknown
  Bacterial polypetide isolated from the Sargasso Sea
MSVVTRFAPSPTGSLHLGGLRTAIFNYLYAKKNQGKLILRIEDTDQERSTEGSLQEIITSLEWLGIEWDEGPYLQSSRLNIYTDFVNMLLDKDLAYKCFTTNEEIKELKEKAAKNKEIYRYPRIWRDRRDHPQNSNYVIRFKVPDLKEISFTDTLRGQINIDSSNLDDFVIVKSDGFPTYNFASVVDDADMGVTNIIRGEDHLSNTAKQMLIFDAIEKEPPSFTHVSMILGKDKNKLS

SEQ ID NO: 187050 - protein, 296 aa, Unknown
  Bacterial polypetide isolated from the Sargasso Sea
RDKTDSEAPKNIKPVIRFKSKIDGSTVLKDLVQGDVQIENNTIEDFVILRNDGTPTYNLSASVDDHIMNITHIIRGDDHKINTFKQMQIYLAMKWELPSFAHIPLIHTVDGKKLSKRDKASTLDDYSKIGIISDALRNYLLRLGWSFKDKEIFNLDESIKYFNLEGIGKSPSKLDMSRILSMNEHYIKNIDEINLYNLLNEYCARYKIEITADKAQKIKNSLSFLKNKAKTLEDIYKNSQYIISDKVNFNDDDLKLIDETSKKIISEFHGKISELNKFNREALEPIINDLIKSNNT

SEQ ID NO: 187051 - protein, 278 aa, Unknown
  Bacterial polypetide isolated from the Sargasso Sea
AVVDDHEMKITHVIRGDDHKINTFKQKQLYEAMKWNVPEFAHIPLIHSEKGSKLSKRDMASTIGDYIKKGILADALRNYLLRLGWAHKDKEIFSLEESINLFDLKGVGKSPSKLDLSRILSLNEHYIKHIDEKELFALLKDFAQNFRESINPSKEKAVLQSMSFLKNKAKTLDDIYCNSEYIIKDNIDIMPEDKKLLDTEAKKIISEFLENFKKIDIPNKEKLEEIINNLIKKHSTNFKGVGQPLRIALVGSRFGPGIYNIILSLTKDEVIKRISKIN

SEQ ID NO: 187052 - protein, 278 aa, Unknown
  Bacterial polypetide isolated from the Sargasso Sea
GIPYVYNRKWRDAGDLKVPENVKPVIRFKSKISGMSSIKDLVQGEMNVSNLTIEDFIILRKDNTPTYQLSATVDDNEMGITHVIRGDDHKINTFKQKQIYDAMNWTVPEFAHIPLIHSEIGKKLSKRDKASTIDDYIKIGILSDALRNYLLRLGWAHKDKEIFSLEESIELFDLKGVGKSPSKLDMSRILSLNEHYIKHIEEKELFKLFEFYCDKYKKPLESSKSNVILKSINFLKNKAKTLEDIHQNAQYILNNKVQISAEDMKLINESSKNILKDF

SEQ ID NO: 187053 - protein, 151 aa, Unknown
  Bacterial polypetide isolated from the Sargasso Sea
MKNPRVRFAPSPTGYLHIGGARTALFNWLFAKQNNGKFLLRIEDTDLERSKEEYINQITDALKWLGLSWDEDIILQSKNNIRHQEMVSRMLKEGTAYKCFLQKDELDKLRAESEQKKEVFRVPQIYRDLSPEKEKELIEQGKSFTVRIKVP

SEQ ID NO: 187054 - protein, 314 aa, Unknown
  Bacterial polypetide isolated from the Sargasso Sea
MSVRTRFAPSPTGELHLGGARTALFNWLFAKSQKGDFLLRIEDTDAKRSNDQTAKNIIGDLKWLQLNWDGDIVYQKKNIDQHQEVINNLLRSGHAYHCYCTEKEIHELKYTGQANSLKALRSPWRNENKQKNDTESSVIRFKTPENVILNFNDKVRGLLSWKSDEIEDFVIARADGTPTYNLAVVTDDKNMKISHVIRGEDHITNTIKQTLIYRALNWRLPIFAHIPLIQNQSGQKLSKRDGKNNLVYFKQEGVLPSAMLNYLARLGWSYNNEEFFSEKQAISWFSLEGIGKSPSKYDEKKVINLCGKAFKNLE

SEQ ID NO: 187055 - protein, 277 aa, Unknown
  Bacterial polypetide isolated from the Sargasso Sea
LFNWLFSKNQGGTFHLRIEDTDKERSKDEYKDQIIKSLKWIGINYDGVEYIQSKNIDNHIKVVNELLKNGNAYKCYCSSDEIEEQKKRAKQRKIPYIYNRKWRDKDKTDVPKNIKPVIRFKSKIDGSTLLKDLVQGDIQINNNTIEDFIILRNDGSPTYNLSAAVDDQQMKATHIIRGDDHKINTFKQMQIYLAMKWELPSFAHIPLIHTSEGKKLSKRDKASTLEDFSKIGIIPEALRNYLLRLGWSFKDKEIFTLDESIKHFNLEGIGKSPAKLD

SEQ ID NO: 187056 - protein, 293 aa, Unknown
  Bacterial polypetide isolated from the Sargasso Sea
EHIEKSLNWCGIIPDESPKIPGKFGPYFQSQRKDLYRKYVDKLIKKGSAYYAFDKKDELDALRKNSEEEGKTFIYNWLNRDKLKNSLSLSNNDSKNLINKGEYVVRFKSYEPLKDKNEYYIKDIVRGKVKIDLKNLDDKIIYKSDGMPTYHLANIVDDHLMKISHVIRGEEWLPSLALHFKIYEAFGWEKPLFAHLPLILKPSGQGKLSKRDGKKFGIPVYPIEWNDSKEDIKYLGFKEMGFESEAILNFICMIGWNPGNEEEVFSMKELESIFSLDKINKSGAKFDFEKAKW

SEQ ID NO: 187057 - protein, 153 aa, Unknown
  Bacterial polypetide isolated from the Sargasso Sea
MVITRFAPSPTGNLHIGGARTALFNWLYAKNQSGKFLLRIEDTDIKRSEDKYVENILESLEWLGIEYDDNLIYQSERSDLYKKAVNKLLEMDLAYYCDCSKEELEKLRTEQQKSGLKPKYDGRNREKGLENGPNTVVRFKTPLNGKIIVRDTL

SEQ ID NO: 187058 - protein, 290 aa, Unknown
  Bacterial polypetide isolated from the Sargasso Sea
MFNWLYSQNKKGSFFLRIEDTDKERSKDEYKNQIIQSLKWIGIVNDGNEYIQSKKIDGHIKVANELLKSGYAYKCYCSNEEIEEQKNRAKQKKIPYIYDRKWRDKSEADAPRDIKPTIRFKSKIDGSTILKDLVQGDIEIENNTIEDFIILRNDGSPTYNLSASVDDHEMGITHIIRGDDHKINTFKQMQIYLAMKWEVPSFAHIPLIHTKEGKKLSKRDKASTLDDYSRIGIMPEALRNYLLRLGWSFKDKEIFTEEESIQHFNLEGIGKSPSKLDMSRILSMNEHYIK

SEQ ID NO: 187059 - protein, 216 aa, Unknown
  Bacterial polypetide isolated from the Sargasso Sea
MLKVATRFAPSPTGPLHIGGIRTALFNWLFSKNQGGKFYLRIEDTDKERSKDEYKKQIIHSLKWIGIEHDGEEYIQSKKIKDHIAIVNELLKNGNAYKCYCSNEEIEEQKKRSRQKKIPYIYNRKWRDKKESDAPENIKPVIRFKSKIEGTTKLKDLVQGDVEIENNTIEDFVILRNDGTPTYNLSASVDDHQMKMTHIIRGDDHKINTFKQIQIY

SEQ ID NO: 187060 - protein, 170 aa, Unknown
  Bacterial polypetide isolated from the Sargasso Sea
MSQVVTRIAPSPTGFMHIGTARTALFNWLYARGRNGKFYIRIEDTDRKRSTAEANEVIINGLNWLGLDYDGDIVSQFERAPRHVEIAEKLLKNGKAYKCFTSPGEIQTFKETALKNGTSTLFKSPWRNADPSSYPGSPYVIRIKAPETGETIIQDEVQGKISIKNNQLDD

SEQ ID NO: 187061 - protein, 135 aa, Unknown
  Bacterial polypetide isolated from the Sargasso Sea
MSFNCRFAPSPTGPLHIGGVRTALFNWLLAKKNKGKYFLRIEDTDKERSKDEFKKQIITSLAWLGIEHDGDEYIQSKNISKHVKVADELLKKGFAYKCYCSEEEISEQKEKCKKQGIPYVYNRKWRDAKDLKIPE

SEQ ID NO: 187062 - protein, 157 aa, Unknown
  Bacterial polypetide isolated from the Sargasso Sea
MSKSPVRTRFAPSPTGYLHIGGARTALFAWLFAKSYGGDCLLRIEDTDKERSKEEYTEEIIRSFEWLGIEFDEEVVYQSKNATRYKEVIDSLLEEGLAYVCSGEDLQQDKKFRDENLARDENTVVRFKMPEKDTTKFDDMVKGQIEVLNDELEDFIM

SEQ ID NO: 187063 - protein, 315 aa, Unknown
  Bacterial polypetide isolated from the Sargasso Sea
DTDKERSKSEFTSNILDGLHWLGIDWDAEPVIQSERVEHHRQAIQQLLDAGLAYRCYASEDELNTMREAQMASKQAPRYDNRHRNLSPEQIAAYQAEGRQATVRFRIDDSGSIQWKDLVRGAMSWSGADLGGDMVIARRAPADQIGDPLYNLVVVVDDAAMDITHVIRGEDHIANTAKQLLLYEALGLPLPEFAHTPLILNQEGRKLSKRDGVTSVSDFRGMGYTSSALANYMTLLGWSPPEGIGERFSLVDAAKVFDFQRVNKAGARFDWDKLNWLNGQVLHELGAAELNRRLTPLWQEAGFEVANRSQAWWSN

SEQ ID NO: 187064 - protein, 284 aa, Unknown
  Bacterial polypetide isolated from the Sargasso Sea
IRFRNQRESIVSISDSVHGEIKFDPKVFFDVVILRSNGVPTYNLTSVVDDIDMEITHLIRGDDHLSNLPVQVNLFKSFEADVPIFCHLPMIHGTDGKRLSKRHGAVDINHFLRQGYRVDALINYLVKTGWSHGDKEIFSIEELLELFDLGRVTKSAATFDIDKLNWLNQHYIKNDDIDNVAEQILPYLQEQNLPNKVSNDDYLKNILLLGIEREFSLKNIANSITYFYQDEIHYDFNTIAKYEKTQTIKILKDIVTKFFTIDFNDKPSISACVKSSCEDLKLKF

SEQ ID NO: 187065 - protein, 185 aa, Unknown
  Bacterial polypetide isolated from the Sargasso Sea
MSFNCRFAPSPTGPLHIGGVRTALFNWLLARKNKGKFFLRIEDTDKERSKEEFKEQIISSLAWLGIKHDGEEYIQSKNVKKHISIAEELLKKGFAYKCYCSEQEINEQKEKCKKQGIPYVYNRKWRDSKDLQFPKDVKPVIRFKSKISGNTIIKDLVQGDRNISNSTIEDFIILRKDSTPTYQLS

SEQ ID NO: 187066 - protein, 181 aa, Unknown
  Bacterial polypetide isolated from the Sargasso Sea
MKKVATRFAPSPTGPLHIGGVRTALFNWLYSKNKGGYFYLRIEDTDKERSKDEYKNQIIKSLKWIGIENDGDEYIQSKKINDHIKVANELLKNGYAYKCYCSSEEIEEQKKRAKQKKIPYIYDRKWRDKNEIEAPKDVKPTIRFKSKIDGTSVLKDIVQGDVEIENNTVEDFIILRNDGSP

SEQ ID NO: 187067 - protein, 288 aa, Unknown
  Bacterial polypetide isolated from the Sargasso Sea
KKQSGTFLLRIEDTDKERSKDEYKDQIIKSLKWIGIDYGGNEYIQSSQIDNHIKVANELLQNGNAYKCYCSSEEIEEQKKRAKQKKIPYIYNRKWRDKEEADAPKDIKPVIRFKSKIEGSAALKDLVQGNVQIENNTIEDFVILRNDGSPTYNLSAAVDDHQMKITHIIRGDDHKINTFKQIQIYKAMQWEIPNFAHIPLIHTTEGKKLSKRDKASTLDDYSKIGIIPEALRNYLLRLGWSYKDKEIFTLEESIKYFNLEGIGKSPSKLDISRILSMNEYYIKNISEN

SEQ ID NO: 187068 - protein, 239 aa, Unknown
  Bacterial polypetide isolated from the Sargasso Sea
RREAGKSTALKPSDLLLSDDEQAARKAAGDAYVIRMMVPEEEGVCAIEDMLRGTIELDWGMVDAQILLKSDGLPTYHLANVVDDHLMEITHVIRGEEWINSAPKHQLLYEYFGWDMPVLCHLPLLRNPDKSKLSKRKNPTSILYYQRMGYLPEAVVNYLGRMGWSMPNEEEKFTLDEMQAAFDISRVSLGGPVFDVEKLKWLNGLWIRESLSADELVRRLRDWALNREMLDKILPHAQG

SEQ ID NO: 187069 - protein, 273 aa, Unknown
  Bacterial polypetide isolated from the Sargasso Sea
MKVTRFAPSPTGNLHIGGVRTALFNYIFSKQSGGLFLIRVEDTDRERSKKEYEDDIISGLEWLGISPDKTPIRQSERSDMYQKAAEKLIDSGNAYWCDCSPEDLEEMREQQAAAGKKPMYDGRSRNLGLERSDKTVLRLATPLEGETVVNDLIRGEITFNNSELDDLILLRSDGTPTYHFCNVVDDFDQGVTTVIRGEDHISNTPRQIHIQKALGYPDLEYAHLPLVLGEDKKRLSKRHAATSLNAYKEMGFTKETIINALALLGWSTENEIF

SEQ ID NO: 187070 - protein, 263 aa, Unknown
  Bacterial polypetide isolated from the Sargasso Sea
LFNWLYSKNKKGNFFLRVEDTDKERSKEEYKDQIVKSLKWIGINYDGEEYIQSKKVEDHIKVANELLKNGFAYKCYCSSEEIEEQKKRARQKKIPYIYDRKWRDKKEADAPKDIKPVIRFKSKIDGTSVLKDLVQGDVEIDNNTIEDFIILRNDETPTYNLSASVDDHQMNMTHIIRGDDHKINTFKQIQIYQAMKWEIPSFAHIPLIHTIEGKKLSKRDKASTLDDYSKIGIMPDALRNYLLRLGWSYKDKEIFTLDESIKH

SEQ ID NO: 187071 - protein, 314 aa, Unknown
  Bacterial polypetide isolated from the Sargasso Sea
DEIRGSLSFNSNEIEDKVIMKSDGMPTYHFANVVDDHDMKITSVVRGEEWLSSLPSHLTLYNHFGWSPPKFYHLPLILKSTGQGKLSKRDAEEQGHPVFAVQWEESKGFKESGYTPEGMLNYLALLGWKGKDENEKYSLDELVNSFESKDINKSGARFDIKKAMWINHLHLRDFSSKKILSLSEQANLLLEKKYSNDVCEQIVDLIKERLNTLFDVEKEVFVFVSQPKVYDQGVIEKITRNTIYNVLNFCKLKEELISEPVLLKESLMTFGSENQISFGNIMKSLRLCIVGCLSGPDLFKIIDIIGPEETLHRI

SEQ ID NO: 187072 - protein, 299 aa, Unknown
  Bacterial polypetide isolated from the Sargasso Sea
KNVKPVIRFKSKISGNSIVKDLVQGEINIANSIIEDFIILRQDGSPTYQLSAVVDDHVMKITHVIRGDDHKINTFKQKQIYEAMKWNIPEFAHIPLIHSEKGSKLSKRDKASTIDDYIKIGILSEALRNYLLRLGWAHKDKEIFNLDESIKLFDLKGVGKSPSKLDMSRILSLNEHYIKHMDEKELFKFLKIYSQKFKKNIDQSKESSLIKSMSFLKNKAKTLEDIYQNSQYILQDNIKISPDDSKLLDNSSKNIIKDFLDEFEKMSKITKENLEKTVNGLIDKHKTNLKGVGQPLRIV

SEQ ID NO: 187073 - protein, 114 aa, Unknown
  Bacterial polypetide isolated from the Sargasso Sea
MSKVATRFAPSPTGPLHIGGVRTALFNWLFSKNKGGTFHLRIEDTDKERSKDEYKKQIVKSLKWIGIEYDGDEYIQSTKINNHVDVANELLKNGNAYKCYCTNEEIEEQKKRAK

SEQ ID NO: 187074 - protein, 211 aa, Unknown
  Bacterial polypetide isolated from the Sargasso Sea
VSKKSASSKFYLRIEDTDHERSKQKYTDNITNSLKWLGLNWDEDIQVQSKRLSRHQEVAKELLQKKRAFKCICSEEKIANRRKLIRENKNYSKKICNECKNDNDIQSKDEDFVVRLDVPNEGNLKINDTIQGDVSVANLELDDFILLRKDQSPTYMLSVVVDDHDLGINYIIRGDDHFINTFRQYYIYKFMNWDIPQYAHIPLIHGEDGTK

SEQ ID NO: 187075 - protein, 253 aa, Unknown
  Bacterial polypetide isolated from the Sargasso Sea
MKKVATRFAPSPTGPLHIGGVRTALFNWLYSKNQSGKFYLRIEDTDKERSKEKYKIQIINSLKWMGIEHDGEEYIQSRMIDEHITIAKKLLEKGNAYKCYCSAEEIEEQKKRAKQKKIPYVYNRKWRDISEDQAPKDIKPVLRFKSKIEGTSLLKDLVQGNVEIENNTIEDFVILRNDGTPTYNLSASVDDYNMEMTHIIRGDDHKINTFKQIQIYEALGWDIPQFAHIPLIHTIDGKKLSKRDNASTLEDYS

SEQ ID NO: 187076 - protein, 301 aa, Unknown
  Bacterial polypetide isolated from the Sargasso Sea
LHIGGVRTALFNWLYSKNQKGTFHLRIEDTDKERSKEEHKMQIINSLKWIGIEHDGDEYIQSTKIEDHSKVATELLKNGNAYKCYCSSEEIEEQKKRARQKKLPYIYNRKWRDADEKDIPKDIEPVIRFKSKIEGSSILKDLVQGDIEIENNTIEDFIILRNDGTPTYNLSATVDDHQMGMTHIIRGDDHKINTFKQIQIYLAMGWKVPNFAHIPLIHTIEGKKLSKRDNASTLDDYSKIGIMPDALRNYLLRLGWSYQDKEIFNLDESIKYFNLEGIGKSPSKLDMSRILSMNEHYIKTI

SEQ ID NO: 187077 - protein, 299 aa, Unknown
  Bacterial polypetide isolated from the Sargasso Sea
RIDDTDTSRSTDEFKDSIISALKQLGLEHDDKITYQSQRFSHYIDKIEELLNKDLAYYDKVEKNEKTRETDLALAYDNRLNKDGHVIRFRNQRENIISISDSVHGEIKFDPKVFFDVVILRSNGVPTYNLTSVVDDIDMEITHLIRGDDHLSNLPVQVNLFKSFEADVPIFCHLPMIHGIDGKRLSKRHGAVDINHFFREGYRVDALINYLVKTGWSHGDKEIFSTKELLELFDLDRVTKSAATFDIDKLNWLNQHYIKNDDIENVAEQILPYLQEQNLPNKASNDDYLKNILLLGMRE

SEQ ID NO: 187078 - protein, 103 aa, Unknown
  Bacterial polypetide isolated from the Sargasso Sea
MSFNCRFAPSPTGPLHIGGVRTALFNWLLAKKNKGKYFLRIEDTDKERSKDEFKKQIITSLAWLGIEHDGNEYIQSKNISKHVTVAEELLKKGFAYKCYCSEE

SEQ ID NO: 187079 - protein, 297 aa, Unknown
  Bacterial polypetide isolated from the Sargasso Sea
MKKVATRFAPSPFGALHIGGVRTALFNWLYSKNHNGKFYLRVEDTDKERSKDEFKDQIIQSLKWIGINYDGEEYIQSKKVDDHIKVANELLKNGNAYKCYCSSEEIEEQKKRARQKKIPYIYDRKWRDKNENDAPKDIKPVIRFKSKINGTSILKDLVQGDVEIDNNTIEDFIILRNDGTPTYNLSASVDDHQMNMTHIIRGDDHKINAFKQIQIYQAMKWELPSFAHVPLIHTIEGKKLSKRDQASTLDDYSKIGIMPDALRNYLLRLGWSYKDKEIFTLEESIKFFNLEGIGKSP

SEQ ID NO: 187080 - protein, 256 aa, Unknown
  Bacterial polypetide isolated from the Sargasso Sea
MKIRTRFAPSPTGFLHVGGLRTALYNFLFAKKNKGVFVLRIEDTDQDRLIPNAAQNLIKTLEFCGLNYDEGPNQKNKFGPYTQSKRLHIYKKYILQLINNKQAYPCFFKNDKNDLAPEYDIQTALERMQNEQFVVKFKLSHDKNLKTFDEIRGDVIFDVNLMEDPIILKSDGYPTYHFANVIDDHCMKISHVIRGEEWLPSLPKHILLYNAFNWDTPKFYHLPLLLNPDKSKLSKRQGDVGVEDFLKKWLLKRKVL

SEQ ID NO: 187081 - protein, 227 aa, Unknown
  Bacterial polypetide isolated from the Sargasso Sea
SGYLHIGGVRTALYAWLFARNQGGKFLLRIENTHIKRSSQESINSIMEGLKWLGLDHDGEVIEQRYRFDIYQKKANQLIEEGKAYESEGAVRLKSDCSSDIVISDQVFGDVKVNKDELDDFIIMRSNGAPTYHLAVVIDDYESGITHVMRGDDHLKNTARHIQLMEAFGYPIPQFAHLPMILGPDGSRLSKRHGAMNVLHYRDEGFSSEALLNYLVRLGWSKGDQEI

SEQ ID NO: 187082 - protein, 265 aa, Unknown
  Bacterial polypetide isolated from the Sargasso Sea
LLAKKNKGKFYLRIEDTDKERSRDEFKKQIIESLSWIGIKHDDKEFIQSKNINKHKEIAEDLLKKNFAYKCYCSEEEIKEQKEKCKKQGIPYVYNRKWRDPKDLQIPKDVKPVIRFKSKVSGNTIIKDLVQGDINISNSIIEDFVILRQDGSPTYQLSATVDDHSMKISHVIRGDDHKINTFKQKQIYEAMKWDIPLFAHIPLIHSEKGSKLSKRDKSSTIDDYVKIGILPDALRNYLLRLGWAYKDKEIFSLDESIKLFDLKGV

SEQ ID NO: 187083 - protein, 298 aa, Unknown
  Bacterial polypetide isolated from the Sargasso Sea
NSTIEDFVILRKDYTPTYQLSATVDDHEMRITHVIRGDDHMINSFKQKQIYEAMGWEVPNFAHIPLIHSAQGKKLSKRDNASTLEDYIKIGIISDALRNYLLRLGWSYKDKEIFTKQESIDLFDLSGVGKSPSKLDMNRIYSINETYIKSIDEKDLFDLFKEYFSKYKKPIDQTKEKIISKSMGFLKNKAKTLEDIWNNAQYIINDKIEIGTDDKKLIDDLSKKVIKDFTSEYEKLSALSRSALETIIKSLIDKHKTNFKGVGQPIRIALVGSRFGPGIYDVILSLDKSEVIKRLKQI

SEQ ID NO: 187084 - protein, 217 aa, Unknown
  Bacterial polypetide isolated from the Sargasso Sea
MAFICRFAPSPTGPLHIGGVRTALFNWLLAKKNKGKFYLRIEDTDKERSKDEFRKQIIESLAWIGIKHDDKEYIQSKNINKHKEIAEELLKKGFAYKCYCSEEEIKEQKEKCKKQGIPYIYNRKWRDPKDLKIPSDIKPVVRFKSKISGDTKIIDLVQGEVNISNSIIEDFVILRQDASPTYQLSAVVDDHEMKITHVIRGDDHKVNTFKQKPKFMR

SEQ ID NO: 187085 - protein, 160 aa, Unknown
  Bacterial polypetide isolated from the Sargasso Sea
MSTVATRFAPSPTGPLHIGGVRTALFNWLFSKSNKGKFYLRIEDTDKERSKDEYKKQIIDSLSWIGINHDDQEYIQSKNINKHKEIAEELLKNGFAYKCYCSEEEIKEQKEKCKKKGIAYVYNRKWRDPKDLKIPENINPVIRFKSKISGNSVVKDLVQG

SEQ ID NO: 187086 - protein, 296 aa, Unknown
  Bacterial polypetide isolated from the Sargasso Sea
RQSNRSRFYKKYVDKLLKQGSAYYAFDSLEDLDSARKAGGIDFKYNVKTRMRLSNSFTVSEEERKKRVEEGRYVVRLAIPENKKISAYDEIRGELNFDSNELEDKVILKSDGMPTYHLANVVDDNDMKITSVVRGEEWLSSLPVHYLLYEFFGWKPPKFYHLPLILKSSGAGKLSKRDADEQGHPIFAVKWEDSNGFKEHGFIPEGLNNYLALLGWSNKEEKEKYTMEGLIESFNYEEINKSGARFDFKKAVWINHLHLKDLESKRILDLSEQTKKLMVEKYSKSETIEIIELVKE

SEQ ID NO: 187087 - protein, 271 aa, Unknown
  Bacterial polypetide isolated from the Sargasso Sea
MKITHVVRGDDHMINSFKQKQIYDSMGWGVPNFAHIPLIHSESGKKLSKRDKASTIDDYIKIGVIADALRNYLLRLGWSYKDKEIFSLDESIELFDLKGVGKSPSKLDMSRILSLNEHYIKNMDEKELFKLLKIYLKKFQKSLDKSKEDSVIKSIGFLKNKAKTLDDIYKNAQYILNENIEISSEDLKLLDETSKKILNDFVNDFQKMQLINRTNLEKLVNDLIKKHKTNFKGVGQPLRISLVGSKYRPGIYDIILSLKKKEVVKRISKIN

SEQ ID NO: 187088 - protein, 88 aa, Unknown
  Bacterial polypetide isolated from the Sargasso Sea
MKHNSIKVRFAPSPTGELHLGGARTALFNWLYSQKLNGSFFLRIEDTDKERSSDIYTNQIIESLKWLGLKWDEPLYINPVELIAINII

SEQ ID NO: 187089 - protein, 288 aa, Unknown
  Bacterial polypetide isolated from the Sargasso Sea
FAPSPTGALHIGGVRTALFNWLYSKNQKGTFHLRIEDTDKERSKDEHKVQIVNSLKWIGIEHDGDEYIQSTKINDHIKVANELLKNGNAYKCYCSSEEIEEQKRRARQKKLPYIYNRKWRDTDEKIIPKDIKPVIRFKSKIEGSSVLKDLVQGDVEIENNTIEDFIILRNDGTPTYNLSATVDDHQMGMTHIIRGDDHKINTFKQIQIYLAMGWKVPNFAHIPLIHTIEGKKLSKRDNASTLDDYSKIGIIPDALRNYLLRLGWSYQDKEIFTIDEAIKYFNLKGMEN

SEQ ID NO: 187090 - protein, 251 aa, Unknown
  Bacterial polypetide isolated from the Sargasso Sea
EIDNNNIEDFIILRNDGTPTYNLSASVDDHQMKMTHIIRGDDHKINTFKQIQIYEAMKWELPSFAHIPLIHTIEGKKLSKRDKASTLDDYSKIGIMPDALRNYLLRLGWSYKDKEIFTLDESIKYFNLEGIGKSPSKLDMSRILSINEHYIKNIDENDLLNQLTDYCKLYKSEIKPDKKDKIKKSLSFLKNKAKTLEDIYNNGQYIMVDKVNFNQEDIKLIDDKAKQVVSDFISQFKKIEQPTREVLEPNN

SEQ ID NO: 187091 - protein, 215 aa, Unknown
  Bacterial polypetide isolated from the Sargasso Sea
MSNVATRFAPSPTGALHIGGVRTALFNWLYSKNQKGTFHLRIEDTDKERSKEEHKIQIINSLKWIGIEHDGDEYIQSTKIDDHIKVANELLKNGNAYKCYCSSEEIEEQKKRARQKKLPYIYNRKWRDADEKDIPKDIKPVIRFKSKIEGNSILKDLVQGDVVVDNSTIEDFIILRNDGTPTYNLSATVDDHQMGMTHIIRGDDHKINTFKQIQI

SEQ ID NO: 187092 - protein, 272 aa, Unknown
  Bacterial polypetide isolated from the Sargasso Sea
IRIEDTDFLRSKSEYTKNILEGLKWLGLKWDEEPVKQSDRISIHKSYIKKLLECGAAYRCFTTEDEISELREEQKKKGLPPKHDNRHRNLSKEEIETFISQERTSVIRFKIDEKIEIKWVDQIRGEIKWHGKDLGGDLVLSRRAKGYEIGDPLYNLAVVVDDNFMNITHVVRGEDHISNTAKQILIYKALNFNLPTFSHTPLILNTQGKKLSKRDCVTSIDEFREMGYLPEALSNYMAFLGWSPKSADREILSLEEISEIFDLSEINKAGAK

SEQ ID NO: 187093 - protein, 165 aa, Unknown
  Bacterial polypetide isolated from the Sargasso Sea
MSLVATRFAPSPTGPLHIGGVRTALFNWLFSKNNKGKFYLRIEDTDKERSKEEYKKQIVESLDWIGIKHDDKEYIQSKNINKHKEIAEELLKKGFAYKCYCSEEEIKEQKEKCKRKGIPYIYNRKWRDPKNIEIPKDVKPVIRFKSKISGNSIVKDLVQGEVNIA

SEQ ID NO: 187094 - protein, 191 aa, Unknown
  Bacterial polypetide isolated from the Sargasso Sea
MTTITRFAPSPTGLLHLGNIRTALINWLYAKNSGGKFILRIDDTDQERSKDEYISQIKYDLDWLGIDYDETFNQSSRFERYKEQFEKLKSDGRIYACYETPEELERKRKLQMAAGGKQVYDRSALKLTEQQIKDYENDGRKPHWRFLLQTERMKWNDLLKGEIDIDLTSLSDPVLFRERWCSTLYIQFSCR

SEQ ID NO: 187095 - protein, 340 aa, Unknown
  Bacterial polypetide isolated from the Sargasso Sea
HCRKLQKKEVETKIQSGEKHVIRMKIPENQETFRLNDLVRGTVAIESTQVEDQVILKSDGFPTYHLAVVVDDHLMRISHVVRGEEWLPSFPKHLLLYRYFGWEPPEFVHLPLILNEERAKLSKRHGAVAVEEFRDRGYLPQALLNFIALLGWNPGDDREVLSLEEMVHEFRFERVSKSGAVFDREKLNWMNQQYLLKLPEEEYFRMIDDVIQKGDYHDQDPGKIRQAAEILKTRLVTFSDLNQKLGLFFEENPEIKDLQAIQVLKEENSKTVLKEFLQQAENLDQLTSENLGQLVKSVQKSTGIKGRGLWMPLRCAITPGGQWPRITCDARFFLVKENVS

SEQ ID NO: 187096 - protein, 181 aa, Unknown
  Bacterial polypetide isolated from the Sargasso Sea
MLQTRFAPSPTGNLHLGGARTALINYIVSKKSASSKFYLRIEDTDHERSKKEYIDNITNSLKWLGLNWDEEVQVQSKRLSRHQEIARELLQKKQAFKCFCSEEKIASQRKLIKENKNYSKKICTECKNDNDLQSRDEGFVVRLDVPDEGNLKIKDTIQGDVTVANLELDDFILLRKDQTPT

SEQ ID NO: 187097 - protein, 290 aa, Unknown
  Bacterial polypetide isolated from the Sargasso Sea
MHEIVTRFAPSPTGNLHIGGIRTALINYIITNKIRSLNSNSKFFLRIEDTDKLRSKEEFTKNIIDGLKWMNINWDNNIIYQSKNIERHKEIAIKLLKEKAAYKCACSKEDLEKRRKNNINLKRLCIDCENNNEIQSLNKNYCIRIKIPSENEIEINDLIQGKIKVKNKELDNFIILREDSTPTYMLSVVVDDHDMRINTIIRGDDHLNNTFRQIHIYKSLNWPIPKYAHLPLIHGQDGNKLSKRHGAVNINEFKNHGYLPQAIINNLILLGWSPKKEDEIIELNEILEKF

SEQ ID NO: 187098 - protein, 250 aa, Unknown
  Bacterial polypetide isolated from the Sargasso Sea
MPAYKTRFCPSPTGLLHLGNLRTALLNVLLAIKSGGAFILRIEDTDAERSKTEFSEAVCDDLEWMGLGWQEGPRVGGPEDSYYQSERNSIYESFYEKLLEQDLIYPCFTSDEELKIIRRNQMAAGEPPRYTGIWANASKEEIEKELEKGIQPVYRFRLPKDKTITFKDLVKGEQSFHTTDLDDFIVRKKDLSPTFMFANAIDDSLMGVNIVLRGDDHLSNTPRQIALLEALNLKIPEFIHVALFTGDDGA

SEQ ID NO: 187099 - protein, 163 aa, Unknown
  Bacterial polypetide isolated from the Sargasso Sea
MVRLRFAPSPTGYLHVGGLRTALFCWLYTRKNSGKFIFRLEDTDQKRIFEGAENQLTSMLEWSGIEIDEGPQYGGIHGPYRQSERLSIYAQYIRLLLDEGNAYRCFCTSERLEKLRNEQRKKGTTPRYDGFCRNLSKSEASRRAESGEDFRVRMKIPEVPETM

SEQ ID NO: 187100 - protein, 272 aa, Unknown
  Bacterial polypetide isolated from the Sargasso Sea
MNITHIIRGDDHKINTFKQLQIYIAMKWEVPSFAHIPLIHTKEGKKLSKRDNASTLDDYSKIGVIPEALRNYLLRLGWSFKDKEIFSEEESIKYFNLEGIGKSPSKLDMSRILSMNEHYIKNIDENELFNQFTKYCEIYKEKIPNEKLDKIKSSLMFLKNKSKTLEDIYKNSKYIIQDKVSINQDDIKLIDEKAKKIISEFSNSISKIEKLNKENLEPVINHIIKTNKTNFKGVGQPLRIFLTGSKFGPGIYDIIGSLGKEEVLKRLGMKIS

SEQ ID NO: 187101 - protein, 223 aa, Unknown
  Bacterial polypetide isolated from the Sargasso Sea
MEKRLRLAPSPTGLFHIGTARTALFNWLYAQKIGGKFLIRIEDTDLLRSKSEYTKNILEGLKWLGLKWDEEPIKQSDRISIHKSCIKKLLECGAAYRCFTSEDEISELREAQKKKGLPPKHDNRHRSLSKEEIETFISQGRTSVIRFKIDEKIDIKWVDQIRGEIKWQGKDLGGDLVLSRRAKGYEIGDPLYNLAVVVDDNFMNITHVVRGEDHISNTAKQIL

SEQ ID NO: 187102 - protein, 281 aa, Unknown
  Bacterial polypetide isolated from the Sargasso Sea
GITHVMRGDDHLKNTARHIQLMNAFNYPIPQFVHLPMILGSDGSRLSKRHGAMNVLHYRDEGFSSEALLNYLVRLGWSKGDQEIFSIQEMIDGFDLSGINKASAKFDIEKLCWVNQQHLFNTDDTELKMMLEAGSDTAKGLNDEVMTNFINAYKNRANTINDLVSSCDSLFSDEIKYDQASADKFLKKAILSPLKDVVNVLKRSEWNQESISEALQSVCEKHEIGFGKIGQPIRIAVTGGTQSPSIDQTLILLDQSIVVDRIEAAIEYIEENSELSKDKVN

SEQ ID NO: 187103 - protein, 235 aa, Unknown
  Bacterial polypetide isolated from the Sargasso Sea
LAVVVDDYDMGITHIIRGDDHLNNAFRQFWIYKALDWKVPAFAHIPLIHGEDGAKLSKRHGALGIEEYKEMGFLSESINSYLMNLGWREPEKDFIDLDEASKIFELNKIGKSSSRFNIAKLKNINSHFMRSKNQKSLINLIKEKIITFSPNFEERLIKVLPLIIERAETINDIISSINWLNSEDYTVIFKEKNNFENEEIEFLKLFIKSFSNCKIESKSEMENHFNKWLSQENIK

SEQ ID NO: 187104 - protein, 256 aa, Unknown
  Bacterial polypetide isolated from the Sargasso Sea
MILGEKQKKSGLPPKHDNRHRNLTRKEIKEFISQGKSSVIRFKIDEETEIKWEDQIRGEIKWQGKDLGGDLVLSRRALGYEIGNPLYNLAVVVDDNFMNITHVVRGEDHISNTAKQILIYKALNFKLPIFAHTPLILNSEGKKLSKRDSVTSIDEFKEMGYLPEALANYMAFLGWSIKSPESEILSLSEISKVFNLSDVNKAGAKFNWEKLNWINSQYIKKMELTQLCKFIKKYWEEMGWESPSSEWDLKLTNLIQ

SEQ ID NO: 187105 - protein, 271 aa, Unknown
  Bacterial polypetide isolated from the Sargasso Sea
GEEYIQSNKIQDHIKIVNKLLAKGHAYKCFCSSEEIEEQKKRAKQKKIPYIYNRKWRDKNEADAPKNIKPVIRFKSKIDGTSKLNDLVQGNVEIDNSTIEDFVILRKDGTPTYNLSASVDDHQMEMTHIIRGDDHKINTFKQIQIYEAMGWSLPLFAHIPLIHTIEGKKLSKRDNASTLDDYSKIGIMPDALRNYLLRLGWSYKDKEIFDLDESIKYFNLEGIGKSPSKLDVSRIMSMNEHYIKNIDENNLYEQLNIYCSQNKEPISDKQK

SEQ ID NO: 187106 - protein, 212 aa, Unknown
  Bacterial polypetide isolated from the Sargasso Sea
MTIKTRFAPSPTGSLHIGGVRTALYSWLHARHNNGSFVLRIEDTDLERSTDEATDIILKCMDWLGLDYDEGPYYQTQRSKRYQDVIEELLETDNAYYCYCTKDEVENMRKEAMKRGEKPKYNGYWRNKKRIPKSTEKPVVRFKNPLDGEVVLDDLVQGKVVFNNEELDDLIIARADGSATYNLSVIVDDMDMKITDVIRGEDHLNNTPRQIN

SEQ ID NO: 187107 - protein, 298 aa, Unknown
  Bacterial polypetide isolated from the Sargasso Sea
MIITRFAPSPTGTLHIGGVRTALFNYLHAKQNDGRFLIRIEDTDQDRSKLEYEENILNGLAKLGMIPDEIPIRQSERHQIYKDAAQKLIDSGHAYWCDCSKEMLDEMRKEQEAAGKKPMYDGRSRSLGLKQSENTVLRLATPEEGEITVNDLIRGEVRFQNSELDDLILLRSDGTPTYHLCNVVDDFEQNVTTVIRGEDHLSNTPRQMHIQQALGYNLLEYAHLPLVLGENKKRLSKRDAVTSLDDYLNLGYLPTSMINVLARLGWSKGDSEIFYMKDLLKDFRIQEVQKAAAIFNKT

SEQ ID NO: 187108 - protein, 278 aa, Unknown
  Bacterial polypetide isolated from the Sargasso Sea
DFIILRKDGTPTYQLSAVVDDHLMNITHVIRGDDHKINTFKQKQIYEAMNWKLPEFAHIPLIHSESGSKLSKRDKASTIDDYIKLGILSDALRNYLLRLGWAHKDKEIFNLDESIKFFNLEGVGKSPSKLDMSRILSINEHYIKNIDEKELFNLFKEYCKKFKKEIDTFKEKKLLDSINFLKNKAKTLEDIYLNAQYILSDTIKISTDDLKLLDANSKNILRDFLKEFENLSNINKKNLEKIINNLIKNNKTNFKGIGQPLRVALVGSKFGPGIYNII

SEQ ID NO: 187109 - protein, 241 aa, Unknown
  Bacterial polypetide isolated from the Sargasso Sea
MVKTRFAPSPSGYLHIGGVRTALYAWLYARNQGGKFLLRIEDTDIERSSEESKLSILEGMKWLGLEHDEEIIHQSERFEVYRARADELISAGKAYESEGAIRFKSDRSSNVIISDHVFGDVEVNADELDDFIIMRSNGAPTYHFAVVIDDFESGITHVMRGDDHLKNTARHIQLMKAFDYPIPDFVHLPMILGPDGSRLSKRHGAMNVLHYKEEGFSSEALLNYLVRLGWSKGDQEIFSIQ

SEQ ID NO: 187110 - protein, 270 aa, Unknown
  Bacterial polypetide isolated from the Sargasso Sea
DKERSKDIYSRDIFESMSWLGLRWDEEIIYQSKNKSYHVSLAEKLLSENKAYRCYCTKEEIEEARLKAKKDKKSYKYNRKWRDFEGRLDKPFVIRIKIPLTQSTVLNDKILGKITINNNELDDFIILRSDKTPTYMLSVVADDKSMGITDVIRGDDHLTNTFKQLILFDLFNWEKPNYSHIPLIHSQDGSKLSKRHGDLSVKQYKNNMLLPDALLNYLLRLGWGYGDKEFFSKKEAVQFFNLEGVGKSPAKFDPKKLDNINSYYFKKVIF

SEQ ID NO: 187111 - protein, 210 aa, Unknown
  Bacterial polypetide isolated from the Sargasso Sea
MVRVRLAPSPTGTLHIGTARTAVFNWLFAHRHGGQFLLRIEDTDKERSKPEFTENILEGLQWLGLSWDEEPIHQSARVEHHRQAIQQLLDAGLAYRCFASEDELTAMRETQMASKQAPRYDNRHRHLNAEKQAAFMAEGRMATVRFRIDDQRNIEWKDLVRGPMRWAGADLGGDMVIARRAPADQIGDPLYNLVVVCDDAAMGITHVIRG

SEQ ID NO: 187112 - protein, 244 aa, Unknown
  Bacterial polypetide isolated from the Sargasso Sea
MVRVRLAPSPTGTLHIGTARTAVFNWLFARNQKGSFLLRIEDTDKERSKPEFTQNILEGLQWLGIDWDEEPVIQSERVEQHRDAIRILLEQGLAYRCYASEQELEAMREAQKAANQAPRYDNRHRHLTPEQEEAFQLEGREAVIRFRIDDSEEIRWTDLVRGPMSWRGSDLGGDMVIARRAAADQIGDPLYNLVVVVDDAAMAITHVIRGEDHIANTAKQLLLYQALGLAVPAFAHAPLILNAE

SEQ ID NO: 187113 - protein, 295 aa, Unknown
  Bacterial polypetide isolated from the Sargasso Sea
VYNRKWRDISEDQAPRDIKPVIRFKSKIEGTSLLKDLVQGNVEIENNTIEDFVILRNDETPTYNLSTSVDDHNMEMTHIIRGDDHKINTFKQIQIYEALGWDIPQFAHIPLIHTIDGKKLSKRDNASTLEDYSKIGILPESLRNYLLRLGWSYKDKEIFSLDESIKLFNLEGIGKSPSKLDMSRILSMNEYYIKNSEENILFKKLKEYCEMYKDRIKEDKENTIKSSLTFLKNKAKTLEDIFNNSKYILNDKVIFNDNDKELINDEAKKIIHLFKEKISELEVFDRENLEQIINA

SEQ ID NO: 187114 - protein, 285 aa, Unknown
  Bacterial polypetide isolated from the Sargasso Sea
PTYNLSASVDDHQMNMTHIIRGDDHKINTFKQIQIYQAMKWKLPFFAHIPLIHTIEGKKLSKRDKASTLDDYSKIGIMPDALRNYLLRLGWSYKDKEIFTLDESIKYFNLEGIGKSPSKLDMSRILSMNEHYIKNIDENDLFNQLTNYCKLYKSEIKSDKKDKIKKSLTFLKNKAKTLEDIFNNGQYILLDNVNFNQDDIKLIDDKAIKVISDFNAKFKKIDLPSREILEPIVNGLIKTHDTNFKGVGQPLRIALTGSKFGPGIYDIILSLGKEEVQKRLSAKIA

SEQ ID NO: 187115 - protein, 307 aa, Unknown
  Bacterial polypetide isolated from the Sargasso Sea
KIFLRIEDTDKERSKDEFNFKYINSLKWLSIDYDGNEYIQSKNISKHVSVAEELIKKGFAYECYCSEDEINEQKEKCKKQGIPYVYNRKWRDSKDLKIPKDVKPVIRFKSKISGNTTIGDLVQGERNISNSTIEDFVILRKDKSPTYQLSATVDDHDMKITHVIRGDDHMINSFKQKQIYDAMEWEVPKFAHIPLIHSEKGKKLSKRDHASTINDYIKIGIIPEALRNYLLRLGWSYKDKEIFSLKESIELFNFEGIGKSPSKLDMSRILSMNETYIKSMNEKELFDKLLEFSNKFKTNIDKSKESI

SEQ ID NO: 187116 - protein, 140 aa, Unknown
  Bacterial polypetide isolated from the Sargasso Sea
MKPRVRFAPSPTGFLHVGSARTALFNWLYARSTGGTFILRVEDTDQERNRPELTQQLLQELDWLGLDWDEGPIYQSEKLERHREVVQAFLENGHAYLCDSENKEVQGTSLVEGMAVRFRMPQDKTISFTDLVRGEVTFNT

SEQ ID NO: 187117 - protein, 275 aa, Unknown
  Bacterial polypetide isolated from the Sargasso Sea
MSATVDDHQMGMTHIIRGDDHKINTFKQMQIYLAMSWDLPQFAHIPLIHTIEGKKLSKRDNASTLDDYSKIGIIPDALRNYLLRLGWSYQDKEIFTLNESIKLFNLEGVGKSPSKLDMSRILSMNEHYIKTIDEKDLYINLEKYCGIFKEKINPEKGEKIKSSLSFLKNKAKTLEDIFNNSKYIITDDVQFNEDDLKLIDDKSKKIINEFQNQIKSLEILTRDNLEPIVNNLIKNYETNFKGVGQPLRVALTGSKFGPGIYDIVVSLGKSDVEKD

SEQ ID NO: 187118 - protein, 241 aa, Unknown
  Bacterial polypetide isolated from the Sargasso Sea
MTKVTRFAPSPTGSLHIGGVRTALFNYVYAKQNKGKFLIRVEDTDAERSKKEFEENILKGLSDLGINPDEPPVRQSERSELYKLAAEKIFDSGKAYWCDCSIETLDKMRKEQEAAGKKPMYDGRSRNLGLERTNNSVLRLKTPQDGEIVFNDLVRGEVTFQNSELDDLILLRSDGSPTYHLCNVVDDFNQGVTTVVRGEDHLSNTPRQIHIQNALGYDSLEYAHLPMVLGQDKKDYLKGMQ

SEQ ID NO: 187119 - protein, 314 aa, Unknown
  Bacterial polypetide isolated from the Sargasso Sea
KGFAYKCYCSEEEINEQKEKCKKQGIPYVYNRKWRDAKDLKIPDGVKPIIRFKSKISGNTIIKDLVQGDRNISNSTIEDFVILRKDNTPTYQLSATVDDHEMKITHVIRGDDHMINSFKQRQIYEAMGWEVPNFAHIPLIHSEKGKKLSKRDNASTLEDYVKIGIISDALRNYLLRLGWSYKDKEIFTKQESIDLFDLSGVGKSPSKLDMNRIYSINETYIKTMDEKDLFNFFKEYVSKYKKPIDQAKENILIKSIGFLKNKAKTLEDIWNNAQYIINDKIEIGTDDKKLINDLSKKVINDFISEYEKLSSYLG

SEQ ID NO: 187120 - protein, 79 aa, Unknown
  Bacterial polypetide isolated from the Sargasso Sea
MSVVTRFAPSPTGYLHVGGARTALYSWLLAKSKGGEFVLRIEDTDIERSTEEAKQAILDGMLWLGLTWNTGPIYQTERF

SEQ ID NO: 187121 - protein, 296 aa, Unknown
  Bacterial polypetide isolated from the Sargasso Sea
PYRQSERADIYSKHIEMLLNKGKAFRCFCTPERLDQLRKDQLKEKTQVGYDGHCLNLSEEEVAARIEQGDDFVVRMKVPDTGDCVFTDLLRGEVRISWSQVDMQVLMKSDGLPTYHFANVVDDHLMSISHVIRGEEWINSMPKHVLLYDYFGWELPVFCHMPLLRNPDKSKLSKRKNPTSIGYYKSLGYVPQAVLNYLGMMGWTMPSGEEKFSIEDMTNNFDINRVSLGGPIFDLEKLNWLNGKYIREEMSDDEFVNQFTEWAFAAEDLKSLIPLVRERVDKFSDVASLCSFFLSS

SEQ ID NO: 187122 - protein, 94 aa, Unknown
  Bacterial polypetide isolated from the Sargasso Sea
MKDNSIKVRFAPSPTGELHLGGARTALFNWLYSQKLNGSFFLRIEDTDKERSSDIYTNQIIESLKWLGLKWDEPIIYPSGRADRYKYYLKKTAR

SEQ ID NO: 187123 - protein, 113 aa, Unknown
  Bacterial polypetide isolated from the Sargasso Sea
MKKKEVVTRFAPSPTGALHIGGLRTALFNYVFSKQNNGLFLVRIEDTDRERSSKEYEKNILNTLTSIGLSPDKEPINQSDRNDIYIKAAKKIFESGNAYWCDCSPESLDEMRK

SEQ ID NO: 187124 - protein, 264 aa, Unknown
  Bacterial polypetide isolated from the Sargasso Sea
MKKVATRFAPSPTGPLHIGGVRTALFNWLFSKNQNGSFYLRIEDTDKERSKDEYKDQIVKSLIWIGIENDGDEYIQSTKILNHIKIAKQLLDKGLAYKCYCSNEEIEEQKKRAKQKKIPYIYDRKWRDKNESDAPQDVKPTIRFKSKIEGTSVLKDLVQGNVEIQNNTIEDFIILRNDGSPTYNLSASVDDHDMNITHIIRGDDHKINTFKQMQIYQAMNWEVPTFAHIPLIHTSEGKKLSKRDKASTLDDYSKIGILPEALRN

SEQ ID NO: 187125 - protein, 244 aa, Unknown
  Bacterial polypetide isolated from the Sargasso Sea
TQRYVPGSEEYIMEALEWIGMVPDESPKHGGPYAPYRQSERRDIYDRYTEQILKTDYAYLAFDTPEELDQIRAEFEARGDVFAYNYETRNRLRNSISLPQEEVKKLLEEKTPYVIRFKMPLDRIINLNDIIRGKFSVNTNTLDDKVLVKNDGMPTYHFANIIDDHEMKITHVIRGEEWLPSMALHVLLYEAMGWDAPEFAHLSLILKPEGKGKLSKRDGDKFGFPVFPLNFTDPATGNTSAGYR

SEQ ID NO: 187126 - protein, 120 aa, Unknown
  Bacterial polypetide isolated from the Sargasso Sea
MKKVATRFAPSPTGPLHIGGVRTALFNWLYSKNKSGSFYLRIEDTDKERSKDKYKEQIIKSLKWIGVENDGDEYIQSKKINDHIKIANELLKNGSAYKCYCSSEEIEEQKKRAKQKKIPY

SEQ ID NO: 187127 - protein, 110 aa, Unknown
  Bacterial polypetide isolated from the Sargasso Sea
MKKVATRFAPSPTGPLHIGGVRTALFNWLYSKNQKGNFCLRIEDTDKERSKDEYKDQIVKSLKWIGINYDGEEYIQSKKIEDHIKVANELLKNGHAYKCYCSSEEIEEQK

SEQ ID NO: 187128 - protein, 312 aa, Unknown
  Bacterial polypetide isolated from the Sargasso Sea
DEYTAEIIESFKWLGVNFENEVIYQSNNADRYKEIIDQLLDQGSAYICKGEDLETDKKYRDQNLPRDNKTVVRFKMPEEGNTVYTDIVKGQIEVANEQLDDFIIERSDGSATYNLCVVVDDLDSDISHVIRGDDHVNNTFKQINVFKALNKNVPTYGHVPMILGEDGKRLSKRHGALGIREYAGLGILPEALKNYLLRLGWSMGDDEIFNGEDMKKNFQLGILNKSPATFSIDKLLWFNKYYLDQMSLDQLMKVVPPKDFDGSEYSKTVLETIRDRCSTLNEFSTNADYFFKDPEDYEQSLLLKHCKENTFD

SEQ ID NO: 187129 - protein, 253 aa, Unknown
  Bacterial polypetide isolated from the Sargasso Sea
CFPCFCSAERFDEVRAQQMATKETPRYDGHCMRLEPAEAQRRIAAGESHVVRMKVPSEGVCVVPDMLRGNVEIPWDRMDMQVLMKADGLPTYFLANVVDDHLMGITHVLRGEEWLPSAPKLIKLYEYFGWEQPALCYMPLLRNPDKSKLSKRKNPTSITFYERMGYLPQAMLNYLGRMGWSMPDEREKFSLVEMIEHFDINRVSLGGPIFDLEKLSWLNGQWLRELPVETFAAEVQKWALNPDYLMKIAPHVQ

SEQ ID NO: 187130 - protein, 192 aa, Unknown
  Bacterial polypetide isolated from the Sargasso Sea
MSKVATRFAPSPTGPLHIGGVRTALFNWLFAKNMGGNFLLRIEDTDKERSKKEYQNQIIQSLKWIGINYDSDEYIQSTKIKGHVKIVEELLKKGNAYKCYCSNEEIEEQKKRAKQKKIPYIYDRKWRDKNENEAPKNIKPVIRFKSKIDGKSKLKDLVQGDVEIDNNTIEDFVILRNDGTPTYNLSVTVDDP

SEQ ID NO: 187131 - protein, 71 aa, Unknown
  Bacterial polypetide isolated from the Sargasso Sea
MTNNEVRVRFAPSPTGNLHIGGVRTAIFNWLFAKANSGKFILRIEDTDQNRYDENSEKSILSSLEWLNLDW

SEQ ID NO: 187132 - protein, 279 aa, Unknown
  Bacterial polypetide isolated from the Sargasso Sea
QGSSSIKDLVQGEMNVSNLTIEDFVILRKDKTPTYQLSATVDDHEMNITHVIRGDDHKINTFKQKQIYDAMGWNVPEFAHIPLIHSETGKKLSKRDKASTIDDYIKIGILSDALRNYLLRLGWAHKDKEIFTLDESIKLFDLKGVGRSPSKLDMSRILSINEHYIKHIDEKELFKLLKIYCQKFKRNIDSSKESILFKSMNFLKNKAKTLEDIYQNAQYILQDNIKVSHEDAKLLDASSKKIIKDFLDEFKKLSKTNKEDLEKVVNYLISKHKTNFKGV

SEQ ID NO: 187133 - protein, 207 aa, Unknown
  Bacterial polypetide isolated from the Sargasso Sea
MSKVATRFAPSPTGPLHIGGVRTALFNWLYSKNQNGNFFLRIEDTDKERSKEEYRKQIINSLEWIGINFDGEEYVQSKKIDDHIKVVHELLKNGNAYKCYCSSEEIEEQKKRAKQKKIPYIYDRKWRDKKETDAPKNIKPVIRFKSKIDGTSILKDLVQGDVEIENNTIEDFVILRNDGTPTYNLSAAVDDHQMNMSHIIRGDDHKI

SEQ ID NO: 187134 - protein, 215 aa, Unknown
  Bacterial polypetide isolated from the Sargasso Sea
MNVKVRFAPSPTGSLHLGAVRTAIFNYLFAKKNNGKILIRIEDTDKERSSSESIDEILESLHWLGLDWDEGPVKQSDRLEIYRAAADKLIEEGLAYRCYMTQDEAKLLKEKAKAENKIYKYPNTWREKKEDPKGRDFVIRFKTPYESKINFNDTLRGNISVDSNTLDDFIIIKSDGFPTYNFASALDDAQMGITNVIRGEDHLSNTPKQVLIFNS

SEQ ID NO: 187135 - protein, 292 aa, Unknown
  Bacterial polypetide isolated from the Sargasso Sea
NQLIKEGKAYESEGAIRLKSDRTSNIVIKDRVFGDVEVNKDELDDFIIMRSNGAPTYHLAVVIDDHESGITHVMRGDDHLKNTARHIQLMNAFNYPIPQFVHLPMILGSDGSRLSKRHGAMNVLHYRDEGFSSEALLNYLVRLGWSKGDQEIFSIQEMTDGFDLSGINKASAKFDIEKLRWVNQQHLLNTDDSELKMMLEAGSATAKGLNDEVITNFINAYKNRASTINDLISSCDSLFSDEIKYDQAIADKFLKKEILFALKDVVDALQGSRWNQESISEALKSVCEKHQI

SEQ ID NO: 187136 - protein, 271 aa, Unknown
  Bacterial polypetide isolated from the Sargasso Sea
MQISHVFRGEEHLSNTLRQILILNALKMPVPEYGHLSIILGQDKKKLSKRDGAVSVDDYRQQGYLPEAMINYLSLLGWTPEHEISRLDQLCAAFDGQKLHAAAPIFDPVKLHWVNGQWVQAMSDDVFWSQLLNYMDPVYLKRLPEDPDWRQRCINWLKPLAHPLKDMNAQLAQVMETPVWPDEEPLTEREQHIFQAWFHGLESYSVTFLDPEQVKKQLKEVGERVNLKGKALFLPMRLVMTGQKQGGDLTTLLSLIPIERQKAYLTQRLSS

SEQ ID NO: 187137 - protein, 262 aa, Unknown
  Bacterial polypetide isolated from the Sargasso Sea
PYVYNRKWRDISEDKAPKDIKPVIRFKSKIEGTSILKDLVQGNVEIENNAIEDFVILRNDETPTYNLSASVDDHNMEMTHIIRGDDHKINTFKQIQIYEALGWDIPQFAHIPLIHTIDGKKLSKRDNASTLEDYSKIGILPESLRNYLLRLGWSYKDKEIFDLNESIKLFNLEGIGKSPSKLDMNRILSMNEYYIKNSEEDILYKKLKEYCEMYKDKIKEEKENTIKRSLIFLKNKAKTLEDIFNNSKYILNDKVIFNNNDK

SEQ ID NO: 187138 - protein, 257 aa, Unknown
  Bacterial polypetide isolated from the Sargasso Sea
MVRLRFAPSFTGFLHIGGLRTALFSWLFARRKQGSFIFRLEDTDRNRLVEAAESNLLKMLEWAGLDIDEGPGIGGEFGPYRQSERLEIYRDHVDRLLGQGDAYPCFCSEERLEKLKTFQRSEGLTPRYDNHCRKLQKKEVGTKIQSGEKHVIRMKIPENQETFSLNDLVRGTVAIESTQVEDQVILKSDGFPTYHLAVVVDDHLMQISHVVRGEEWLPSFPKHLLLYRYFGWEPPEFLHLPLILNEERAKLSKRHGA

SEQ ID NO: 187139 - protein, 216 aa, Unknown
  Bacterial polypetide isolated from the Sargasso Sea
MLRTRFAPSPTGNLHLGGARTALINYIVSKKSASSKFYLRIEDTDHERSKQEYTDNITNSLKWLGLNWDEDIQVQSKRLSRHQEVAKELLQKKRAFKCVCSEEKIANRRKIIRENKNYSKKICNECKNNNDIQSRDENFVVRLDVPDEGNLKINDTIQGDVSVANLELDDFILLRKDQSPTYMLSVVVDDHDLGINYIIRGDDHFINTYRQYYIYK

SEQ ID NO: 187140 - protein, 293 aa, Unknown
  Bacterial polypetide isolated from the Sargasso Sea
RLKAPHDGETVIQDLVQGEVRVENAELDDMVLLRSDGTPTYMLAVVVDDHDMGVTHVIRGDDHLTNAFRQTQLFQALNWDTPAFAHIPLIHGQDGAKMSKRHGALGVDAYRDQGFLSESICNYLLRLGWSHGDDEIISKEQAIEWFNLNSVGKSPARFDLDKLTALNGQYIRDTAPEQLMRLILPNLKDHLGHDPSKIAVERLIQGLPSLRERAKTLLELVESSLFYALNRPISINDKARKLIDVDGCRCLESVKDGFAALNDWTEETLELWVREFSERTGTKLGKVAQPIRA

SEQ ID NO: 187141 - protein, 301 aa, Unknown
  Bacterial polypetide isolated from the Sargasso Sea
GGVRTALFNWLFSKNQKGTFHLRIEDTDKERSKDEHKVQIIKSLKWIGIEHDGEEYIQSKKIEDHIKIANELLKNGNAYKCYCSAEEIEEQKKRARQKKMPYIYNRKWRDVDENEAPKDVKPVIRFKSKIEGNSILKDLVQGDVEIENSTIEDFVILRNDGTPTYNLSATVDDYQMRMTHIIRGDDHKINTFKQIQIYKAMNWKVPEFAHIPLIHTIEGKKLSKRDNASTLDDYSKIGIMPDALRNYLLRLGWSYQDKEIFNLEESIEHFNLEGIGKSPSKLDMSRILSMNEHYIKTINEN

SEQ ID NO: 187142 - protein, 109 aa, Unknown
  Bacterial polypetide isolated from the Sargasso Sea
MSKVATRFAPSPTGALHIGGVRTALFNWLYSRNQKGTFHLRIEDTDKERSKEEHKIQIIKSLNWLGINHDGEEYIQSNKIDDHIKIANELLKKGFAYKCYCSPEEIEEQ

SEQ ID NO: 187143 - protein, 310 aa, Unknown
  Bacterial polypetide isolated from the Sargasso Sea
SDLVQGEIEIENHTIEDFIILRRDGTPTYNCSAAVDDHIMDMTHIIRGDDHKINTFKQIQIYEALQWEKPLFAHIPLIHTLEGKKLSKRDNASTIDDYEKIGIMPDALRNYLMRLGWSYKDKEIFSLEESIKYFNLEGIGKSPSKLDMSRILSMNEYYIKNKSNDDLFQSFEEYCKNFKENINNEKLNIIKKSLTFLKNKAKTLEDIYNNSKFIINDEIIIEKAEMSLLTENAKNIIKSFMKKVNEIEVFNKETLEPIINNLISENQTNFKGVGQPLRIILTGSKFGPGIYDIIISLGKKRVLDRLSKVG

SEQ ID NO: 187144 - protein, 304 aa, Unknown
  Bacterial polypetide isolated from the Sargasso Sea
MPTITRFAPSPTGSLLLGGARTALFNFIYAKSVNGLFKIRIEDTDKSRNINDSINNITSNLEWLGIRSDDQVYYQSKNVKKHIEIANDLVNKGFAYKCYHTENELEELKKKHNRKIRSSWREKDKILKGNNKYCIRIKAPLNGKTSIVDKIQGKVEINNEELDDYVILRKDLTPTFLLSSAIDDFLMNITDIIRGDDHLTNSLRQKIIFDFLNYSPSFAHMSLIHNERNEKLSKRDNSQSIEDYKTKGFFPESIINYLLRMGWSYGDKEIFSIKEAIKFFKIENLGKSPSKIDEKKLFYLNNYY

SEQ ID NO: 187145 - protein, 107 aa, Unknown
  Bacterial polypetide isolated from the Sargasso Sea
MLKVATRFAPSPTGPLHIGGVRTALFNWLFSKNQSGNFYLRIEDTDKERSKDEYKEQIIKSLKWIGIDYNEDEYIQSKKIENHINIAKELLKNGYAYKCYCSNEEIE

SEQ ID NO: 187146 - protein, 165 aa, Unknown
  Bacterial polypetide isolated from the Sargasso Sea
MSKVATRFAPSPTGPLHIGGVRTALFNWLFAKSKGGKFLLRIEDTDKERSKKKYQDQIVQSLKWIGINYDSSEYIQSTKISTHVKVAEELLNKGYAYKCYCSNDEIEEQKKRAKQKKIPYIYNRKWRDKNENEAPKNIKPVIRFKSKIDGKSKLKDLVQGDVEID

SEQ ID NO: 187147 - protein, 280 aa, Unknown
  Bacterial polypetide isolated from the Sargasso Sea
NLDDKIIYKSDGMPTYHLANIVDDHLMKITHVVRGEEWLPSLALHFKIYEAFGWKKPFFAHLPLILKPSGQGKLSKRDGQKFGIPVYPIEWNDSKEKIKYLGFKEMGFEPEAILNFICMIGWNPGDEKEVFSLKELETIFSLDKINKSGAKFDFEKAKWFNHEHVKKISDESTLKFMNENIDKNFLKIVSKKSKSKKLIELIKERVTFKKELIKEARNILDPNHQDLDQNFIKKKWNEKIYNSIIEIIKLIKNSKNISIKEIKKSYLDILNKNEIKIGDG

SEQ ID NO: 187148 - protein, 254 aa, Unknown
  Bacterial polypetide isolated from the Sargasso Sea
MSKVATRFAPSPTGPLHIGGVRTALFNWLYSKNKNGSFSLRIEDTDKERSKDEYKKQIIKSLKWIGVEHDGDEYIQSKKLDDHIKVANELLKNGHAYKCYCSKDEIEEQKLRAKQKKIPYIYDRKWRDKKEEEAPKDIKPVIRFKSKINGTSILKDLVQGDVEIDNNTIEDFIILRNDGSPTYNLSASVDDHIMKMTHIIRGDDHKINTFKQIQIYQSMGWELPLFAHIPLIHTIDGKKLSKRDKASTLDDYSQ

SEQ ID NO: 187149 - protein, 233 aa, Unknown
  Bacterial polypetide isolated from the Sargasso Sea
MNVKVRFAPSPTGSLHLGAVRTAIFNYLFAKKNNGKILVRIEDTDKERSSSESLDEILESLHWLGLDWDEGPIKQSDRLEIYRAAAEKLIEEDLAYRCYMTQDEAKLLKDKAKAENKIYKYPNTWREKKEDPKGRDFVVRFKTPYKSKINFNDTLRGNISVDSNTLDDFIIIKSDGFPTYNFASALDDAQMGITNVIRGEDHLSNTPKQVLIFNSLKKNLPNFTHVSMIWVKI

SEQ ID NO: 187150 - protein, 228 aa, Unknown
  Bacterial polypetide isolated from the Sargasso Sea
IPLNGNIFFKDLVYEDINTDCSELDDFIIARSDGTPTYNFTVVVDDHDMQVSHVIRGEDHISNTPKQILIYNALKWDAPEFAHLPMILGSDGNRLSKRHGAVGTQTYRELGYLPDTLINYLSLLGWNPGTEEEVFNFQFLLDNFSLEKVNKKAAVFDNKKLDWLSGQHIMQKESEYLLDLIRSIKPEWGSSISSEKYLISIISHLKERSKTLLDIISQSEYFFNDPGK

SEQ ID NO: 187151 - protein, 183 aa, Unknown
  Bacterial polypetide isolated from the Sargasso Sea
MKKVATRFAPSPTGALHIGGVRTALFNWLYSKNQKGDFYLRIEDTDKERSKDEYKNQIIKSLKWIGINYDGEEYIQSKKIEDHIKIANELLKKGHAYKCYCSSEEIEEQKKRARQKKIPYIYDRKWRDKKETDAPKDIKPVIRFKSKIDGTSVLKDLVQGDVEIDNDTIEDFIILRNDGTPTY

SEQ ID NO: 187152 - protein, 264 aa, Unknown
  Bacterial polypetide isolated from the Sargasso Sea
MNSIITRFAPSPTGSLHIGSIRTALINYIIIQQSKKQFPNSKFYLRIEDTDQKRSKEEYVENIIKGLEWLGINFDDKPFIQSKKLKRHRDIAFEMLSKNKAFKCICSPIKLEKIRNSNLKNKLNFKKLCNSCEKDRDIQESAKDFTVRIKIPDEGYTNIEDIIQGEVKVQNNQLDDFILLRKDGTPTYMLSVVVDDYDMGVNLIIRGDDHLNNAFRQNFIYRNMQWEIPNYAHLPLIHGEDGKKLSKRHGAVDVNEFKEKRLFK

SEQ ID NO: 187153 - protein, 205 aa, Unknown
  Bacterial polypetide isolated from the Sargasso Sea
MSKIATRFAPSPTGPLHIGGVRTALFNWLFTKKQGGTFLLRIEDTDKERSKDEYKDQIIKSLKWIGIDYDGNEYIQSSQIDNHIKVANELLKNGHAYKCYCSNEEIEEQKKRAKQKKIPYIYNRKWRDKEEADAPKNVKPVIRFKSKTEGSAVLKDLVQGDVQIENNTIEDFIILRNDGSPTYNLSAAVDDQQMMVTHIIRGDDH

SEQ ID NO: 187154 - protein, 273 aa, Unknown
  Bacterial polypetide isolated from the Sargasso Sea
EEQKKRARQKKIPYIYNRKWRDKKDTDAPKDIKPVIRFKSKIDGTSILKDLVQGDVEIDNNTIEDFIILRNDGTPTYNLSASVDDHQMNMTHIIRGDDHKINTFKQIQIYQAMKWELPAFAHIPLIHTIEGKKLSKRDKASTLDDYSKIGIMPDALRNYLLRLGWSYKDKEIFTLDESIKYFNLEGIGKSPSKLDMSRILSMNEHYIKNINENDLFVQLTEYCKLYKSEIKLDKKDKIKKSLNFLKNKAKTMEDIFNNSQYIMVDEVNFNEDD

SEQ ID NO: 187155 - protein, 304 aa, Unknown
  Bacterial polypetide isolated from the Sargasso Sea
APSPTGPLHIGGVRTALFNWLYSKNQKGNFYLRVEDTDKDRSKDEYKNQIIQSLKWIGINYDGDEYIQSKKIEDHIKVANELLKNGHAYKCYCSSEEIEDQKKRARQKKIPYIYDRKWRDKKETDAPKDIKPVIRFKSKIDGTSILKDLVQGDVEIDNNTIEDFIILRNDGTPTYNLSASVDDHQMNMTHIIRGDDHKINTFKQIQIYQAMKWEIPSFAHIPLIHTIEGKKLSKRDKASTLDDYSKIGIMPEALRNYLLRLGWSYKDKEIFTLDESIKHFNLDGIGKSPSKLDMSRILSMNEHY

SEQ ID NO: 187156 - protein, 104 aa, Unknown
  Bacterial polypetide isolated from the Sargasso Sea
MKTVATRFAPSPTGPLHIGGVRTALFNWLYSKNKGGKFYLRIEDTDKERSKDEFKNQIINSLKWIGIYYEDNEYIQSDKINDHINVANELLKKGLAYKCYCSNE

SEQ ID NO: 187157 - protein, 232 aa, Unknown
  Bacterial polypetide isolated from the Sargasso Sea
MNVITRFAPSPTGYLHIGGARTAIFNYLFAKKHFGKYLVRIEDTDKKRSSEEAIKAIHKGLNWLNINSEYEIVYQSQNFNTHIKVAYKLLEKGFAYKCFLNSDELKKLRIKSRENGFPIKSPWRNKKEKDKDKNKEFVIRLKMPSDGTTTIDDIVQGKVSIKNEILDDMVILRSDNTPTYMLSSVVDDNNMGITHIIRGDDHFNNAFRQIQIIKYLNWNIPYYAHIPLIHGT

SEQ ID NO: 187158 - protein, 284 aa, Unknown
  Bacterial polypetide isolated from the Sargasso Sea
DKVEELLNKDLAYYDKVEKNEKTRETDLALAYDNRLNKDGHVIRFRNQRENIISISDSVHGEIKFDPKVFFDVVILRSNGVPTYNLTSVVDDIDMEITHLIRGDDHLSNLPVQVNLFKSFEANVPIFCHLPMIHGTDGKRLSKRHGAVDINHFLKEGYRVDALINYLAKTGWSHGDKEIFSINELLELFGLDRVTKSAATFDIDKLNWLNQHYIKSDDIDNVAEQILPYLQDQNLPNKVSNDDYLKNILLLGIEREYSLKNIAKSITYFYQDENLIMNFNIITK

SEQ ID NO: 187159 - protein, 134 aa, Unknown
  Bacterial polypetide isolated from the Sargasso Sea
MTKVATRFAPSPTGPLHIGGIRTALFNWLYSKNQKGSFFLRIEDTDKKRSKEEYKNQIIQSLKWIGIQNDGNEYIQSKKIDDHIKVANELLKNGHAYKCYCSNEEIEEQKNRAKQKKIPYIYDRKWRDKSEADV

SEQ ID NO: 187160 - protein, 109 aa, Unknown
  Bacterial polypetide isolated from the Sargasso Sea
MSKVATRFAPSPTGPLHIGGIRTALFNWLFSKNQKGSFHLRIEDTDKERSKDEYKDQIIKSLNWIGIQYDDNEYIQSTKIKIHVDVVNELLKNGNAYKCYCSNEEIERT

SEQ ID NO: 187161 - protein, 303 aa, Unknown
  Bacterial polypetide isolated from the Sargasso Sea
MSSTSSRVRFAPAPSGYLHVGSARSALFNWLFAKKTNGVFVLRIEDTNAELAKPEFYDAITEPLKWLGLQWDEGPLYQSHRSEKYLKAIEDLLKKGFAYCCDCSQESIEARNEVNGFKGGYDGYCRNRGVQDGPNVSIRFKTPKNQFVKIRDSIRGEVTFDTNELEDFIIRRSNGTPVFLVANAVDDADMGITHVIRGEDLLNTTPKVMLMWEALDYGQPPEYAHLPLLVGEDKKKLSKRKHSVALGEFKTMGILPESMVNYLALLGWGPNDDKEIRPIEEIVTQFSLKDINKAPAYLIEKTP

SEQ ID NO: 187162 - protein, 240 aa, Unknown
  Bacterial polypetide isolated from the Sargasso Sea
MKEMVITRFAPSPTGNLHIGGCRTLLYNWLFAKKHNGKLILRIEDTDLKRSTDAALQNILEGIKWLGLNWDDEIAYQSANINRHREIALQLLEEGKAYKCYCTEEELVEMREEAIKKKKSSFYNNKWRDREPNEKDKNIKPVIRIKTPQGGITVINDSVQGAVRFENEDLDDFIILRSDESPTYLLASAVDDHDMGVTHIIRGDDHLNNAARQYHIFKAMNWKIPEYTHIPLIHSSDGAK

SEQ ID NO: 187163 - protein, 256 aa, Unknown
  Bacterial polypetide isolated from the Sargasso Sea
YRYFGWEPPEFIHLPLILNEERAKLSKRHGAVSVEEFSERGYLSQALLNFIALLGWNPGDDRELLSLEEMVDEFRFERVSKSGAVFDREKLNWMNQQYLLKLPEEDYFRMIDHVIRKGDYHNQDPRKIRQAAEILKTRLVTLSDLNQKLGLFFEENPEIKDLQAIEVLKEENSKTVLKEFLQQAENQDHFTSENLGQLMKSVQKVTGIKGRGLWMPLRCAITREVSGPELPAMLDFFGGEKCLHLIRQTLENTSLH

SEQ ID NO: 187164 - protein, 302 aa, Unknown
  Bacterial polypetide isolated from the Sargasso Sea
RFKNPLDGSVIVEDAVKGKVEFKNDELDDLIILRSDGTPTYNFTVVVDDIDMNISHVIRGDDHLNNTPRQINIYEALGAKPPTFAHIPMTLGEDGSKLSKRHGAMDIREYREKGYLPAALLNYMARLGWSHGDQEVFSVDEMISLFDIRDINKASSTFSSDKLLWLNHQHINKLNYDEIIPLLKYHMAVLEIDYESGPDLKEIIDVYSERSETVLDMAKSSIYCFQDIDDYDDKAVKKHLRPVILDPLNDIKSEFEKINNWKKENIDSAIEKIVNRYEINMGEIRTTFESCSNRFINVTIYQ

SEQ ID NO: 187165 - protein, 176 aa, Unknown
  Bacterial polypetide isolated from the Sargasso Sea
MSVPVKVRFAPSPTGYLHIGGVRTALFNWLFARNHGGKFILRIEDTDLSRSTEESIQEILESMHWLGLDWDEGPFRQTERQEIYSQKVEQLLSAGKAYFCYCTPEELDRKRSEAQKAGLKPKYDGTCRNLSDAPEGVPSVIRFKAPLEGSVIVEDLLRGKVVFDITELDDLIIQRT

SEQ ID NO: 187166 - protein, 223 aa, Unknown
  Bacterial polypetide isolated from the Sargasso Sea
MTTITRFAPSPTGLLHLGNIRTALINWLYAKNSGGKFILRIDDTDQERSKDEYISQIKYDLEWLGIDYDETFNQSSRFERYKEQFEKLKSDGRIYACYETPEELERKRKLQMAAGGKQVYDRSALKLTEQQIKKYENDGRKPHWRFLLQTERMKWNDLLKGEIDIDLTSLSDPVLFREDGVPLYTFSSAVDDVDYNITNVIRGDDHTSNTAVQIEIINALDKN

SEQ ID NO: 187167 - protein, 286 aa, Unknown
  Bacterial polypetide isolated from the Sargasso Sea
LAVVVDDNFMNITHVVRGEDHISNTAKQILIYKALNFNLPTFSHTPLILNSEGKKLSKRDCVTSIDEFRDMGYLPEALSNYMAFLGWSPKSADREILSLDEISEIFDLSDINKAGAKFSWDKLNWINAQYIKNMESTKLSEIMRKYWDDNGWEPPSQKWAYKLAILLRDSITLLKDAIDQSKPFFLIPPIQKEGQDFLENEDSKASLKLILNYLIEQNPITLNKEKAKEIINEISKMHNVKKGILMKSLRVAFFGSLSGPDLIQSWELFSESKTDISRIERCLKSI

SEQ ID NO: 187168 - protein, 162 aa, Unknown
  Bacterial polypetide isolated from the Sargasso Sea
YINSLAPEYVATHLQWLIEQENIDTRVGPQLSELVKLLGERCKTLKEMAQSCRYFYEDFAEFDADAAKKHLRPVARQPLEVVRDKLAAISEWTAENVHHAIQATADELEVGMGKVGMPLRVAVTGAGQSPALDVTVHAIGKSRSIERINKALAFIAERESQQ

SEQ ID NO: 187169 - protein, 291 aa, Unknown
  Bacterial polypetide isolated from the Sargasso Sea
DLVQGNVEIENNTIEDFVILRNDGTPTYNLSASVDDHQMNMTHIIRGDDHKINTFKQIQIYEAMKWELPSFAHIPLIHTIEGKKLSKRDQASTLDDYSKIGIMPDALRNYLLRLGWSYKDKEIFTLDESIKFFNLDGIGKSPSKLDMSRILSMNEHYIKNINENDLFNQLIEYCKLYKDEIESDKKDKIKKSLTFLKNKAKTLEDIFNNGQYIIKDEVNFNKDDVKLIDDKARKVISDFYAKFEKIDLPSREILEPIINELIKSHDTNFKGVGQPLRIALTGSKFGPGIYD

SEQ ID NO: 187170 - protein, 280 aa, Unknown
  Bacterial polypetide isolated from the Sargasso Sea
DDFIIERSDGSATYNFCVVVDDIDSEITHVIRGDDHVNNTFKQINVFKALNASIPEYGHVPMILGEDGKRLSKRHGALGVGEYAKLGVLPEALRNYLLRLGWSKGDDEIFDGQKMIIDFKKGTFNQSPATFSLEKLLWFNKYYIDQKTIDELNKLINSPQFDNGPFSNRVLEVIRDRCNSIEDFSTQSHYFFTDPEEFDEVLMNKHIKPETFHNLSLLLDKLRSIEEWTSNNIKEAIDNLVKELSIGFAKIGLPLRLALTATVNSPSIDVVCEVLEKDVT

SEQ ID NO: 187171 - protein, 290 aa, Unknown
  Bacterial polypetide isolated from the Sargasso Sea
YNVKTRMRLNNSFTVSEEERKKRVEEGRYVVRLAIPENKKISAFDEIRGELTFDSNELEDKVILKSDGMPTYHLANVVDDNDMKITSVVRGEEWLSSLPVHYLLYEFFGWKPPKFYHLPLILKTSGAGKLSKRDADEQGHPIFAVKWEDSNGFKEHGFIPEGLNNYLALLGWSNKEEKERYTMEELVESFSYEEINKSGARFDFKKALWINHLHLKDLESKRILDLSGQTKKLLVEKYSETEAIEIIELVKERLNTTKDIDKELSVFIKQPKEIDVSAIEKINREVIFSV

SEQ ID NO: 187172 - protein, 198 aa, Unknown
  Bacterial polypetide isolated from the Sargasso Sea
MIVTRFAPSPTGYLHLGHVYSLVYSYEYSKKHNGKFILRIEDIDFTRCKNHYKDQIIDDLNWLRIPFLRTKDQSLRRKQYTVALDYLKSKDLIYPCWLSRKEAKEALSAPQKEINNKQITLNKTEEKNRKKIGLTPAWRLNNKNCLKYLELSKKNFYWHDEKIGKIRMDIEQFGDLIIARKDISTSYHLSVTIDDNSD

SEQ ID NO: 187173 - protein, 73 aa, Unknown
  Bacterial polypetide isolated from the Sargasso Sea
MTSPSSTVVTRFAPSPTGYLHIGGARTALFNWLYAKRHAGRFLIRVEDTDRERSTDEAVKAIFDGLSWLELFA

SEQ ID NO: 187174 - protein, 169 aa, Unknown
  Bacterial polypetide isolated from the Sargasso Sea
MVRVRLAPSPTGTLHIGTARTAVFNWLFARRHSGEFVLRIEDTDKERSKSEFTSNILDGLQWLGIDWDAEPVIQSERVEHHRQAIQQLLDAGLAYRCYASEDELNAMREAQMASKQAPRYDNRHRNLSPEQVAAYQAEGRQATVRFRIDDSRSIQWKDLVRGAMSWSGA

SEQ ID NO: 187175 - protein, 217 aa, Unknown
  Bacterial polypetide isolated from the Sargasso Sea
MSVVTRFAPSPTGYLHVGGARTALYSWLLAKSKGGEFVLRIEDTDIERSTEEAKQAILDGMQWLGLTWDTGPIYQTERFDRYKELIQQLLDEGKAYKCFMSSEELDAIREAQKERGEKPRYPGTWRDRTDHPEGQPFVIRFKNPLEGKVVINDHVRGKIEISNTELDDLIIQRSDGTPTYNFCVVVDDWDMGITHVVRGEDHINNTPRQINILEALG

SEQ ID NO: 187176 - protein, 287 aa, Unknown
  Bacterial polypetide isolated from the Sargasso Sea
TPTYNLSASVDDHQMNMTHIIRGDDHKINTFKQIQIYQAMQWELPSFAHIPLIHTIEGKKLSKRDKASTLDDYSKIGIMPDALRNYLLRLGWSYKDKEIFTLDESIKHFNLEGIGKSPSKLDMSRILSMNEHYIKNIDENDLFNQLTEYCKLYKSEIKSDKKDKIKKSLTFLKNKAKTLEDIFNNGQYIMLDEVNFNQDDIKLIDDKAKKVISDFSAKLNNVDKLNKETLEPIVNELIKSNDTNFKGVGQPLRIALTGSKFGPGIYDIIISLGKEEVIKRLTNKKLG

SEQ ID NO: 187177 - protein, 275 aa, Unknown
  Bacterial polypetide isolated from the Sargasso Sea
KMPEQGSTSFTDLVKGEIQVSNDQLEDFIIERSDGSATYNFCVVVDDLDSKITHVIRGDDHVNNTFKQINVFKAFNEDVPTYGHVPMILGEDGKRLSKRHGALGVGEYSSQGILSEALKNYLLRLGWSKGDQEIFDHHEMEEAFIEGTLNQSPATFSMDKLLWFNKHYLDSKSEEQLTNAINKKEFDGGDYSNNVLLAIRDRCSTLNDFVIHSSYFFKDPEDYEDALINKHCKEGTHGYLSLLKSYLSELEKWDQISIKEVIEKTVSELDVGLEK

SEQ ID NO: 187178 - protein, 126 aa, Unknown
  Bacterial polypetide isolated from the Sargasso Sea
KDLVQGDRNISNSTIEDFVILRKDNTPTYQLSATVDDHEMKITHVIRGDDHMINSFKQRQIYEAMDWEVPNFAHIPLIHTEQGKKLSKRDNASTLEDYIKIGVISDALKNYLLRLGWSYKDKEIFT

SEQ ID NO: 187179 - protein, 149 aa, Unknown
  Bacterial polypetide isolated from the Sargasso Sea
MKPVVRFAPSPTGQLHIGGVRTALFNYLFALKNNGTFLLRIEDTDIERSKEVHTKQIIDSLKWLGLEYQGDPIKQSSRMKRYQEVIKYLLNTGNAYRCFSTIEELKKLRSESDKYLYPRIWRDRSEQEIDAKLQNKENYVIRIKIPLNG

SEQ ID NO: 187180 - protein, 282 aa, Unknown
  Bacterial polypetide isolated from the Sargasso Sea
EIENNTIEDFVILRKDGTPTYNLSASADDHQMKMTHIIRGDDHKINTFKQIQIYEAMNWDIPFFAHIPLIHTIEGKKLSKRDNSSTLDDYSKIGIMPNALRNYLLRLGWSYKDKEIFNLEESIKYFNLEGIGKSPSKLDISRIMSMNEHYIKNIDEKDLYENLRKYLNEYKEPINKKKEETIKKSLSFLKNKAKTLEDIYINSKFILTDNVTINNEDKKLVDDTSMKIIKNFLQNIKSIENFKKENLEKIVNDLIKSNNLNFKSVGQPLRICLTGSKLAQEY

SEQ ID NO: 187181 - protein, 261 aa, Unknown
  Bacterial polypetide isolated from the Sargasso Sea
TALFNWLFSKNNKGKFYLRIEDTDRERSKDEYKKQIIESLNWIGINHDDKEYIQSNKIKEHKEIAKELLKNGFAYECYCSEEEIKDQKEKCKKQGIAYIYNRKWRNPKDLEIPKNIKPVIRFKSKISGNSIVKDLVQGEINISNSIIEDFVILRQDGSPTYQLSAVVDDHLMKITHVIRGDDHKINTFKQKQIYEAMKWNIPEFAHIPLIHSEKGSKLSKRDKASTIDDYIKIGILSDALRNYLLRLGWAHKDKEIFNLDE

SEQ ID NO: 187182 - protein, 135 aa, Unknown
  Bacterial polypetide isolated from the Sargasso Sea
MKPRLRFAPSPTGQLHLGGARTALSNYLYAKKNGGQFLVRIEDTDLERSKKEHTDQICDSLQWLGLNWDEELVYQSKLGESYNNSLEDLLSSGKAYRCFASKEELEQIRKEAGSYHYSGLWRNKSDNDINIELEK

SEQ ID NO: 187183 - protein, 252 aa, Unknown
  Bacterial polypetide isolated from the Sargasso Sea
MKCRFAPSPTGKIHIGNARSAILNWIFCQKNQGEFVLRIDDTDANRSTKEFETSIKDDLTWLGLNWSYTFNQSSRKNIYNEKIKILKEKKRLYPCFETEEELALKKKSLLSSGKPPIYDRSSLNLSDEEVEKKIEAGIKPHWRFKLDHENISWKDIIKGDVSFDAKNLSDPVLIRADGTLLYHLPSVIDDIEEKITHIIRGEDHIANTAYHIQIFKALESSIPSFAHHPFLVDETGKGFSKRLGSLSIENFR

SEQ ID NO: 187184 - protein, 134 aa, Unknown
  Bacterial polypetide isolated from the Sargasso Sea
MPKVATRFAPSPTGPLHIGGVRTALFNWLYSKNQKGSFFLRIEDTDKERSKDEYKNQIIQSLKWIGIENDGNEYIQSKKIDDHIKVANELLKNGHAYKCYCSNEEIEEQKNRAKQKKVPYIYDKKWRDKSETDA

SEQ ID NO: 187185 - protein, 217 aa, Unknown
  Bacterial polypetide isolated from the Sargasso Sea
MKKVATRFAPSPTGPLHIGGVRTALFNWLYSKNKSGKFYLRIEDTDKERSKEEHKIQIINSLKWMGIKHDGEEYIQSKMIGEHVAIAKRLLENGNAYKCYCSTEEIEEQKKRAKQKKIPYVYNRKWRDIAEDQAPKDAKPVIRFKSKTEGTSVLKDLVQGNVEIDNNTIEDFVILRNDETPTYNLSASVDDHNMEMTHIIRGDDHKINTFKQIQIYE

SEQ ID NO: 187186 - protein, 301 aa, Unknown
  Bacterial polypetide isolated from the Sargasso Sea
PKNIKPVIRFKSKIDGSTILKDLVQGEVQIDNNTIEDFVILRNDGSPTYNLSASVDDHQMKVTHIIRGDDHKINTFKQMQIYLAMKWELPKFAHIPLIHTSEGKKLSKRDKASTLDDYSKIGIMPDALRNYLLRLGWSFKDKEIFTLEESIKHFNLEGIGKSPSKLDISRILSMNEHYIKNLNENDLFDNLKKYCENYKDRIDTKSEKIKKSLSFLKNKAKTLEDIYNNAQYLINDKIKISIEDQKLLDNLSKTILKDFLKEFENLSDISKENLEKIYNNLIKNNNTNFKGYRSPLRIALV

SEQ ID NO: 187187 - protein, 258 aa, Unknown
  Bacterial polypetide isolated from the Sargasso Sea
MSKVATRFAPSPTGALHIGGIRTALFNWLYSKNQNGTFHLRIEDTDKERSKDEYKVQIINSLKWIGIEYDGDEYIQSTKIDDHIKVANELLKNGNAYKCYCSSEEIEEQKKRARQKKLPYLYNRKWRDADEKDIPQDIKPVIRFKSKIEGKSILKDLVQGDVEIENNIIEDFIILRNDGTPTYNLSATVDDHQMGMTHIIRGDDHKINTFKQIQIYLAMGWELPNFAHIPLIHTIEGKKLSKRDNASTLDDYSKIGIY

SEQ ID NO: 187188 - protein, 197 aa, Unknown
  Bacterial polypetide isolated from the Sargasso Sea
MTTVTRFAPSPTGLLHLGNIRTALINWLYTRTNNGKFILRIDDTDLERSKDEYISQIKYDLDWLGIDFDETFNQSSRFDRYREQFEKLKADGRIYPCYETPEELERKRKLLIAAGGKQVYDRSAMELTDQQKKDYEAEGRKPHWRFLLKTERMKWDDLLKGEIDIDLTSLSDPVLFREDGVPLYTFSSAVDDIDYGI

SEQ ID NO: 187189 - protein, 299 aa, Unknown
  Bacterial polypetide isolated from the Sargasso Sea
MREEQMAEGLRPKYDGRGLNHTEDEIKANLAAGKPYVIRMKIPSEGTFKFNDYLRDEIEIPWENVDMQVLLKADGFPTYFLANVVDDHHMQISHIFRGEEWINSAPKLLKLYEDFGWEAPVLGHLPLLRNPDKSKLSKRKNPTSINYYKEMGYLPEAVLNYLGRMGWSMPDEREKFTLDEMIEHFDMKRVSLGGPVFDVDKLSWLNGTWIRENLTDEELVQRFVDWKFNGEMLAKVLPEAKTRINTLSDMVDLAGHFVGGIPTYDPALLTAGKADENVIRQALQFFVWQLKGLRSFDKP

SEQ ID NO: 187190 - protein, 256 aa, Unknown
  Bacterial polypetide isolated from the Sargasso Sea
MSKVATRFAPSPTGPLHIGGVRTALFNWLFAKNKGGNFLLRIEDTDKERSKKEYQTQIIESLKWIGINYDSNEYIQSTKISDHVKIVEDLLKKGKAYKCYCSNDEIEEQKKRAKQKKIPYIYDRKWRDKSEDEAPKNIKPVIRFKSKINGKSKLKDLVQGDVEIDNNTIEDFIILRNDGTPTYNLSVTVDDHDMNVTHIIRGDDHKINTFKQIQIYEAMNWDLPVFAHIPLIHTKEGKKLSKRDKDSTLDDYSKIG

SEQ ID NO: 187191 - protein, 261 aa, Unknown
  Bacterial polypetide isolated from the Sargasso Sea
MSKVATRFAPSPTGPLHIGGIRTALFNWLYSKNKNGSFFLRIEDTDKERSKDEYKKQIIKSLKWIGVEHDGDEYIQSKKLDNHIKVANELLKNGHAYKCYCSKDEIEEQKLRAKQKKIPYIYDRKWRDKKEEEAPKDIRPVIRFKSKIDGTSILKDLVQGDIEIDNNTIEDFIILRNDGSPTYNLSASVDDHIMKMTHIIRGDDHKINTFKQIQIYQSMGWELPLFAHIPLIHTIDGKKLSKRDKASTLDDYSQIGIMPEA

SEQ ID NO: 187192 - protein, 295 aa, Unknown
  Bacterial polypetide isolated from the Sargasso Sea
MHRKNHEKKGKTFIYNAHNRLKLVNSLSLDKKKVEKLLKTVPYVVRFKMPDNKMVVFEDEIRGKIEVSSRELDDKVLYKSDKMPTYHFANVVDDHMMKITHVIRGEEWLPSLPLHMLLYEAFGWEPPVFAHIPLILKPTGKGKLSKRDGEKFGHPVFPLEWRSGDEKHLGFKEFGVLPEALINYMALLGWSKEDNKEIYSLTDLLGSFEIKSVGKSGAKFDFEKLLWLNSQYIQKMSSEEIIKRFSSINSGKKFNLTKEAVDLIKPRIERLANIDTDFNYLFEAQEPELALEKNC

SEQ ID NO: 187193 - protein, 124 aa, Unknown
  Bacterial polypetide isolated from the Sargasso Sea
MSKVATRFAPSPTGPLHIGGVRTALFNWLFAKNKGGNFLLRIEDTDKERSKKEYQNQIIQSLKWIGINYDSDEYIQSTKINNHIKIVEELLKKGNAYRCYCSNEEIEEQKKGAKQKKIPYIYDR

SEQ ID NO: 187194 - protein, 291 aa, Unknown
  Bacterial polypetide isolated from the Sargasso Sea
GFCYLRNDETPTYNLSASVDDHNMKMTHIIRGDDHKINTFKQIQIYEALGWEIPQFAHIPLIHTIEGKKLSKRDNASTLEDYSKMGILPESLRNYLLRLGWSYKDKEIFSLDESIKLFNLEGIGKSPSKLDMSRILSMNEYYIKNSEEKMLYKKLKEYCEIYKDRIKEDKENTIKSSLTFLKNKAKTLEDIYNNSKYILNDKVIFNDTDKQLINDEAKKIIHLFKEKISELEFFDRENLEKIINAIIKLNNTNFKGIGQPLRIMLTGSKFGPGIYDIILSLGKNEVIKKIR

SEQ ID NO: 187195 - protein, 318 aa, Unknown
  Bacterial polypetide isolated from the Sargasso Sea
DKVLFKSDGMPTYHLANMFDDHQMKITHVIRGEEWLPSAPLHVILYKAFGWESPEFAHLPLLLRPDGNGKLSKRDGDRLGFPVFPLDWNTAEGELYSGYREKGYFADSFINMLAFLGWNPGTSQEIFSLNELVESFSLERVSKSGAKFDPDKTRWFQQQYLRSKSDKSLANLLRDQILENIDLDKLEVICSLMKERATFIGDISNEGSYLIHPPKIYDTAIINKKWKDNTTELMIGWRSELNNINTFTSAEIENSFKTYVAKMDAKIGAVLLPFRLLVTAVPMGPGMFDIASFLGKEEVLNRMDFGLESVQKIIHEAH

SEQ ID NO: 187196 - protein, 268 aa, Unknown
  Bacterial polypetide isolated from the Sargasso Sea
MSKVATRFAPSPTGPLHIGGVRTALFNWLFSKNQNGTFHLRIEDTDKERSKDEYKDQIIKSLKWIGIGYDGSEYIQSSKINDHVNIANELLKNGHAYKCYCSNEEIEEQKNRAKQKKIPYIYDRKWRDKSENDAPKNIKPTIRFKSKIDGSTILKDLVQGDIEIENNTIEDFIILRNDGSPTYNLSASVDDHHMNITHIIRGDDHKINTFKQMQIYSSMNWKIPSFAHIPLIHTTEGKKLSKRDKASTLDDYSKIGIIPEALRNYLLR

SEQ ID NO: 187197 - protein, 104 aa, Unknown
  Bacterial polypetide isolated from the Sargasso Sea
MIKINQKASLRGFFDFRRKSNFMNTFESSITNIMKPRLRFAPSPTGQLHLGGARTALSNYLYAKKNGGQFLVRIEDTDLERSKKEHIDQICDSLQWLGLNWDEE

SEQ ID NO: 187198 - protein, 188 aa, Unknown
  Bacterial polypetide isolated from the Sargasso Sea
MSKVRLRFAPSPTGPLHIGGLRTALYNYLIAKRLDGSFILRIEDTDQKRFNKNAEKHILDSLLWCKILPDESPISPGKFGPYRQSERKEIYKNYVDKLIDQGKAYYAFDDVEELNLLRKAHEKKGETFIYNWENRKDLKNSISLSDKETKVNLDNGNYVIRFNSFQEKSENEFIVFHDEIRGEIKVDL

SEQ ID NO: 187199 - protein, 139 aa, Unknown
  Bacterial polypetide isolated from the Sargasso Sea
MNVVTRFAPSPTGYLHIGGARTALFNWLFARHHGGTYLLRIEDTDKERSSHAAVAAIHEGLSWLGLNGDKTAVSQSAQIQRHIEIADELVKKGAAYRCFLNDAELRALREECKATGAPLRSPWRDKDPGSAPKRPFTVR

SEQ ID NO: 187200 - protein, 182 aa, Unknown
  Bacterial polypetide isolated from the Sargasso Sea
MSKVATRFAPSPTGPLHIGGVRTALFNWLYSKNQNGNFFLRIEDTDKERSKEEYRNQIIKSLKWIGINFDGEEYVQSKKIDDHIKVANELLNKGSAYKCYCSSEEIEEQKKRAKQKKIPYIYDRKWRDKKETDAPKDIKPVIRFKSKIDGISILKDLVQGDVEIENNTIEDFIILRNDGTPT

SEQ ID NO: 187201 - protein, 301 aa, Unknown
  Bacterial polypetide isolated from the Sargasso Sea
SIDNHTIEDFVILRNDGSPTYNLSASVDDHEMKVTHIIRGDDHKINTFKQMQIYLAMNWELPSFAHIPLIHTTEGKKLSKRDKASTLDDYSKIGIMPDALRNYLLRLGWSFKDKEIFTLEESIKHFSLEGIGKSPSKLDISRILSMNEHYIKNINENDLLNHLKKYCEIYKDKIDNKSEKIKKSLNFLKNKAKTLEDIYNNSQYLIKDKINISSEDQKLLDSLAKKILKDFLKEFENLSNINKENLEKIINNLIKNNKTNFKGVGQPLRVALVGSKFGPGIYDIIMSLDKNEVIERLKAIN

SEQ ID NO: 187202 - protein, 303 aa, Unknown
  Bacterial polypetide isolated from the Sargasso Sea
IVQGDVRVSNKQLDDFVLLRSNGLPTYMLAVVVDDYDMGITHIIRGDDHLNNAFRQFWIYKALDWKVPEFAHIPLIHGEDGAKLSKRHGALGIQEYKEMGFLSESINSYLMNLGWREPEKDFIDLDEASKIFELNKIGKSPSRFNIAKLKKINSHFLRSKKQKFLINLIKEKIINFTTNFEERLIKVLPLIIERAETLNDIISSTNWFSSDDYKIIFKERNIFKNEEVRFLELFIESFSDCKIDSKSEMENHFNKWLSQENIKMKQIGKPLRLSLTGRGSSIDLISILDVLGVEEIKIELIII

SEQ ID NO: 187203 - protein, 312 aa, Unknown
  Bacterial polypetide isolated from the Sargasso Sea
DGSVIFDDQIRGPIEFSNQELDDLIIRRTDGSPTYNFCVVVDDWDMEITHVIRGEDHINNTPRQINILKALNAPVPVYAHVSMINGDDGKKLSKRHGAVSVMQYRDDGYLPEALLNYLVRLGWASGDQEIFSREEMIKLFSLGAVSKSASAFNTDKLLWLNHHYINSMAPEYVATYLQWHIEQENIDTRNGPQLAELVTLLGERCKTLKEMAASCRYFYEEFDEFDADAAKKHLRPVARQPLEVVRDKLAAITDWTAENVHHAIQATADELEVGMGKVGMPLRVAVTGAGQSPALDVTVHAIGKSRSVERIN

SEQ ID NO: 187204 - protein, 245 aa, Unknown
  Bacterial polypetide isolated from the Sargasso Sea
MKKVATRFAPSPTGPLHIGGVRTALFNWLYSKNKKGDFYLRVEDTDKERSKDEYKGQIIKSLKWIGINYDGEEYIQSKKVEDHIKVANELLKNGHAYKCYCSSEEIEEQKKRARQKKIPYIYDRKWRDKKEADAPKDIKPVIRFKSKIDGTSILKDLVQGDVEIDNNTIEDFIILRNDGTPTYNLSASVDDHQMNMTHIIRGDDHKINTFKQIQIYQAMKWELPSFAHIPLIHTMKERNYQREIR

SEQ ID NO: 187205 - protein, 288 aa, Unknown
  Bacterial polypetide isolated from the Sargasso Sea
SGGKFILRIEDTDSKRTVDGAEKHIIDSLEWLGLDVDEGPIKQSNRSSLYKKQVDKLLKQGNAYYAFDSQEDLDGAREAGGKDFKYNVKTRMGLNNSFTVSEEERKKRVEEGRYVVRLAIPENKKISAYDEIRGELTFDSNELEDKVILKSDGMPTYHLANVVDDNDMKITSVVRGEEWLSSLPVHYLLYEFFGWSPPKFYHLPLILKTSGAGKLSKRDADEQGHPIFAVKWEDSNGFKDYGFIPEGINNYLALLGWSNKEEREKYTMAELVESFNYKEINKSGARLI

SEQ ID NO: 187206 - protein, 89 aa, Unknown
  Bacterial polypetide isolated from the Sargasso Sea
MITTRFAPSPTGFLHIGGVRTALFNWLYAKKNSGKFLLRIEDTDRERSSKEAIKKIIDGLNWLGLENDGEIVYQHKNEERHIEVARYTA

SEQ ID NO: 187207 - protein, 298 aa, Unknown
  Bacterial polypetide isolated from the Sargasso Sea
TGPLHIGGVRTALFNWLLAKKNKGKYFLRIEDTDKERSKDEFKKQIISSLAWLGIEHDDKEYIQSKNINKHVAVAEELLKKGFAYKCYCSEEEINEQKAKSKKQGMPYVYNRKWRDAKDLEIPKNVKPVIRFKSKISGNTIIKDLVQGERNISNSTIEDFVILRKDKSPTYQLSATVDDHEMKITHVIRGDDHMINSFKQKQIYDAMGWDVPNFAHIPLIHSEQGKKLSKRDNASTLEDYVKIGIISDALRNYLLRLGWSYKDKEIFTKQESIDLFDLSGVGKSPSKLDMNRIYSINE

SEQ ID NO: 187208 - protein, 264 aa, Unknown
  Bacterial polypetide isolated from the Sargasso Sea
ATRFAPSPTGPLHIGGVRTALFNWLYSKNQKGNFYLRIEDTDKERSKNEYKNQIIQSLKWIGISHEGDEYIQSKKINDHIKVANELLKNGNAYKCYCSNEEIEEQKKRAKQKKIPYIYDRKWRDKSEGEAPQDIKPVIRFKSKIDGTTLLKDLVQGDVEIENNTIEDFVILRNDGTPTYNLSASVDDHQMNMTHIIRGDDHKINTFKQIQIYEAMKWEVPSFAHIPLIHTIDGKKLSKRDKASTLDDYSKIGIMPDALRNYLLR

SEQ ID NO: 187209 - protein, 187 aa, Unknown
  Bacterial polypetide isolated from the Sargasso Sea
MSEIIKVRFAPSPTGFLHIGGVRTALFNWLFARHHGGKFILRIEDTDLSRSTEESIQEILESMRWLGLDWDEGPFRQTERQGIYAKKIMHLLSTGKAYHCYCTPEELDQKRSDAQKAGLKPKYDGTCRERTDTPEAPYVVRFKAPQEGSVVVEDLLRGKVIFDIAELDDLIIQRTDGTPTYNFVVVV

SEQ ID NO: 187210 - protein, 297 aa, Unknown
  Bacterial polypetide isolated from the Sargasso Sea
SVLKDLVQGDVEIENNTIEDFVILRNDGTPTYNLSASVDDHIMNMTHIIRGDDHKINTFKQIQIYEAMKWKLPSFAHIPLIHTIEGKKLSKRDQASTLDDYSKIGIMPDALRNYLLRLGWSYKDKEIFTLDESIKFFNLDGIGKSPSKLDMSRILSMNEHYIKNINENDLFNQLTEYCKLYKNEIRSDKKDKIKKSLTFLKNKAKTLEDIFNNGQYIIKDEVNFNKDDVKLIDDKARQVISDFKVQFDKIDLPSREILEPIINELIKSHDTNFKGVGQPLRIVLTGSKFGPGIYDII

SEQ ID NO: 187211 - protein, 183 aa, Unknown
  Bacterial polypetide isolated from the Sargasso Sea
MSKVATRFAPSPTGALHIGGVRTALFNWLYSKNQKGTFCLRIEDTDKERSKEEHKIQIIKSLNWLGIKHDGEEYIQSTKIDNHVKIANELLKNGHAYKCYCSPEEIDEQKKRARQKKIPYIYNRKWRDADEKDAPKEIKPVIRFKSKIEGSSMLKDLVQGDVEIENNTIEDFVILRNDGTPTL

SEQ ID NO: 187212 - protein, 192 aa, Unknown
  Bacterial polypetide isolated from the Sargasso Sea
MKKVATRFAPSPTGPLHIGGVRTALFNWLYSKNKGGSFFLRIEDTDKERSKDEYKEQIIKSLKWIGVEKDGEEYIQSKKINDHIKIANELLKNGYAYRCYCSSEEIEEQKKRAKQKKIPYIYDRKWRDKSEAEAPADVKPTIRFKSKIDGTTVLKDLVQGNVEIENNTIEDFIILRNDGTPTYNLSASVDDH

SEQ ID NO: 187213 - protein, 294 aa, Unknown
  Bacterial polypetide isolated from the Sargasso Sea
GNFYLRVEDTDKERSLDEYKDQIIKSLKWIGINYDGEEYIQSKKIEDHIKVANELLKNGHAYKCYCSSEEIEEQKKRARQIKIPYIYDRKWRNKKETDAPKDIKPVIRFKSKIDGTSVLKDLVQGDVEIDNNTIEDFVILRNDGSPTYNLSASVDDHQMNMTHIIRGDDHKINTFKQIQIYQAMKWEIPSFAHIPLIHTIEGKKLSKRDKASTLDDYSKIGIMPDALRNYLLRLGWSYKDKEIFTLDESIKHFNLEGIGKSPSKLDMSRILSMNEHYIKNIDENDLFDQLTEYC

SEQ ID NO: 187214 - protein, 167 aa, Unknown
  Bacterial polypetide isolated from the Sargasso Sea
MTFLTRFAPSPTGYLHVGNIRTALFNFLLSKKNKGKFLLRIDDTDLERSKQIYEDEIKRDLEWLGIEWDFCERQSTRFDRYYEALENLKSENKIYPCYETKSELDLKRKKQLNMGKPPIYDRTALKLSHEDHKKFKEKGKNAHWRFLLDKKKVGWNDIIIGSVSIDL

SEQ ID NO: 187215 - protein, 172 aa, Unknown
  Bacterial polypetide isolated from the Sargasso Sea
MVQGNVEIENNTIEDFVILRNDGTPTYNLSSTVDDHQMNMTHIIRGDDHKINTFKQIQIYEAMKWDLPAFAHIPLIHTIEGKKLSKRDKASTLDDYSKIGIMPDALRNYLLRLGWSYKDKEIFTMEESIKHFNLGGIGKSPSKLDMSRILSMNEHYIKNMNEDELFNQLIEY

SEQ ID NO: 187216 - protein, 287 aa, Unknown
  Bacterial polypetide isolated from the Sargasso Sea
VILRKDNTPTYQLSATVDDHEMKITHIIRGDDHMINSFKQRQIYEAMGWEVPNFAHIPLIHSEQGKKLSKRDNASTLEDYIKIGVISDALRNYLLRLGWSYKDKEIFTKQESIDLFDLSGVGKSPSKLDMNRIYSINETYIKTIDEKDLFSFFKEYVSKYKKPIDQAKENIILKSMNFLKNKAKTLEDIWNNSQYIINDKIEIGADDKKLIDDLSKKVINDFINEYEKLSSLSRDTLEPIIKSLINKHKTNFKGVGQPIRIALVGSKFGPGLYDIILSLDKAEVIKD

SEQ ID NO: 187217 - protein, 189 aa, Unknown
  Bacterial polypetide isolated from the Sargasso Sea
MKQLFKLDDINKAPSAFNTEKLVWLNQHYIKTLDPEYVASHLQWHMDDQKIDTSNGPALSAVVTALAERAKTLKELAASSRYFYEDFAEFDAEQAKKHLRGVALEPLQLVQQKLAALTEWTVEAIHQAIEATATELEVGMGKVGMPLRVAVTGAGQSPGLDITLFLIGKARSEQRISKAIEFVADRINS

SEQ ID NO: 187218 - protein, 264 aa, Unknown
  Bacterial polypetide isolated from the Sargasso Sea
PLYNLAVVVDDNFMNITHVVRGEDHISNTAKQILIYEALNFNLPTFSHTPLILNSEGKKLSKRDCVTSIDEFRDMGYLPEALANYMSFLGWSPKSTEKEIISLDEISKIFDLSDINKAGAKFSWEKLNWINSQYIKNMESINLSELISKYWDDMGWKPPSKEWAIKLSILIKDSMTRLTDSIDQSKPFFLLPTIQKEGQDFLEKNDGKISLKLILNYLIEQNTAKLDKEKAKEIINEISKMHNVKKGILMKSLRVALFGSLNGP

SEQ ID NO: 187219 - protein, 176 aa, Unknown
  Bacterial polypetide isolated from the Sargasso Sea
MSFNCRFAPSPTGPLHIGGVRTALFNWLLAKKNKGNYFLRIEDTDKERSKNEFKKQIISSLAWLGIEHDGEEYIQSKNIKKHIAIAEELLKKGFAYKCYCSEQEINEQKEKCKKQGIPYVYNRKWRNAKDLQIPKDIQPVIRFKSKISGNTIIKDLVQGDRNISNSTIEDFIILRK

SEQ ID NO: 187220 - protein, 228 aa, Unknown
  Bacterial polypetide isolated from the Sargasso Sea
MSMMDEEYIQSKNIDKHVAVAEELIKKGFAYECYCTEEEINEQKEKCKKQGIPYVYNRKWREAKELKIPKGVKPVIRFKSKISGNTIIKDLVQGERNISNSTIEDFVILRKDKSPTYQLSATVDDHEMKITHVIRGDDHMINSFKQKQIYDAMGWEVPYFAHIPLIHSEQGKKLSKRDNASTLEDYVKIGIISDALRNYLLRLGWSYKDKEIFNKQESIDLFDLSGVG

SEQ ID NO: 187221 - protein, 252 aa, Unknown
  Bacterial polypetide isolated from the Sargasso Sea
FELLKKDNAYKCYCSSEEIEEQKKRAKQKKIPYVYDRKWRNKSEDEAPKNIKPVIRFKSKIDGTTILRDLVQGDVQIENNTIEDFIILRNDGTPTYNLSASVDDHQMNMTHIIRGDDHKINTFKQIQIYEAMKWQLPSFAHIPLIHTIEGKKLSKRDKASTLDDYSKIGIIPDALRNYLLRLGWSYKDKEIFTLDESIKHFNLEGIGKSPSKLDMSRILSMNEHYIKNIDENDLFRQLTKYCEIYQEKIPNE

SEQ ID NO: 187222 - protein, 307 aa, Unknown
  Bacterial polypetide isolated from the Sargasso Sea
NLLDDFILMKSDGSPTYHLANIVDDHLMEISHVMRAEEWLPSAPRHQELYKAFGYEMPCLVHLPIILGPDRSKLSKRHGATSVLQFRDTGYLPEAMVNFLALLGWSLDDSTEIFSINDLIQHFSIDRILASPSVFNHEKLDWFNGQYIRQLNNQDLAQAVLPWLIDGSSKNSSFYKAVNIEYLESIVPLERERLKVLSEAPELFSFFFNDDLGYDKNQLIQKGMDLVSTKTALNAAYDLINKADNWDIETLENAFRLLAQTLEIKTGQLFGSIRVAITGRTAAPPLFDTIHALGKQRCIERIHKQKS

SEQ ID NO: 187223 - protein, 164 aa, Unknown
  Bacterial polypetide isolated from the Sargasso Sea
MVRTRFAPSPSGFLHIGGVRTALYSWLFARNKGGQFLLRIEDTDTERSTVESIEAILAGMQWLGLDHDEDIVYQSKRFGIYQEKAEGLIQADHAYKCYCTPDELEKMRAEQTKKGENPRYDGRCRDKGDQDGEFVIRFKVNAKENITISDSVYGQITVHNDELD

SEQ ID NO: 187224 - protein, 291 aa, Unknown
  Bacterial polypetide isolated from the Sargasso Sea
IDNHVKIANELLKNGYAYKCYCSAEEIDEQKKRARQKKIPYIYNRKWRDADEKDAPKEIKPVIRFKSKIEGSSILKDLVQGDVEIENSTIEDFVILRNDGTPTYNLSATVDDHEMGMTHIIRGDDHKINTFKQIQIYQAMKWNVPLFAHIPLIHTIEGKKLSKRDNASTLDDYSKIGIMPDALRNYLLRLGWSYKDKEIFTLEESIKFFNLEGIGKSPSKLDMSRILSMNEHYIKNIDENDLYDNLLRYCEEYKDKIHTEKATKIKSSLVFLKNKAKTLEEIFNNAKYIIN

SEQ ID NO: 187225 - protein, 112 aa, Unknown
  Bacterial polypetide isolated from the Sargasso Sea
SHTPLILNSEGKKLSKRDCVTSIDEFREMGYLPEALSNYMAFLGWSPKSADREILSLEEISEIFDLSEINKAGAKFSWEKLNWINSQYIKNMESIKLSEIIKKYWDDNGWEP

SEQ ID NO: 187226 - protein, 312 aa, Unknown
  Bacterial polypetide isolated from the Sargasso Sea
NWLFAKNKGGNFLLRIEDTDKQRSKKEYQNQIIQSLKWIGINYDSDEYIQSTKINNHVKIAEELLKKGNAYKCYCSNEEIEEQKKRAKQKKIPYLYDRKWRDKNENEAPKNIKPVIRFKSKIDGKSKLKDLVQGDVEIDNNTIEDFVILRNDGTPTYNLSVTVDDHDMNVTHIIRGDDHKINTFKQMQIYDAMSWDLPVFAHIPLIHTKEGKKLSKRDKDSTLDDYSKIGIMPEALRNYLLRLGWSFQDKEIFNLEESIKHFNLEGIGKSPSKLDLNRILSMNEYYIKNMKEDSLFDQLKDFCINYKEKITF

SEQ ID NO: 187227 - protein, 69 aa, Unknown
  Bacterial polypetide isolated from the Sargasso Sea
MSVVTRFAPSPTGYLHIGGARTALFNFIFSKINEGKFLLRIEDTDRERWSKEAETAIFKGLSWLGIEPD

SEQ ID NO: 187228 - protein, 295 aa, Unknown
  Bacterial polypetide isolated from the Sargasso Sea
PLSGNIHFEDLVYGDINTDCSELDDFIIARSDGTPTYNFTVVVDDHDMQVSHVIRGEDHISNTPKQILIYDALKWDTPEFAHLPMILGSDGKRLSKRHGAVGTQTYRDLGYLPNTLINYLALLGWNPGTEDEVFNFQFLMDNFSLEKINKKAAVFDNKKLDWLSGQHIMKSESEELLDSIKSIKPDWAPNGLSDEYLFSIISLLKGRSKTLLDIINQSEYFFNDPIKYDQNAVAKCWDEDTSELLKSFAEKALTCLDWKDESIEACINDFSEKKYVSKGKLIQSLRVFICGSLTG

SEQ ID NO: 187229 - protein, 296 aa, Unknown
  Bacterial polypetide isolated from the Sargasso Sea
SLLSLCKKTGGELVLRVEDTDQARKVEKSQEHIENSLAWIGIDFDESSKTGGQFGPYNQSERKGVYKKHVNVLIEKGWAYYAFDKKEKLDFHRLDHEKKGKKFIYNAHNRLKLDNSLSMDKKDVEERIQKENYVVRFKTPSETNVVFNDIIRGKILVGTRDIDDKILFKSDGMPTYHLANVVDDHLMEITHVIRGEEWLPSLALHVLLYRAFDWQEPKFAHLPLILKPTGKGKLSKRDGDKFGFPVYALDWADEKVYTGFNESGFLAEALINYMVFLGWSPGGEKEIYSLDELVNE

SEQ ID NO: 187230 - protein, 266 aa, Unknown
  Bacterial polypetide isolated from the Sargasso Sea
MSFNCRFAPSPTGPLHIGGVRTALFNWLLAKKNKGKYFLRIEDTDKERSKDEFKRQIISSLSWLGIEHDGEEYIQSKNINKHVEVAEILVEKGFAYKCYCSEEEINEQKEKSKKQGIPYVYNRKWRDAKDLKIPEGVEPVIRFKSKISGNTIIKDLVQGERNISNSTIEDFVILRKDKSPTYQLSATVDDHEMKITHVIRGDDHMINSFKQKQIYDAMGWDVPNFAHIPLIHSEQGKKLSKRDNASTLEDYIKIGIISDALRNYLL

SEQ ID NO: 187231 - protein, 197 aa, Unknown
  Bacterial polypetide isolated from the Sargasso Sea
MSFNCRFAPSPTGPLHIGGVRTALFNWLLAKKNKGKYFLRIEDTDKERSKDEFKKQIISSLAWLGIEHDGEEYIQSKNISKHIKVAQELLKKGFAYKCYCSEKEINEQKEKCKKQGIPYVYNRKWRDAKDLTIPKSIKPVIRFKSKISGNTIIKDLVQGERNISNSTIEDFVILRKDETPTYQLSATVDDHEMKISH

SEQ ID NO: 187232 - protein, 202 aa, Unknown
  Bacterial polypetide isolated from the Sargasso Sea
MVITRFAPSPTGFLHIGNVRAALMNYLLAKKSSGIFILRIDDTDQERSKQEYVDAIKVDLEWLGLEWDRIEYQSSRLDLYNSASDKLRSIDLLYECFETPSELDLKRKKQLNMGKPPVYDRAAMALSDQEKSNLRSDRGDGHWRFKLERNRIEWNDGILKDLSIDAASVSDPVLIRADGQYLYTLASVVDDIDMEITHVVRG

SEQ ID NO: 187233 - protein, 277 aa, Unknown
  Bacterial polypetide isolated from the Sargasso Sea
MSTITRFAPSPTGLLHLGNIRTALINWLYARTNNGKFILRIDDTDLERSKEEFTSKIKYDLEWLGIDYDETFNQSSRFDVYKERFNQLVELGRIYPCYETPEELDRKRKLQMAAGGKPVYDRSSLKLTEKQKTDFESEGRKPHWRFLMNSERVQWDDILKDKVDIDLLSLSDPVVYREDGVPLYTFSSVVDDIDFNVTNVIRGDDHTSNTAVQIELINSLDQNKITFAHHALLTASSGDKLSKRDNVISIESFRDKHIEPLAILSLLATIGTSKSIE

SEQ ID NO: 187234 - protein, 268 aa, Unknown
  Bacterial polypetide isolated from the Sargasso Sea
ARRHQGKMVLRIEDTDRARSTPGSEQAILDALSWLGIEWDEGPDCGGDYGPYRQSERLELHQVEIDRLLEQGDAYRCFCTPERLDELRKEQMARKETPRYDGRCLALTPEESKQRAENGEPFVVRMKIPSEGECRFMDELRGEVVIDWSQVDHQIIRKSDGYPTYHLANVVDDHHMRISHVIRGEEWINSVPKHLLLYKLLGWNPPAFAHLPLLRNPDKSKLSKRRNPTGIFYYRDAGFLPEAMINYLGMMGYTLPDQREVFRSAISA

SEQ ID NO: 187235 - protein, 268 aa, Unknown
  Bacterial polypetide isolated from the Sargasso Sea
NGLRWLGLDWDEGPETGGSHGPYFQSERLELYQNASNILIENNWAYKCYCTPEELTEMRQNQQKQKLPPQYDRRCRNADTSDKAAKNLPYVIRFKIPENIDTIVVDDLIRGRVEFQNTLLDDFVLLKSDGFPTYHLANVVDDHEMEISHVLRAEEWLSSTPKHLLLYKAFGYTPPAFAHLPMILGNDKSKLSKRHGATSILEYQTNGYLPDAMLNFLVLLGWSLDDKTEIFSLENLINVFTIERIGKSPSIFNTEKLNWMNSLIYKNL

SEQ ID NO: 187236 - protein, 244 aa, Unknown
  Bacterial polypetide isolated from the Sargasso Sea
MHIGGVRTALFNWLYAKKNNGKFLLRIEDTDRKRSSNEAINIILEGLEWLGLNFDDTPIYQNNNIKRHREIVQKLLNYGNAYKCWASEEELTLMKNKAKKDGSNIGYNGLWRDKEPTENEEGKPYTVRFKSEQSGETIVNDNVQGNVIFQNNNIEDFIILRSDGSPTYMLSAVVDDHDMMITDIIRGDDHLNNTAKQIQIYKALNWKVPKFSHIPLIHGDDGSKLSKRHGALGIDYYEKKRFSL

SEQ ID NO: 187237 - protein, 168 aa, Unknown
  Bacterial polypetide isolated from the Sargasso Sea
MSQVVTRIAPSPTGFMHIGTARTALFNWLYARGRNGKFYIRIEDTDRKRSTAEANEVIINGLNWLGLDYDGDIVSQFERAPRHVEIAEKLLKNGKAYKCFTSPGEIQTFKETALKNGTSTLFKSPWRNADPSSHPNSPYVIRIKAPETGETIIQDEVQGKISIKNNQL

SEQ ID NO: 187238 - protein, 115 aa, Unknown
  Bacterial polypetide isolated from the Sargasso Sea
MSKVATRFAPSPTGALHIGGVRTALFNWLFSKNQKGTFHLRIEDTDKERSKEEHKIQIIKSLKWIGIEHDGEEYIQSQKIDDHIKIANELLQKGNAYKCYCSAEEIEEQKKRARQ

SEQ ID NO: 187239 - protein, 277 aa, Unknown
  Bacterial polypetide isolated from the Sargasso Sea
DGDEYLQSKEINNHIKIANELLQNGNAYKCYCSNEEIEEQKKRAKQKKIPYIYNRKWRDKKESEAPDNIKPVIRFKSKIEGSTTLKDLVQGEVQIDNNTIEDFIIIRNDGSPTYNLSAAVDDHKMKISHIIRGDDHKINTFKQMQIYEAMNWGLPSYAHIPLIHTAHGKKLSKRDKESTIDDYSNIGIMPEALRNYLLRLGWSYKDKEIFTLDESIKYFNLQGIGKSPSKLDINRILSMNEHYIKNINEKELYERLEEYCLIYKEKIETNKKDKLKN

SEQ ID NO: 187240 - protein, 266 aa, Unknown
  Bacterial polypetide isolated from the Sargasso Sea
DGNEYIQSKKIDDHIKVANELLKNGHAYKCYCSNKEIEEQKNRARQKKIPYIYDRKWRDKSDADAPKDVKPAIRFKSKIDGSTILKDLVQGDIQIENNTIEDFIILRNDGSPTYNLSASVDDHRMNISHIIRGDDHKINTFKQMQIYLAMKWKVPSFAHIPLIHTTKGKKLSKRDKASTLNDYSEIGIMPEALRNYLLRLGWSFKDKEIFTEEESIKHFNLEGIGKSPSKLDMSRILSMNEHYIKNIDENKLFNQLTKYCEIYKEK

SEQ ID NO: 187241 - protein, 277 aa, Unknown
  Bacterial polypetide isolated from the Sargasso Sea
GLHWLNLHWDNDIVFQKDGIDRHRHIADTLLQKNKAYKCYSSQQEIEEYRKEARKSGKSTIFNSPWRNNTGKKPKNQKYVIRLRAPEHGKTSMVDQILGDVEWKNEALDDLIILRQDGSPTYMLAVVVDDYDMNISHVIRGNDHLTNSARQILIYEAMNWHVPQFAHLPLIHGSDGTKLSKRHGALSILEYKKMGFPPQAITNYLAGLGWSKSELEYFSLETAKNQFSLKDVGKSPSRFDIKKLESVSKIHVSSTDPKILTDLVIQFVERQAIHTFN

SEQ ID NO: 187242 - protein, 280 aa, Unknown
  Bacterial polypetide isolated from the Sargasso Sea
MEKISVSKVVTRFAPSPTGTLHIGGVRTALFNYIYAKQNNGEFLVRIEDTDRERSTKAYEKNILDTLSSIGLSPDKKPINQSERNDIYIKAAEQIIASGDAYWCDCSEEELEKMRNQQMADGEKPMYDGRSRHLGLERSSNTVLRLATPEDGEIVMHDMIRGEIRFNNAELDDLILLRSDGTPTYHLCNVVDDFEQGVTAVIRGEDHISNTPRQIHIQNALGYPALEYAHLPLVLGPDKKRLSKRHAATSLEEYKDMGYLDSAILNSLARLGWSGGDKEV

SEQ ID NO: 187243 - protein, 305 aa, Unknown
  Bacterial polypetide isolated from the Sargasso Sea
WRDRKESEAPKDVKPVIRFKSKIDDKSKLNDLVQGEIEIENNTIEDFIILRADGSPTYNLSASVDDHLMKMTHIIRGDDHKINTFKQLQIYKAMNWDVPYFAHIPLIHTIEGKKLSKRDNASTLDDYSKIGIMPNALRNYLLRLGWSYKDKEIFDLNESIKYFNLEGIGKSPSKLDISRIYSINEHYIKNIDENDLFNFLEDYCENFKEKIPDLKKEKIKTSLIFLKNKAKTLEDIYNNSKFLINDKIEINIEDKKLLDEAANKIINLFIEEINKISDFKRETLEPIINNIIKNNKTNFKGVGQP

SEQ ID NO: 187244 - protein, 299 aa, Unknown
  Bacterial polypetide isolated from the Sargasso Sea
KKIPYIYDRKWRDKNETDAPKDIKPVIRFKSKIDGKSVLKDLVQGDVEIDNNTIEDFVILRNDGTPTYNLSASVDDHQMNMTHIIRGDDHKINTFKQIQIYQAMKWELPLFAHIPLIHTIEGKKLSKRDQASTLNDYSKIGIMPDALRNYLLRLGWSYKDKEIFTLEESIKFFNLEGIGKSPSKLDMSRILSMNEHYIKNIDENDLFNQLIEYCKLYKNEIQSYKKDKIKKSLTFLKNKAKTLEDIFNNGQYIIIDEVNFNKDDVKLIDDNARKVISDFSAQFEKIDLPSREILEPNSK

SEQ ID NO: 187245 - protein, 217 aa, Unknown
  Bacterial polypetide isolated from the Sargasso Sea
MKKVATRFAPSPTGPLHIGGVRTALFNWLYSKNQKGDFYLRIEDTDKERSKDEYKKQIIQSLKWIGITHDGEEYIQSKKIDDHIKIANELLKNGHAYKCYCSNEEIEEQKKRSRQKKIPYIYDRKWRDKKETDAPKDIKPVIRFKSEIEGSTVLKDLVQGDVKIENNTIEDFIILRNDGTPTYNLSASVDDHQMNMTHIIRGDDHKINTFKQIQIYQ

SEQ ID NO: 187246 - protein, 386 aa, Unknown
  Bacterial polypetide isolated from the Sargasso Sea
KHDDKEFIQSKNIVKHREIAEELLKKGFAYKCYCSEEEIKEQKEKCKKQGIPYVYNRKWRDPKDLQMPKDVKPVIRFKSKVSGNTVIKDLVQGDINISNSIIEDFVILRQDGSPTYQLSATVDDHSMKISHVIRGDDHKINTFKQKQIYEAMKWDSPLFAHIPLIHSEKGSKLSKRDKSSTIDDYVKIGILPGALRNYLLRLGWAYKDKEIFSLDESIKLFDLKGVGKSPSKLDMSRILSLNEHYIKNIDEKILFDFLKSYAQKYKKTIDPSKEDVVIKSLNFLKNKAKTLDDIYQNSQYILNKEITISREDLKLLDTNSKKIIGDFLNQFKNINNPNKESVEKLINSLISKYKTNFKGVGQPLRIALVGSRFGPGIYNIILSLTK

SEQ ID NO: 187247 - protein, 319 aa, Unknown
  Bacterial polypetide isolated from the Sargasso Sea
MSKVATRFAPSPTGPLHIGGIRTALFSWLYSKNQKGKFCLRIEDTDKERSKNEYKEQIINSLKWIGIIHDGNEYIQSKKIDDHVKIANELLKNNFAYKCYCSSEEIEEQKKRAKQKKIPYIYNRKWRDLSEEDAPKDIKPVIRFKSKIEGSYILKDLVQGDIEIENSTIEDFVILRNDGTPTYNLCAAVDDHQMNMTHIIRGDDHKINTFKQIQIYEAMKWKLPLFAHIPLIHTIEGKKLSKRDKASTLDDYSKIGIMPDALRNYLLRLGWSYKDKEIFTLDESIKYFNLEGIGKSPSKLDMSRILSMNEHYIKNINEN

SEQ ID NO: 187248 - protein, 435 aa, Unknown
  Bacterial polypetide isolated from the Sargasso Sea
MKLRIAPSPTGELHIGNARTALFNWLYARKNNGKFLLRIDDTDTERSTPEYIENIVQNLSWLGIDWDEGYELSDSNSYKQSDRFGRYEEIANQLLENDFAYEDDGAVRFRVEKDKEIFFQDYIRGDMKFNTNDVEDFVILRSDKSPTYHLASTVDDIDYEITIIARGEDILSSTPKHIMIMNALNAKVPDFCHLPLLFGPDGKKLSKRHGDTSVSSFRERGVLSETMFNYMSILGWSPGNDLEIFDKEFAINNFDLKNVLANPAIFDTQKLLWMNGQYIREFDEKTFNKIALESIETSLSRELFSEEIERINLILSVVQERLETLKDLMGQVEFLLDEPFNVDKDEWEEVNSKSAQDYLTNIRNEFKTMKDFELDKIEAMMREQLKKLDLKPKEGFQAARVAITGTKISPPLFESIYALGQSSTIARIAEKIVNL

SEQ ID NO: 187249 - protein, 255 aa, Unknown
  Bacterial polypetide isolated from the Sargasso Sea
ILIYKALNFNLPTFSHTPLILNSEGKKLSKRDCVTSIDEFREMGYLPEALSNYMAFLGWSPKSADREILSLGEISEIFNLSEINKAGAKFSWEKLNWINSQYIKNMESIKLIEIMRKYWDENGWEPPSQEWANKLAILIRDSMTLLKDSIDQSKPFFLIPTIQKEGQDFLENRESKLSLKLILNYLIEQNTTNLNKEKAKEIINEISKKHNIKKGILMKSLRVAFFGSLSGPDLIQSWELFAESKTDRTRIERCL

SEQ ID NO: 187250 - protein, 212 aa, Unknown
  Bacterial polypetide isolated from the Sargasso Sea
MSAVRTRFAPSPTGYLHIGGVRTALFSWLYARHHGGEFVLRIEDTDRERSTQASVDAILEGMYWMGLDADDGPIYQSDRLARYREVLDQLLDQGLAYCCYCTPEELDAVREEQRAQNIKPRYNRKCRDAEDPPRPGIDPVIRFKNPLEGPVIFEDLVRGRINISNDELDDLVIARADGMPTYNFAVVVDDMDMGITHVIRGDDHVNNTPRQV

SEQ ID NO: 187251 - protein, 310 aa, Unknown
  Bacterial polypetide isolated from the Sargasso Sea
WQGKDLGGDLVLSRRAKGYEIGDPLYNLAVVVDDNFMNITHVVRGEDHISNTAKQILIYKALNFNLPTFSHTPLILNSEGKKLSKRDCVTSIDEFREMGYLPEALSNYMAFLGWSPKSADREILSLEEISEIFDLSEINKAGAKFSWEKLNWINSQYIKNMESIKLIEIMKKYWDENGWEPPSQEWANKLAILIRDSMTLLKDSIDQSKPFFLIPTIQKEGQDFLENRESKLSLKLILNYLIEQNTIKLNKEKAKEIINEISKKHNIKKGILMKSLRVAFFGSLSGPDLIQSWELFSESKTDRTRIERCM

SEQ ID NO: 187252 - protein, 462 aa, Unknown
  Bacterial polypetide isolated from the Sargasso Sea
MKEIVTRFAPSPTGTLHIGGVRTALFNYVYAKQNNGKFLIRIEDTDTERSTKEFEKNILDNLISIGLEPDEDPINQSERNDIYLKAAEKIFKSGNAYWCDCSQEELEEMRKAQASAGKKPMYDGRSRNLGLERSDRTVLRLATPEDGQIIVNDLIRGEIKFDNNELDDLILLRSDGSPTYHLCNVVDDFEQKVTTVIRGEDHISNTPRQIHIQNALGYPELEYAHLPLVLGTDKKRLSKRNAATSLEDYRNKGYLDSAILNTLARLGWSKGDNDVFYMNDFIKEFDIKDVQKAGAIFDITKLDWLNSQHLANLTFQSFKKQLQPFLQELDIDIEDHENSDKLIEAMRTSDNNFSGIAKSLIPYYKDIKEYDEKAIEKFINDKNILIELRDLLSEIDNWNQEVIDSVLKEYQLKNELSVPSVNQPIRISLTGSTKSPGLGLTLSIFAKNTALERMNTLIEKLS

SEQ ID NO: 187253 - protein, 469 aa, Unknown
  Bacterial polypetide isolated from the Sargasso Sea
MTRPVRTRFAPSPTGFIHLGNIRSALYPWAFARKMKGTFVLRIEDTDVERSSQEAVDAILEGMQWLGLDFDEGPIYQMQRMDRYREVLAQMLEKGLAYPCYMSAEELDALRERQREAGLKPRYDGTWRPEPGKVLPEPPAGVKPVLRFRNPLTGTVVWDDAVKGRVEISNEELDDLVIARPDGTPIYNFCVVVDDMDMGITHVIRGDDHVNNTPRQINILNALGGEPPMYAHLPTVLNEQGEKMSKRHGAMSVMAYRDAGFLPEAVVNYLARLGWSHGDAEIFSREQFVEWFDLEHLGKSPAQYDHSKLSWLNAHYIKEADNARLAELAKPFLSALGIDDAAIATGPALEAVVGLMKDRATTVKEIAEGAAMFYRVPAPEADALAQHVTDAVRPALADLVAALKAADWTKEAVSAALKSTLGAHKLKMPQLAMPVRLLVAGTTHTPSIDAVLVLFGRDVVVSRIEAALA

SEQ ID NO: 187254 - protein, 410 aa, Unknown
  Bacterial polypetide isolated from the Sargasso Sea
MTPIITRFAPSPTGNLHIGSARTALINFIVNQQNPLSKFYIRIEDTDKERSRSEFSQNILKGLEWLGLNWENEIQIQSQRIKRHQEIANKLLENKFAYKCICSEEKLKKQRELIKSNKNLSKKICTECKINNEVQELKEGFVIRIKIPDDGSLKIEDKIQGNVEVLNKELDDFILLRKDHSPTYMLSVVVDDNDLGVNFIIRGDDHLNNTFRQNYIYKYLNWNSPVYAHIPLIHGEDGSKLSKRHGAVDVLDFKEKGYLPEAIINNLILLGWSPGKENELIDINEIIEKFEITKLSKSSSIFSYKKLNFFNNYYLRNQSGLNKFLEYCKNNKKLKDLILKNENKIKTIFEVYKKDLNNFAEILDIVDVYFDKNFKLDQNEVFSDEFKSLYKDFLNSISNIDNWDKENISN

SEQ ID NO: 187255 - protein, 223 aa, Unknown
  Bacterial polypetide isolated from the Sargasso Sea
MQYRDNGFLPEALINYLVRLGWSHGDQEIFSKEELVQLFDLSNCNRAPSAFNTDKLIWLNQHYMKTLAPDYVAKHLAWHVAEQKLDISTGPALTELVKVQAERVKTLKELVEVSRYFYEDFSEFEENAAKKHLRPVAAEPLVAVQTKLAELSDWSVEALHQAINDAAESLGLGMGKVGMPLRVAVTGGGNSPALDATLALIGKERVLKRISMALEYISNRAGE

SEQ ID NO: 187256 - protein, 289 aa, Unknown
  Bacterial polypetide isolated from the Sargasso Sea
MSKVATRFAPSPTGPLHIGGVRTALFNWLFSKNQKGSFFLRIEDTDKERSKDEYKNQIIQSLKWIGIEQDGNEYIQSKKIDDHIEVANELLKNGHAYKCYCSNEEIEEQKNRAKQKKIPYIYDRKWRDKSETDAPKDIKPTIRFKSKIDGSTILKDLVQGDIQIENNTIEDFIILRNDGSPTYNLSASVDDHQMNITHIIRGDDHKINTFKQIQIYLAMKWQIPSFAHIPLIHTTEGKKLSKRDKASTLDDYSKVGIMPEALRNYLLRLGWSFKDKEIFTEEESIQYFN

SEQ ID NO: 187257 - protein, 262 aa, Unknown
  Bacterial polypetide isolated from the Sargasso Sea
MNPVVRFAPSPTGQLHIGGVRTALFNYLFALKNNGIFLLRIEDTDIERSKDIFTEQIIESLGWLGFKYQGNPIIQSSRTKRYQEIIEYLIKTGSAYRCFATIEELEKLRNEKDNYLYPGIWRDRSEQEIEAKLQKKENYVIRIKIPLNGNIHFKDLVYDDINTDCSELDDFIIARSDGTPTYNFTVVVDDHDMQVSHVIRGEDHISNTPKQILIYDALKWDIPEFAHLPMILGSDGKRLSKRHGSLSTQTYRDLGYLPGYLN

SEQ ID NO: 187258 - protein, 266 aa, Unknown
  Bacterial polypetide isolated from the Sargasso Sea
MKKVATRFAPSPTGPLHIGGVRTALFNWLYSKNQNGSFYLRIEDTDKERSKDEYKDQIIKSLSWIGIEKDGDEYIQSKKINDHINVAKQLLKNGHAYKCYCSTEEIEEQKKRAKQKKIPYIYDRKWRDKKETDAPKNIKPVIRFKSKIDGTSVLQDLVQGSIEIDNNTIEDFIILRNDGSPTYNLSASVDDHQMNMTHIIRGDDHKINTFKQIQIYEAMKWELPSFAHIPLIHTIEGKKLSKRDKASTLDDYSKIGIMPDALRNYL

SEQ ID NO: 187259 - protein, 363 aa, Unknown
  Bacterial polypetide isolated from the Sargasso Sea
DGKEYIQSKNISKHINIAEDLLKKGFAYKCYCTEDEITEQKEKCKKQGIPYVYNRKWRDAKDLKIPHDIKPVIRFKSKISGNTIIKDLVQGERNISNSTIEDFIILRKDKTPTYQLSATVDDHSMGITHVIRGDDHMINSFKQKQIYDAMGWKVPNFAHIPLIHSEKGKKLSKRDNASTLEDYIKIGIISDALRNYLLRLGWSYKDKEIFTKQESIELFNLEGVGKSPSKLDMTRIFSINETYIKSVDEKDLFKFLKDYVSKYKKPIEPSKETILLKSMIFLKNKAKTLEDIWNNAQYIINDNIQIDKNDKKLIDDLSKKVIKDFISEYTKLTKLSRETLEPVIKSLIDKHKTNFKGVGQPLR

SEQ ID NO: 187260 - protein, 463 aa, Unknown
  Bacterial polypetide isolated from the Sargasso Sea
MAFICRFAPSPTGPLHIGGVRTALFNWLLARKNKGKFYLRIEDTDKERSKDEFKKQIIESLSWVGINHDDKEFIQSKNIDKHKKIAEELLKKGFAYKCYCSEEEIKEQKEKCKKQGIPYVYNRKWRDPKDLQIPKDIKPVIRFKSKVSGNTVIKDLVQGDINISNSIIEDFVILRQDGSPTYQLSATVDDHLMKISHVIRGDDHKINTFKQKQIYEAMKWDIPLFAHIPLIHSEKGSKLSKRDKSSTIDDYVKIGILPDALRNYLLRLGWAYKDKEIFSLDESIKLFDLKGVGKSPSKLDMSRILSLNEHYIKNMDEKILFNFLKNYSQKFKKAMDPSKEKVVVKSLNFLKNKAKTLDDIYHNSQYILSKEISISPEDLKLLDANSKKIIGDFLNEFKSINNPNKENIEKLINSLISKYKTNFKGVGQPLRIALVGSRFGPGIYNIILSLTKDEVVKRISKIN

SEQ ID NO: 187261 - protein, 465 aa, Unknown
  Bacterial polypetide isolated from the Sargasso Sea
MSKVATRFAPSPTGALHIGGIRTALFNWLFSKNQKGTFHLRIEDTDKERSKEEHKIQIIKSLKWIGIEHDGEEYIQSQKIEDHIKIANELLKNGNAYKCYCSAEEIEEQKKRARQKKLPYIYNRKWRDADEKDAPKDIKPVIRFKSKIEGNSQIKDLVQGDVEIENNTIEDFIILRNDGTPTYNLSATVDDNQMGMTHIIRGDDHKINTFKQIQIYQAMGWDVPEFAHIPLIHTIEGKKLSKRDNASTLDDYSKIGIMPDALRNYLLRLGWSYQDKEIFTLEESIQHFNLEGIGKSPSKLDMSRILSMNEHYIKTIDENDLYQCLVKYCKIYKEEIQDDKETKVKSSLSFLKNKAKTLKDIYNNAKFIINDEVNFNEDDFKLIDDKAKKIISEFIKELSSISNINKENLEPVVNNLIKINDTNFKGVGQPIRIGLTGSKFGPGLYDIVIALGKEEVLKRLAKIIS

SEQ ID NO: 187262 - protein, 468 aa, Unknown
  Bacterial polypetide isolated from the Sargasso Sea
MEKISVSKVVTRFAPSPTGTLHIGGVRTALFNYIYAKQNNGEFLVRIEDTDRERSTKAYEKNILDTLSSIGLSPDKKPINQSERNDIYIKAAEQIIASGDAYWCDCSEEDLEKMRNQQMADGKKPMYDGRSRRLGLERSSKTVLRLATPEDGEIVVNDMIRGEIRFNNAELDDLILLRSDGTPTYHLCNVVDDFEQGVTTVIRGEDHISNTPRQIHIQNALGYPALEYAHLPLVLGPDKKRLSKRHAATSLEEYKDMGYLDSAILNSLARLGWSGGDKEVFYIDDLIKDFDIKDVQKAGAIFDITKLDWLNAQHLSHLSLESFIEHIKPFAKKINIDINDHQNAHLLIASMRTSENTLFDIAKALRPYFMDVSDYDEKAIERFLSNGTKNLEDICDLLETIDEWNEEQIDLLLKEYQTNNNLKVPEVNQPIRIALTGSTKSPSLGLTLTFFDKKEAVSRIRKLKSFLS

SEQ ID NO: 187263 - protein, 415 aa, Unknown
  Bacterial polypetide isolated from the Sargasso Sea
KDEYKDQIIKSLKWIGINYDGEEYIQSEKVNSHIKVANELLKNGHAYRCYCSSEEIEEQKKRARQKKIPYIYDRKWRDKKETDAPKDIKPVIRFKSKIDGTSILKDLVQGDVEIENNTIEDFIILRNDGTPTYNLSASVDDHQMNMTHIIRGDDHKINTFKQIQIYQAMKWDLPSFAHIPLIHTIEGKKLSKRDQASTLDDYSKIGIMPDALRNYLLRLGWSYKDKEIFTLEESIKFFNLKGIGKSPSKLDMSRILSMNEHYIKNIDEDDLFNQLTEYCKLYKSEIQSDKKDKIKKSLTFLKNKAKTLEDIFNNGQYIINDKVDFNKDDLKLIDDKARKVISDFKSQFEKIDLPSREILEPIINELIKSHGTNFKGVGQPLRIALTGSKFGPGIYDIILSLGKEEVQKRLSAKIV

SEQ ID NO: 187264 - protein, 252 aa, Unknown
  Bacterial polypetide isolated from the Sargasso Sea
MSEFSVRTRFAPSPTGLLHIGGARTALFAWLYAKSNSGSCLLRIEDTDKERSKQEYTDEIINSFNWMGVNFDEDVVYQSKNYDRHLEVAKELLKNGKAYVCNCPKERLDQLRKEQEKRGENAKYDGKCRNLSVSESENTVIRFKNPEEGSVVFKDLIKGQIEFSNEEMDDFIIVRSDGAPTYNLCVVVDDLDMKISHVIRGDDHLNNTPKQINVFDALGIKPPIYGHVPMILGEDGKRMSKRHGAVGVSEYR

SEQ ID NO: 187265 - protein, 318 aa, Unknown
  Bacterial polypetide isolated from the Sargasso Sea
MTTSVRTRFAPSPTGFIHLGNIRSALYPWAFARKMKGSFVLRIEDTDVERSSTEAVDAILEGMEWLGLDFDEGPFYQMQNMDRYREVLKQMLDAGLVYPCYMSTEELDALRERQREAGEKPRYDGTWRPEPGKVLPAPPAGVQPVLRFRNPLTGVVAWDDAVKGRIEISNEELDDLVVARPDGTPMYNFCVVVDDLDMRITHVIRGDDHVNNTPRQINILRALGAEPPVYAHLPTVLNEQGEKMSKRHGAMSVMGYRDAGYLPEAVVNYLARLGWSHGDAEIFTREQFVEWFDLEHLGKSPAQYDHDKLNWLNAHYIK

SEQ ID NO: 187266 - protein, 430 aa, Unknown
  Bacterial polypetide isolated from the Sargasso Sea
MTKKIVTRFAPSPTGYLHIGGVRTALFNFVFSRKNNGTFLVRIEDTDKERSEEQYIAAIMDGLDWVGLNPDHEPIKQSDRFDVYKEEAFRLVEEGKAYKDDGAIRLKINKEGSTLVKDLVYGDIEFLNKELDDLVILRSDNSPTYHFCNVIDDNYQQVTHIIRGEDHLPNTPKQIQIISALGYDGFEYAHLPLVLGEDKKRLSKRHAATDLMSYKEEGYLPEAVLNMLAKLGWSNTEKDIFTTDDLIKIFDFGDIQRSGAVFDKERLNFINQNHMAMKTDDELMDLLKIFNEKNGFSLSDHHDPERLVRLCVGSGNNFSEISNFIKPFVIDFDEYDKADFEKHLLESESVLNYFKESIHSISDWDEAVFEEIINSAMKDLGLPMPKIGLPLRVALVGRAKSPPLSSTIYLIEKNKTIERLDKALKVISEH

SEQ ID NO: 187267 - protein, 258 aa, Unknown
  Bacterial polypetide isolated from the Sargasso Sea
MKCRFAPSPTGKIHIGNARSAILNWVFCKKNNGEFVLRIDDTDISRSTKEFEEQIKNDLKWLGLNWSYTFNQSARSDIYNKKIQLLKDNNRLYPCFETEEELSLKKKSLLSSGKPPIYDRSSLNLSNEEIEKKISLGIKPHWRFKLTNEVITWNDIIKGTVSFDTKNLSDPVLIRADGSLLYHLPSVVDDIEEEITHIIRGEDHIANTAYHIQIFKALDSSVPSFAHHPFLVDETGKGFSKRLGSLSIENFRNDGFEN

SEQ ID NO: 187268 - protein, 434 aa, Unknown
  Bacterial polypetide isolated from the Sargasso Sea
MTVITRFAPSPTGFLHIGGARTALFNYLFARSNNGKYVLRIEDTDRKRSTEEAVEAIVNGLDWLKLSGDEQPVFQYSRQERHKQIANTLLEQGKAYKCYCSADELEEMRALARREGKTALYDRRWREKDPTTVPPNVNPVVRLKSPLKGSTIINDLVQGRVEVNNEQLDDFVILRADGTPTYMLSVVVDDHDMEISHVIRGDDHLNNAFRQYQIYAAMDWPTPKFAHIPLIHGQDGTKLSKRHGALGIDVYKDQGYLPEALCNYLLRLGWGYENEEIITRKQAISLFEIGSVGKSPSRFDIKKLDNINSAYMREVSEARLSHLLETHLFKNLNVTLDPIKLERLNRGLSGLKIRAKNINELAASAMIYIISPPINMDEKADSILSKEARQLIRGLLEPFNELTNWNKTEIEETLKNFATCRDIKFGSVAQPLRA

SEQ ID NO: 187269 - protein, 299 aa, Unknown
  Bacterial polypetide isolated from the Sargasso Sea
MKVTRFAPSPTGNLHIGGVRTALFNYVFSKQSGGLFLIRVEDTDRERSKKEYEEDIISGLEWLGISPDKTPIRQSERSDIYQKAAEKLIDSGNAYWCDCSPEDLEEMREEQAAAGKKPMYDGRSRNLGLERSDKTVLRLATPLEGETVVNDLIRGEITFNNSELDDLILLRSDGTPTYHFCNVVDDFDQGVTTVIRGEDHISNTPRQIHIQKALGYPDLEYAHLPLVLGEDKKRLSKRHAATSLNAYKEMGFTKETIINALALLGWSTENEIFSIDELIESFKLENVQKAAAVFDLKKI

SEQ ID NO: 187270 - protein, 308 aa, Unknown
  Bacterial polypetide isolated from the Sargasso Sea
MGGDLVLSRRAKGYDIGNPLYNFAVVVDDNFMNITHVVRGEDHISNTAKQILIYKALNFNLPTFSHTPLILNSEGKKLSKRDCVTSIDDFRDMGYLPEALSNYMAFLGWSPKSADREILSLDEISEIFDLSDINKAGAKFSWEKLNWINSQYIKNMESIKLSEIMKKYWDDNGWEPPSQEWAYKLAILLRDSMTLLKDAIDQSKPFFLIPRIQKEGQDFLENKDSKASLKLILNYLIEQKTIKLNKEKAKEIINEISKIHNLKKGILMKSLRVAFFGSLSGPDLIQSWELFAESKTDKTRIERCLKSI

SEQ ID NO: 187271 - protein, 470 aa, Unknown
  Bacterial polypetide isolated from the Sargasso Sea
MSNPRVRFAPSPTGYLHIGGARTALFNWLFAKQNNGKFLLRIEDTDLERSKEKYVNQITDALKWLGLNWDEDIILQSKNNSRHQEMVSRMLKDGTAYKCFLQKDELDKLRRESEKKKEVFRVPRTYRDLPVEKEKELIKKGKSFTIRIKVPDGETEFNDLVYGSIKVQNKDLDDFIIARSDGSPTYNFVVAVDDADMKITHVVRGDDHLANTPKQILVYRALGLDEPIFAHLPMILGSDKKRLSKRHAATNVQEYKEKGFTPKVILNYLSLLGWNPDSDQEIFNENDLVKSFQFQQVQKKSAVFDEKKLLWISQQHLSEMNVRDLMNEIYALSPGWGDGLEWDYLKEVVKLIKDRCKTIKEVATMSELFFTDKIDYDPDLLSKTFNNESIAIIKDFHTALNTVEDWSRVELENIFENIMEQHEVVIGKVMKPIRVALSGIPFGPGIFDLILLLGKDVCLRRLRHTLSEIE

SEQ ID NO: 187272 - protein, 311 aa, Unknown
  Bacterial polypetide isolated from the Sargasso Sea
DLVQGDVEIENSTIEDFIILRNDGSPTYNLSATVDDHQMKMTHIIRGDDHKINTFKQMQIYEAMNWDLPKFAHIPLIHTIEGKKLSKRDNASTLDDYSKIGIMPDALRNYLLRLGWSYEDKEIFTLDESIKHFNIEGIGKSPSKLDMSRILSMNEHYIKNIDENDLFNQLTEYCKLYKSEIKSDKKDNIKKSLTFLKNKAKTLEDIFNNAQYIMVDEVKFNQDDIKLIDDKAKKVISDFATKFAAVDKISKETLEPIVIDLIKSNDTNFKGVGQPLRIALTGSKFGPGIYDIIISLGKKEVTKRLSNKIIV

SEQ ID NO: 187273 - protein, 415 aa, Unknown
  Bacterial polypetide isolated from the Sargasso Sea
MYARTNNGKFILRIDDTDLERSKDEYISQIKYDLDWLGIDFDETFNQSSRFDRYREQFEKLKADGRIYPCYETPEELERKRKLLIAAGGKQVYDRSAMELTDQQKKDYEAEGRKPHWRFLLKTERMKWDDLLKGEIDIDLTSLSDPVLFREDGVPLYTFSSAVDDIDYGITNVIRGDDHTSNTAVQVEIINALDQNKITFAHHALLKASSGDKLSKRDNVISISSFREANMEPISILSLLATIGTSNSIELKDNIDQIKSEFKLSTISTSPGRIEIDVLNALNKKQVQKYNFSEIEERLKKIDEKIDRKFWETIRGNLNVVEDIKQWTDIVFNSETIKPSDKDYIKIAIELIPDDPWNDETWGLWTSAIKEKTGRKGKDLFLPLREAFTGLNHGPEMKLLIQLLGREKIIERVEL

SEQ ID NO: 187274 - protein, 270 aa, Unknown
  Bacterial polypetide isolated from the Sargasso Sea
MVITRFAPSPTGFLHIGNVRAALMNYLLAKKSNGIFILRIDDTDQERSKQEYVDAIKTDLDWLGLEWDRIEYQSSRLDLYNSACDKLRSIDLLYECFETPSELDLKRKKQLNMGKPPVYDRAALALSDEEKLNLRNNRGDGHWRFKLEQNRIEWKDGILKDLSIDAASVSDPVLIRADGQYLYTLASVVDDIDMGITHVVRGSDHVTNTATQIQMIKALGGDIPKFAHHSLLTGPGGEALSKRLGTLALKDLREAGIEPAALCSLMARLG

SEQ ID NO: 187275 - protein, 464 aa, Unknown
  Bacterial polypetide isolated from the Sargasso Sea
MPKVATRFAPSPTGPLHIGGVRTALFNWLYSKNQNGTFHLRIEDTDKERSKDEYKAQIIKSLKWIGIQYDGAEHIQSKNIDNHIKIANELLKNGNAYKCYCSSEEIEEQKKRAKQKKIPYIYDRKWRDKDETDAPKDIKPVIRFKSKIDGSTDLMDLVQGIVKIDNSTVEDFIILRNDGSPTYNLSAAVDDHEMKVSHIIRGDDHKINTFKQMQIYLAMKWEIPTFAHIPLIHTTEGKKLSKRDKSSTLDDYSKIGIMPDALRNYLLRLGWSFKDKEIFTLEESIKHFNLEGIGKSPSKLDINRILSMNEYYIKNINESELYKRLYEYCNEYKEKIESNKEEKIKNSLSFLKNKAKSLEDIYNNSKYIIFDEVKFNDDDLKLIDEKAKKILNDFKDKISKLNELNKSTLEPIINNLIKNNETNFKGVGQPLRIALTGSKFGPGIYDIIISLGKLNIEKRLKKII

SEQ ID NO: 187276 - protein, 300 aa, Unknown
  Bacterial polypetide isolated from the Sargasso Sea
MITTRFAPSPTGFLHIGGVRTALFNWLYAKKNSGKFLLRIEDTDRERSSKEAIKKIIDGLNWLGLENDGEIVYQHKNEERHIEVAHILLEAGFAYRDWELENDYGDLEKNHAIRFKTPKEGETIINDKVQGDVEIKNKEIEDFVLLRSNGTPTYMLSVVVDDYDMNVTDIIRGDDHLTNAAKQKLIYDSLKWECPTFTHIPLIHGQDGSKLSKRHGALGIEFYKEEGYLPEALINYLLRLGWSHGDQEIFSLEEMIKYFSIEKIRKSPSKFDIDKLNDINSIYLKNTPIETLISKIDSSQ

SEQ ID NO: 187277 - protein, 459 aa, Unknown
  Bacterial polypetide isolated from the Sargasso Sea
MNVVTRFAPSPTGFLHIGGARTALFNYLFTRRYKGKFLLRIEDTDKVRSTDKAIKAIISGLEWLNLNHDGKIVFQSNNSLRHKNIADELLKSGNAYRCYLSNEEQNQIRNDCMKRGLPFRSPWRNKKYNSENENSYVIRIKMPDEGFTEIKDLVQGKVKFANNKLDDFVLLRSNSLPTYMLAVVVDDYDMGITHIIRGDDHLNNAFRQYWIYKYLDWKVPDFAHIPLIHGEDGSKLSKRHGALGVEEYKEMGFLSDSINSYLMNLGWRASEKEPITLCEASKIFEIKSVGKSSSKFNISKLKNINSHFLKIENPKNIINLIISNNELGIEKYKKRIIKALPYLIERASTINDLVDASTWLKNDNYEVIFKENLKFNTNDLSLLKSFKEYLRDLNIDSKIEIEDHFNKWLTKENLKIKDIGKNLRLCLTGSGSSIDLITILDILGIEEIIRRLSYNLDRS

SEQ ID NO: 187278 - protein, 485 aa, Unknown
  Bacterial polypetide isolated from the Sargasso Sea
MNDIRVRYAPSPTGQPHIGNIRTAFFNWLYARHNGGKFVVRIEDTDQERLVEGAYEGILEALSWLNIDWDEGPDKGGPFGPYLQSERLEVYNSAANILITKGVGYYCFCDRDRLNNLRKQQQENKSDIKYDRKCLNLSNDEIEQNLSNNIPHVIRYKIPADNTIQLNDIVRDEVEWNTNLLDDFVLIKSDGFPTYHLANVVDDHSMNISHVLRAEEWLPSTPRHLLLYDALGYEPPQFGHLPMILGPDRSKLSKRHGATSILEYRDLGYLPEAVINFMVLLGWSIDDHTEIINRQEMVKLFDLGRVGKPAAVFDIDKLDWMNGNYIRDLSDEDLFEHVKHACIGEFGENIVDQYSDRLTKMTPLISPRMKYVTDAPDMVSYILTDNLSVEKEFIETCKLSSSDIAIALTATIKYVQEEIDFSKDTLESEMRIICGQLEYSPRNYFGLIRNVLTSRSATPPLFDIMEILGPRDTLSRLDNALKLFQ

SEQ ID NO: 187279 - protein, 438 aa, Unknown
  Bacterial polypetide isolated from the Sargasso Sea
MTERTRFAPSPTGHLHIGGARTALFSWLFAKSKGGQFLLRFEDTDTERSKDEFKDSILKSLEWLDLNPDEEPVHQSRNLERHRSLALSLFEKGAAYYCDCSIEELEELRATQIKNKQKPMYDGRSREKNLDYEGKNVLRYKMPDVSTSFEDLILGDITVDNRELDDFIILRADGTPTYNFCAAVDDLDMKISTVIRGDDHLTNTIKQLNIIKSLEGNLPNYAHLPMVLSESGKRLSKRDGALDIMDYKSEGYLSGALLNYIVRLGWAKDEVEKFTMNELIDFFDLSDVNSSPSKFSLQLLDWYNNEYLKEMDSLTLLKLLNEIGSNINENFKNILGIIDVLKVGAKSLKEIEESFDMFLKSPSIDKSDSLASEENKKIIKDFFDNFDFSNDENLESISQRLKDYINNNDLKFPQLGKPLRYALTARTNAPGIGELLYL

SEQ ID NO: 187280 - protein, 450 aa, Unknown
  Bacterial polypetide isolated from the Sargasso Sea
MNKSSVRTRFAPSPTGYLHIGGARTALFAWLFAKSHEGDCLLRIEDTDKERSKEEYTEEIIRSFEWLGIEFDEEVVYQSKNADRYKEVIDSLLEEGLAYVCRGEDLQDDKKFREQSLVRDENTVVRFKMPEKGSTQFIDLVKGQIEVSNEELEDFIIERSDGSATYNFCVVVDDIDSKISHIIRGDDHVNNTFKQINVFKALNVNIPEYGHVPMILGEDGKRLSKRHGALGVKEYAKLGILPEALKNYLLRLGWSLGDQETFDDENMKKNFQYGTLNKSPATFSMEKLLWFNKYYLDQMNEDKLIEILNQENFDGSQYSKDVINAVRDRCETINDFSTNSFYFFDEPSVYDEALILKHCKKETYGHLSLLRNYLDELENWKQSLIKDVIDSVASELDVGFGKIGLPLRLALTANTNSPSIDLVCELLGKEASLKRLDSFLINIKDQEKTL

SEQ ID NO: 187281 - protein, 437 aa, Unknown
  Bacterial polypetide isolated from the Sargasso Sea
MTTTTRFAPSPTGLLHLGNIRTALINWLYAKNSGGKFILRIDDTDQERSKDEYISQIKYDLEWLGIDYDETFNQSSRFERYKEQFEKLKSDGRIYACYETPEELERKRKLQMAAGGKQVYDRSALKLTEQQIKDYENDGRKPHWRFLLQTERMKWNDLLKGEIGIDLTSLSDPVLFREDGVPLYTFSSAVDDIDYNITNVIRGDDHTSNTAVQIEIINALDENKISFAHHALLKASTGDKLSKRDNVISIDSFRKDNIEPISILSLLATIGTSNSIELKSGLKQIIEEFKLETISTSPGRIEIDVLKALNKKQVQKFHYEEIQSRLTEIDENVDKKFWDTIKGNLETVEEISSWTDIVFNSKPAESDDKDYIKLALELMPEEPWDDDTWTTWTNAIKEITGRKGKELFLPLRVAFTGLTHGPEMKLLIQLIGRDKDC

SEQ ID NO: 187282 - protein, 376 aa, Unknown
  Bacterial polypetide isolated from the Sargasso Sea
MVKEVVTRFAPSPTGYLHIGGVRTALFNYIFAKKNQGKFLVRIEDTDKERSEEQFIEAIMEGLDWVGLNPDFDPIKQSERFDIYKEEATRLMDLGEAYEDEGAVRLKVKREGSTLVKDLVYGDIEFLNSELDDIVILRSDGSPTYHFCNVIDDNSQGVSHIIRGEDHLPNTPKQIQIVNALGYKEFQYAHLPLVLGEDKKRLSKRHAATDLMAYKNLGYLPEAVKNTLTRLGWSKGDKEIFTISEIINTFDIKDVSRSGAVFDIGKMNFVNQHHLSSLTDEELITLLKPFNEMNNFDLSNHHDPKKLIRLCVTSGNNLSEISKFIQPFINDFENYNEDDLNKHLLESGDVIDFFLSELVGIDEWSEESFESVINKA

SEQ ID NO: 187283 - protein, 409 aa, Unknown
  Bacterial polypetide isolated from the Sargasso Sea
MSSYRSRFCPSPTGLLHLGNLRTALLNVLLAIKSGGTFILRIEDTDIERSKTEFSEAVCDDMEWMGLHWQEGPRIGGPEDSYYQSERNSIYQAFYDKLLEDNLIYPCFTSEEELKIIRRNQMSAGEPPRYTGIWANASKEEIEEELEKGNQPVYRFRIPKDENIIFKDLVKGEQSFHTSDLDDFIVRKKDLSPTFMFANAIDDSLMGVNIVLRGDDHLSNTPRQIALLQALNLEIPEFIHVALFTGDDGAPLSKRNGSLSVKELREIGYFPQAVINYLSRVGHTISDNELRNIHELSSVFNVSNISTSPSKIDHAQLNFWQKNVIESLSIEELSYWLESSLEDLPKDVNKDSFVGLIRDNIIFPSDAVRYLKNLFINPLDSEKEVEDLIKQTGSHFFKIAEKIIENNWG

SEQ ID NO: 187284 - protein, 435 aa, Unknown
  Bacterial polypetide isolated from the Sargasso Sea
MKLRIAPSPTGELHIGNARTALFNWLYARKHNGKFLLRIDDTDVERSTPEFQQNIIEGLEWLGIDWDEGFDKNSSISYKQSDRFERYEKIAQDLVEKGLAYEDDGAIRFKVQDGQNIYFEDYIRGDMNFNTNDIEDFVILRSDKTPTYHLASTVDDIDYEISIIARGEDILSSTPKHIMIMKALDAKIPDFCHLPLLFGPDGKKLSKRHGDTSVSSFRDQGILANAMFNYMSILGWSPGDDLEIFQRDVAIDNFDLKNVLPNPAIFDTVKLLWMNGQYIRNLSKDEFSKKATDNISASLGREIFKEELERINIILPVVQERLETLNDITDQIKFLLDEPFTVNTEEWNGVNSENVQNYLKNIRENFKLMEKFDLENIENMMRDELKELNMKPKEGFQGTRIAVTGTKISPPLFESIFALGKPATIARLAEMIENL

SEQ ID NO: 187285 - protein, 468 aa, Unknown
  Bacterial polypetide isolated from the Sargasso Sea
MKVNKTRFCPSPTGLLHLGNLRTSLFSSLIAKKDNGSFLLRIEDTDLERSKKEFSTAICNDLKWMGLDWDEGPEVGGKEDSYYQSERVDLYEEFYKALLEKNLIYPCFTSEEELKIIRRNQIASGQPPRYTGVWSNATEKEVKEELDKGNKPVYRFRIPKDSTIEFQDLVKGEQSFSTDDLDDFIVRKKDNTPTFMFANAIDDSLMGVDLVLRGDDHLSNTPRQIALLEALGLSLPRYAHVSLFTGSDGAPLSKRNGSISINDLREQGYLPIAVSNYLSRVGHTIVDNDLKTHSELADEFKIDNISSSPSKFDMDQLLYWQKKAVEELNINECSIWLKDSLEGLPASVNNENFVALIKDNINFPHEAQEYLNNLFLTPLVQREEIINIIRSAGKEFYLQACDAIPSEILDWNETAKNIGSITGKKGKELFMPLRCAITGQTKGPELDRVVNLIGTEQVLKKLKEASEL

SEQ ID NO: 187286 - protein, 276 aa, Unknown
  Bacterial polypetide isolated from the Sargasso Sea
MIVTRFAPSPTGLLHIGHVYSLVFSYEFAKKNNGKFILRIEDIDFTRCKDLFIEQIIDDINWLKIPFKRTNNQSLRTKQYSKALDYLKDKDLVYACWLTRKEASSTLNAPHNHISQNASLRVNDQELKNRKSLGLTPAWRLNIKNCLKYINSQKEKIYWEDIKQGKNLLNLDQFGDVVIARKDILTSYHLSVTVDDNSDGVTHIIRGNDLESYTNIHRLLQVLLNLRETKWFHHKLIKDKNGKRIAKRSNSKLTIKELRENGYSAKEVIKRAKSNT

SEQ ID NO: 187287 - protein, 455 aa, Unknown
  Bacterial polypetide isolated from the Sargasso Sea
MEVVTRFAPSPTGLLHLGAVRTAIFNFLYTKKNNGKFILRIEDTDQERSTKESLNQILESLSWLGIEYDQGPYVQSDRLEHYIGVAHALIDKGLAYKCFMTNQEVEELKIKAAKEKRVYKYPRTWRDRKDHPKNSPYVIRFKTPDNLNIEFVDTLRGKIKVESNNLDDFIIIRSDGYPTYNFSTAIDDAEMCITNVIRGEDHLSNTSKQILIFESIEKKPPVFTHVSMILGKDKSKLSKRNGSKSINDFKKEGILPISILNYLARLGWSHGDQEIFTLNEMMELFDINNLTKSPAIFDENKLKWVNTQHIKALKNTDLLSMLGMKFIENINIDLALSVSKEKGKDIASIKESLHFCQIESIKIGKEFEDIVSGEETRKMIKEFYIKISDIDMFNIDEIKNCMQIFLEEKNLKMKELGLPLRIILTGSKVSPGIFEIISILGKAVFQKRVEDYLRL

SEQ ID NO: 187288 - protein, 213 aa, Unknown
  Bacterial polypetide isolated from the Sargasso Sea
MKERARFAPSPTGPLHIGGVRTALFNYLIAKKNGGEFILRIEDTDTDRTVEGAEEYIIESLKWLGLTPDKKPYKQSERKEIYLKRVDLLVENGQAYHCFDTLEELKRAKEKHGNDFKYRHDKNFGLKNTFTISKEEANSLIAKGEFVIRMVVPSNEIIKVKDEIRGNLSFNSNELEDKIILKSDKMPTYHLANVVDDNDMKITSVVRGEEWLS

SEQ ID NO: 187289 - protein, 469 aa, Unknown
  Bacterial polypetide isolated from the Sargasso Sea
MEKILVSKVVTRFAPSPTGTLHIGGVRTALFNYVYAKQNEGLFLVRIEDTDKERSKKEYEKNILDSLASIGLSPDEKPINQSERNNVYVDAAKKIFDSGNAYWCDCSKEELEEMRKQQEKDGKKPMYDGRSRNKGLKQSENTVLRLATPEDGEIVVDDLIRGKVVFQNSELDDLILLRSDGTPTYHLCNVVDDFEQNVTTVIRGEDHLSNTPRQIHIQNALGYPALEYAHLPLVLGPDKKRLSKRHAATSLEEYKSDGYLDSAILNTLARLGWSKGDQEVFYMEDLIRDFNIRDVQKAGAIFDITKLDWLNTQHIANLSFEDFKKELKPFLEDLSIDVDSHQNVDLLLSSMRTVESTFKKIADDLIPYYFEVNAYNQQAIDKFVDNEGLKILNDLSEILLSIDEWSENNIDNALKNYQNENNCPVPKVNQPIRIALTGSTKSPSLGLTLAIFGKNEALKRIDNLIDHIG

SEQ ID NO: 187290 - protein, 439 aa, Unknown
  Bacterial polypetide isolated from the Sargasso Sea
WLYSKNKNGSFFLRIEDTDKERSKDQYKEQIIKSLKWIGIENDGNEYIQSKKLDDHIKVANELLKNGHAYKCYCSKEEIEEQKLRAKQKKIPYIYDRKWRDKKEQEAPKDIKPVIRFKSKIDGTSILNDLVQGDVEIDNNAIEDFIILRNDGSPTYNLSASVDDHIMKITHIIRGDDHKINTFKQIQIYQSMGWELPLFAHIPLIHTIDGKKLSKRDKASTLDDYSQIGIMQDALRNYLLRLGWSYKDKEIFTLDESIKYFNLEGIGKSPSKLDMSRILSMNEHYIKNIDENDLFDQLTEYCKLYKSEIESDKKDKIKKSLTFLKNKAKTLEDIFNNGKYIMVDEVNFNQDDIKLIDDKAKKVISDFNSQFASVDKLSKETLEPIVNGLIKSNDTNFKGVGQPLRVALTGSKFGPGIYDIIISLGKDEVIKRLTNKKLV

SEQ ID NO: 187291 - protein, 489 aa, Unknown
  Bacterial polypetide isolated from the Sargasso Sea
MTNKEKVIVRFAPSPTGNLHIGGVRTAIFNWLFARANNGKFILRIEDTDRSRYDENSETSILSSLSWLGIDWDEGPIYQSKRKDIYREIANKLIDSGWAYYDDTTPEELDELRKQQIREKKPPRYDNRGRYKEISHSDYEENNNEETPIVVRFKVPDSGAKPFQDEIRGKVEFNLKEIDDFVILKSDGMPTYHLAHVIDDKLMDVTHVIRGEEWISSTPRHVLIHDALKWELPKYVHVPLILGKDKAKLSKRHGAESALEYKARGYLPEALLNFLALLGWSPGDNTEIMTLDEILSKFTINRILGHPAVFDPEKLEWMNGSYIRNLDDEYLSEQILDEVNKDLSEGGLISEKVDSNTLKSKIYEITPLIKERLKTLDESSNLVEYFFYENFEIDKDKLVPKKTEKSEIIIGLKRSIELIEKTKLFEPENLEIEFRALAEELGLKAGQLFFPIRIALTGRRESPPLFDTMKAIGTESSIKRLNNAINILE

SEQ ID NO: 187292 - protein, 305 aa, Unknown
  Bacterial polypetide isolated from the Sargasso Sea
MKLRIAPSPTGSLHIGNARTALFNWLYAKANGGTFVVRIDDTDIERSTEEFQKDILENLRWLGLDWDEGVEVGGEHGDYKQSSRFDRYREVANELLEKDLAYKDDGAIRFKVPSDRTIEFKDFVRGDMSFETSDVEDFVILRSDNTPTYHLASTVDDIDYGITIIARGEDILSSTPKHILIMEALDAAIPNFCHLPLLFGPDGKKLSKRHGDTSVEAFRQKGILNDAMFNYLCLLGWSPGDDIELFDSDFAISKFDLNKVLPNSATFDEKKLLWLNGQYIRSTSPNKFEEDSLQNIENQLSRELF

SEQ ID NO: 187293 - protein, 463 aa, Unknown
  Bacterial polypetide isolated from the Sargasso Sea
MSRVATRFAPSPTGPLHIGGIRTALFNWLYSKNQKGSFFLRIEDTDKERSKEEYKNQIIQSLKWIGIQNDGNEYIQSKKIDDHIKVANELLKNGHAYKCYCSNEEIEEQKNRAKQKKIPYIYDRKWRDKTEAEAPQNIKPAIRFKSKIDGSTILKDLVQGDIEIENNTIEDFIILRNDGSPTYNLSASVDDHQMNITHIIRGDDHKINTFKQMQIYLAMKWELPSFAHIPLIHTTEGKKLSKRDKASTLDDYSKIGVMPEALRNYLLRLGWSFKDKEIFTLEESIQHFSLEGIGKSPSKLDMSRILSMNEHYIKHMNENDLFNHLTKYCENYKDKFDSKSKNIKKSLSFLKNKAKTLEDIYINAQYLIKDKIKISSEDQKLLDNLAKTIFKDFLKEFENLTNINKENLEKIINNLIKKNKTNFKGVGQPLRVALVGSKFGPGIYDIIMSLDKNEVVKRLKAAI

SEQ ID NO: 187294 - protein, 414 aa, Unknown
  Bacterial polypetide isolated from the Sargasso Sea
EYKKQIIKSLKWIGVEHDGDEYIQSKKLDDHIKVANELLKNGHAYKCYCSKDEIEEQKLRAKQKKIPYIYDRKWRDKKEEEAPKDIKPVIRFKSKIDGTSILKDLVQGDVEIDNNTIEDFIILRNDGSPTYNLSASVDDHIMKMTHIIRGDDHKINTFKQIQIYQSMGWELPLFAHLPLIHTIDGKKLSKRDKASTLDDYSQIGIMPDALRNYLLRLGWSYEDKEIFNLDESIKYFNLEGIGKSPSKLDMSRILSMNEHYIKNIDENDLFDQLTKYCKLYKSEIEVDKKDKIKKSLTFLKNKAKTLEDIFNNSQYIMADEVNFNQDDINLIDDKAKKVISDFNSQIASVDKLSKETLEPIVNGLIKSNDTNFKGVGQPLRVALTGSKFGPGIYDIIISLGKEEVTKRLTNKKLV

SEQ ID NO: 187295 - protein, 424 aa, Unknown
  Bacterial polypetide isolated from the Sargasso Sea
MSKVATRFAPSPTGALHIGGVRTALFNWLFSKNQKGTFHLRVEDTDKERSKEEHKIQIIKSLKWIGIEHDGEEYIQSQKIEDHIKIANELLKKGNAYKCYCSAEEIEEQKKRARQKKLPYIYNRKWRDADEKDAPKDIKPVIRFKSKIEGNSKLKDLVQGDVEIENNTIEDFIILRNDGTPTYNLSATVDDHQMGMTHIIRGDDHKINTFKQIQIYQAMGWDVPEFAHIPLIHTIEGKKLSKRDNASTLDDYSKIGIMPDALRNYLLRLGWSYQDKEIFTLDESIKYFSLEGIGKSPSKLDMSRILSMNEHYIKTINENDLYKNLFEYCKINKEEIKNDKEIKIKSSLSFLKNKAKTLEDIYNNAKFIINDEVNFNKDDFKLIDDNAKKIISEFIKELSSISYINKENLEPVVNNLIKTNDTNF

SEQ ID NO: 187296 - protein, 349 aa, Unknown
  Bacterial polypetide isolated from the Sargasso Sea
EIYKKRAYELISTGQAYESEGAIRFKSDRSSNVIISDHVFGDVIVNADEMDDFIIMRSNGAPTYHFAVVIDDYESGITHVMRGDDHLKNTARHIQLMKAFDYPIPDFVHLPMILGPDGSRLSKRHGAMNVLHYRDEGFSSEALLNYLVRLGWSKGDQEIFSIQEMINGFDLSGINKASAKFDIEKLRWVNQQHLLNTNDDELKTMLEARSETAKELNDEIITNFINAYKNRANTINDLVSSCESLFSDDIKYDQASADKFLRKEIISALKDIVDSLKESSWNQESISGALKSVCEKHEIGFGKIGQPIRIAVTGGTQSPSIDQTLILLDQSIVVDRIEAAIEYIEKKSN

SEQ ID NO: 187297 - protein, 130 aa, Unknown
  Bacterial polypetide isolated from the Sargasso Sea
MDKKITHEVRVRFAPSPTGDPHIGAMRTALFNWAFAKKNKGKFILRIEDTDKKRQIEGSIENIIEGLNWLGLNYDEGPGIEGDYGPYIQSLRKNRYIDAVNKLLDDGNAYMCDLTPEELDKMKEEQKLQG

SEQ ID NO: 187298 - protein, 70 aa, Unknown
  Bacterial polypetide isolated from the Sargasso Sea
MSKVVTRFAPSPTGTLHIGGVRTALFNYIYAKQNNGEFLVRIEDTDRERSTKAYEKNILDTLSSIGLSPR

SEQ ID NO: 187299 - protein, 284 aa, Unknown
  Bacterial polypetide isolated from the Sargasso Sea
VVVVDDAAMAISHVIRGEDHIANTAKQLLLYKALGLPEPTFAHAPLILNGEGRKLSKRDGVTSINDFRAMGYTAEAIANYMTLLGWSVPEGMEERFTLPEAAAVFSFDRVNKAGARFDWDKLNWLNGQVLHALPAQQLLDELHPLWSEQGWTLPDDSSWGLDLCELLGPSLTLLKDGVDQAKPFFECPDLEDDGKSQLEAEGARDAVAQLLQTLEADPWDGGDMDRAKQLLGDAAKGAGVKKGVVMKSLRAALLGRLQGPDLMTTWSLLARIGEDLPRLRRCLG

SEQ ID NO: 187300 - protein, 430 aa, Unknown
  Bacterial polypetide isolated from the Sargasso Sea
MTKKIVTRFAPSPTGYLHIGGVRTALFNFVFSRKNNGTFLVRIEDTDKERSEEQYIDAIMDGLDWVGLNPDHEPIKQSDRFNIYEDEALRLVEEGKAYKDDGAIRLKVNKEGSTLVKDLVYGDIEFLNKELDDLVILRSDSSPTYHFCNVIDDNFQQVTHIIRGEDHLPNTPKQIQIVNALKYDGFEYAHLPLVLGEDKKRLSKRHAATDLMSYKEEGYLPEAVLNMLAKLGWSNTEKDIFTIDDLIKIFDVSDIQRSGAVFDKERLNFINQNHMAMKTDDELMDLLGIFNEQNGFSLSDHHDPKRLVRLCVGSGNNFSEISNFIKPFVIDFNEYNKADFNKHLLGSENVLNYFKESILSIDDWNEGTFEEIINSAMRDLDLPMPKIGLPLRVALVGRAKSPPLNSTIYLIDKNKTVERLDKALKTISEH

SEQ ID NO: 187301 - protein, 165 aa, Unknown
  Bacterial polypetide isolated from the Sargasso Sea
MNNKSSKKIRVRFAPSPTGDPHLGAMRTALFNWAFAKKNNGKFILRIEDTDKKRQVEGSIENIIEGLHWLGLNYDEGPEIGGDYGPYTQSQRKSLYINAVNKLLDDGNAYMCDLSTNDLEKMKEEQKLQGKPPGYNGYSRNRPRKELKGSKKNGLPIVVRLKVLF

SEQ ID NO: 187302 - protein, 427 aa, Unknown
  Bacterial polypetide isolated from the Sargasso Sea
MVKTRFAPSPSGYLHIGGVRTALYAWLFARNQGGKFLLRIEDTDVERSTEESKLSILEGLKWLGLNHDEEIVHQSERFEIYKEKANELIADGKAYESEGAIRFKSDRSSNVIISDHVFGDVEVNVDELDDFIIMRSNGAPTYHFAVVIDDYESGITHVMRGDDHLKNTARHIQLMEAFNYPIPDFVHLPMILGPDGSRLSKRHGAMNVLHYRDEGFSPEGLLNYLIRLGWSKGDQEIFSIEEMIAGFDLPGINKSSAKFDIEKLRWVNQQHLLNTNDNELKLMIEARSEIAKGQEDEIMTSFIKAYKNRANTINDLVSSCDSLFSDVINYDEASANKFLKQEILLPLEDVVVALKESNWNQESISEALKSVCEKHEIGFGKIGQPIRIAVTGGTQSPSIDQTLILLDQERVIDRINAGINYIKENSK

SEQ ID NO: 187303 - protein, 444 aa, Unknown
  Bacterial polypetide isolated from the Sargasso Sea
MKCRFAPSPTGKIHIGNARSAILNWIFCQKNQGEFVLRIDDTDANRSSKEFETSIKDDLKWLGLNWSYTFNQSSRQHIYNEKIQILKQKKRLYPCFETEEELALKKKSLLSSGKPPIYDRSSLNLSDEEVEKKIESGIQPHWRFKLDHENISWKDIIKGDVSFDAKNLSDPVLIRADGTLLYHLPSVIDDIEEKITHIIRGEDHIANTAYHIQIFKALESSIPSFAHHPFLVDETGKGFSKRLGSLSIENFRDEGYENISLLNYFLFIGSSSNIDPIKDLNEIVKKFDIQSLSRSSAKFSIESLRNLNENTIKLFSYNEISHKLKNIKSNFQKESFWRFIKNNISFVNQAKEWEEVITKINNAKDLNIDDNFINTAVDELPEDPFDETTWDHWTSKINKKTGLKGKDLFMPLRLILTGKSHGPELKYLLPLFDRDEILQKLGKI

SEQ ID NO: 187304 - protein, 326 aa, Unknown
  Bacterial polypetide isolated from the Sargasso Sea
MLKTRFAPSPTGNLHLGGARTALINYIISKKSASSKFYLRIEDTDHERSKQEYTDNITNSLKWLGLNWDEEIQVQSKRLSRHQEIARELLQKKRAFKCVCSEEKIAHQRKLIRENKNYSKKICTECKNDNDIQSKAEDFVVRLDVPNEGNLKINDTIQGDVSVANLELDDFILLRKDQSPTYMLSVVVDDHDLGINYIIRGDDHFINTFRQYYIYKFMNWDVPQYAHIPLIHGEDGSKLSKRHGAVNILDLKNDGYLKEAIINNLILLGWSNNKEKSETIELDEIIENFDLSNLSKSFSIFSFDKLDFFNNFYLRKENGIEEFIYF

SEQ ID NO: 187305 - protein, 456 aa, Unknown
  Bacterial polypetide isolated from the Sargasso Sea
MKKIVTRFAPSPTGTLHIGGLRTALFNYVYSKQNNGLFLVRIEDTDRERSKVEYEKNILDTLSSVGLVPDKKPINQSERNEIYVKAAEKIIESGSAYWCDCSQEELEEMRREQAAAGKKPMYDGRSRDLGLERSEKTVLRLATPLDGEIIVNDIIRGEIKFNNSELDDLILLRSDGTPTYHLCNVVDDYEQEVTTVIRGEDHISNTPRQIHIQNALGYPELEYAHLPLVLGPDKKRLSKRHAATSLEEYREAGYLDTAIINTLSRLGWSKGDDEVFYLDDLINNFNLSEVQKAGAIFDITKLDWLNSQHLANLSLQDFKSHLKPFLEDISIDINNHDNVELLIESMRTSENTLKGIAESLRPYYEEVSDYNEKAIEKFLDQEGKAILIELKELLSNINDWKEDSIDKVLKEYQQENNCPVPKVNQPIRIALTGSTKSPSMGLTLSFFSKDDSLNRI

SEQ ID NO: 187306 - protein, 272 aa, Unknown
  Bacterial polypetide isolated from the Sargasso Sea
MSFNCRFAPSPTGPLHIGGVRTALFNWLLAKKNKGKYFLRIEDTDKERSKDEFKKQIITSLSWLGIEHDGEEYIQSKKINKHVAVAEELIKKGFAYECYCSEKEINEQKEKCKKQGIPYVYNRKWRDAKDLKIPEDVKPVIRFKSKISGNTIIKDLVQGERNISNSTIEDFVILRKDKSPTYQLSATVDDHEMKITHVIRGDDHMINSFKQKQIYDAMGWEVPNFAHIPLIHSEQGKKLSKRDNASTLEDYVKIGIISDALRNYLLRLGWSY

SEQ ID NO: 187307 - protein, 175 aa, Unknown
  Bacterial polypetide isolated from the Sargasso Sea
MTTITRFAPSPTGLLHLGNIRTALINWLYAKNSGGKFILRIDDTDQERSKDEYISQIKYDLEWLGIDYDETFNQSSRFDRYKEQFEKLKSDGRIYACYETPEELERKRKLQMATGGKQVYDRSALKLTEQQIKNYENDGRKPHWRFLLQTERMKWNDLLKGEIDIDLTSLSDPSF

SEQ ID NO: 187308 - protein, 165 aa, Unknown
  Bacterial polypetide isolated from the Sargasso Sea
MSKVATRFAPSPTGALHIGGVRTALFNWLFSKNQKGTFHLRIEDTDKERSKDEHKKQIINSLKWLGIEHDGDEYIQSSKINDHIKVANELLKKGNAYKCYCSAEEIEEQKKRARQKKLPYIYNRKWRDIQETNTPNGIKPVIRFKSKIEGSTILKDLVQGDVEIE

SEQ ID NO: 187309 - protein, 263 aa, Unknown
  Bacterial polypetide isolated from the Sargasso Sea
MKAIVTRFAPSPTGTLHIGGLRTALFNYVYAKQNNGKFLIRIEDTDTERSTKEFEKNILDNLTSIGLQPDEDPINQSERNEIYLKAAEKIFQSGNAYWCDCSQDELEEMRRAQTAAGKKPMYDGRSRNLGLDRSNKTVLRLATPENGEIIVNDLIRGEIKFNNNELDDLILLRSDGSPTYHLCNVVDDYEQKVTTVIRGEDHISNTPRQIHIQNALGYPELEYAHLPLVLGTDKKRLSKRNAATSLEEYRDKGYLDSAILNSL

SEQ ID NO: 187310 - protein, 409 aa, Unknown
  Bacterial polypetide isolated from the Sargasso Sea
QIINSLKWIGIKFDGEEYIQSKKIDDHIKIAHELLNKGNAYKCYCSSEEIEEQKKRAKQKKIPYIYNRKWRDKKETDAPKDIKPVIRFKSKIDGTSILNDLVQGDVEIENNTIEDFVILRNDGTPTYNLSAVVDDYQMNMSHIIRGDDHKINTFKQIQIYQAMKWKIPSFAHIPLIHTIDGKKLSKRDKASTLDDYSKIGIMPDALRNYLLRLGWSYKDKEIFTIEESIKYFNLEGIGKSPSKLDMSRILSMNEHYIKNMNENDLFDQLIEYCNKFKKEIKTDKEDKIRKSLSFLKNKAKTLEDIFINGQYIITDEVIFNQDDIKLIDEKAKKVITDFKAQFEKIDQPSREILEPVINGLIKSNNTNFKGVGQPLRILLTGSKFGPGIYDIILSLGKKEVQKRLDAKIA

SEQ ID NO: 187311 - protein, 464 aa, Unknown
  Bacterial polypetide isolated from the Sargasso Sea
MKKVATRFAPSPTGPLHIGGVRTALFNWLYSKNKSGKFYLRIEDTDKERSKEEHKIQIINSLEWMGIKHDGEEYIQSKMIGEHVTIAKRLLENGNAYKCFCSAEEIEEQKKRAKQKKIPYVYNRKWRDISEDQAPKGIKPVIRFKSKIEGTSLLKDLVQGNVEIENNTIEDFVILRNDETPTYNLSASVDDHNMEMTHIIRGDDHKINTFKQIQIYEALGWDIPQFAHIPLIHTIDGKKLSKRDNASTLEDYTKIGILPESLRNYLLRLGWSYKDKEIFSLDESIKLFNLEGIGKSPSKLDMSRILSMNEYYIKNSEENTLYKKLKEYCEMYKERIKEDKENTIKSSLTFLKNKAKTLEDIFNNSKYILNDKVIFNNNDKELINDEAKKIINLFKEKISELEVFDRENLEQIINALIKLNNTNFKGIGQPLRIMLTGSKFGPGIYDIILSLGKSEVIKRLGNIG

SEQ ID NO: 187312 - protein, 422 aa, Unknown
  Bacterial polypetide isolated from the Sargasso Sea
ICSSPSGYLHIGGVRTALYAWLYARNQGGKFLLRIEDTDIERSSEESKLSILEGMKWLGLEHDEEIIHQSERFEVYRARADELISAGKAYESEGAIRFKSDRSSNVIISDHVFGDVEVNGDELDDFIIMRSNGAPTYHFAVVIDDFESGITHVMRGDDHLKNTARHIQLMKAFDYPIPDFVHLPMILGPDGSRLSKRHGAMNVLHYKEEGFSSEALLNYLVRLGWSKGDQEIFSIQEMIDGFDLVGINKASAKFDIEKLRWVNQQHLLNTDDSELKMMLEARSDAAKGLNDEVTINFINAYKNRANTINDLVSSCDNLFSDEIKYDQASADKFLKKEILSPLKDVVDALKRSEWNQESISEALKSVCEKHEIGFGKIGQPIRIAVTGGTQSPSIDQTLILLDQSIVVDRIEAAIEYIIENSK

SEQ ID NO: 187313 - protein, 215 aa, Unknown
  Bacterial polypetide isolated from the Sargasso Sea
MSFNCRFAPSPTGPLHIGGVRTALFNWLLAKKNKGKYFLRIEDTDKERSKEEFKKQIISSLAWLGIEHEGEEYIQSKNMSKHVTVAEDLIKKGFAYECYCSEEEINEQKEKCKKQGIPYVYNRKWRDAKDLKIPKDVKPVIRFKSKISGNTIIKDLVQGERNISNSTIEDFVILRKDKSPTYQLSATVDDHEMKITHVIRGDDHMINSFKQKQIY

SEQ ID NO: 187314 - protein, 384 aa, Unknown
  Bacterial polypetide isolated from the Sargasso Sea
MSERKVRVRFAPSPTGPLHIGGVRTALYNYLFAKKNKGDFILRIEDTDQTRYVPGAEEYIVKALEWSGLTIDEGPGIGGEFGPYRQSERKKNYKEFADQLIKSEHAYYAFDSAEDLVHMREMAKKAKMPNWQYNSITRTSMKNSLTLSSEEVEKKLANGDPYTIRIKMPRNEDVRFYDEIRGWVIVNTNNMDDKVIFKGDGMPTYHLANVVDDYKMKISHVIRGEEWLPSAPLHVLLYKYLDWEASMPKFAHLPLILKPDGNGKLSKRDGDRLGFPVFPLEWKDPNSGEISSGYRENGYFNDAFINMLAFLGWNPGNAKELYSIEELIHDFTLERVGKSGAKFDPEKTKWFNQQHLRNKSNNELALIMKENTSYEVDVCYLEGV

SEQ ID NO: 187315 - protein, 415 aa, Unknown
  Bacterial polypetide isolated from the Sargasso Sea
MKWLGLNWSEPVLFQSERSPIYKEEIQKLLDNGGAYRCFLTKEELELARDKAKKDGGEFRVPKTYRNKSLDEQKSLLNAGQSFTIRLKIPTKGSTSFVDKVYGKIKIDNKEIDDFIIVRSDGTPTYNFTVVVDDNDMSINHVIRGEDHISNTPKQILIYNALNYTVPNFAHLPMILGPDKKRLSKRHGAAGIEDFKIQGYSVDALLNYIVMLGWNPGSEDELFSLDDMISKFDINKIQKKGAVYDEKKLHWVAGQHMLMKSEKSLLHEIRKENPNWQKHSKDSYICNVLALMKIRAKTLIELKDACIYFFSDPEKYDEKAILKRWKDKSVNKLIINFINRLEELTSWSQMEIDQALRDTSQDMAVSAAKLIHPVRLAVSGRSYGPGLFELLELLGKMTTLRRLKKAITIFPLKNV

SEQ ID NO: 187316 - protein, 308 aa, Unknown
  Bacterial polypetide isolated from the Sargasso Sea
IESSQVEDQVILKSDGFPTYHLAVVVDDHSMQISHVVRGEEWLPSFPKHLLLYRYFGWDPPEFIHLPLILNEERAKLSKRHGAVSVEEFCDRGYLPQALLNFIALLGWNPGDDREVLSLEEMVDEFRFERVSKSGAVFDREKLNWMNQQYLLKLPEEEYFRMIDHVIPKGDYHDQDPGKIRQAAEILKTRLVTLSDLNQKLGLFFEENPEIKDLQAIEVLKEDNSKTVLKEFLQQAETLDQLTSENLGQLVKSVQKTTGIKGRGLWMPLRCAITREVSGPELPAMLYFFGGEKCLHLIRQTLENPSLN

SEQ ID NO: 187317 - protein, 411 aa, Unknown
  Bacterial polypetide isolated from the Sargasso Sea
KNKIIKSLKWIGIEHDGEEYIQSQKIEDHIKIANELLQKGNAYKCYCSAEEIEEQKKRARQKKLPYIYNRQWRDADEKDAPKGVKPVIRFKSKIEGNSKLKDLVQGDLEIENNTIEDFIILRNDGTPTYNLSASVDDHQMGMTHIIRGDDHKINTFKQIQIYQAMGWDVPEYAHIPLIHTIEGKKLSKRDNASTLDDYSKIGIMPDALRNYLLRLGWSYQDKEIFSLEESIKHFNLEGIGKSPSKLDISRILSMNEHYIKTIDENDLYQYLVEYCKIYKEEIQNDKETKVKTSLSFLKNKAKTLEDIYNNARFILNDKVNFNEDDVKLIDHKAKKIISEFIKELSSITNINRENLEPLVNNLIKTNDTNFKGVGQPLRIALTGSKFGPGLYDIIMALGKKDVLKRLAKIIP

SEQ ID NO: 187318 - protein, 339 aa, Unknown
  Bacterial polypetide isolated from the Sargasso Sea
MRERARFAPSPTGPLHIGGVRTALFNYLIAKKGGGDFILRIEDTDSERTVDGAEEYIIESLKWLGLVPDEKPYKQSERKGLYLKWVEVLLEKGLAYHCFDTQQELKEAREKHGSDFKYRHDKNLGLKNTFTINKEEARGLIEKGGFVVRMVIPKNETILVNDEIRGKLSFKSNDLEDKIILKSDKMPTYHLANVVDDNDMKITSVVRGEEWLSSLPFHVLLYRYFGWSPPKFFHLPLILKTAGQGKLSKRDAEKQGFPVFPIRWKDSVGFKEHGFLPEGLINYLALLGWSNESDKEMYTLEELIVSFDSSRIQKSGARFDIQKATWINHLHLQGSSSKK

SEQ ID NO: 187319 - protein, 276 aa, Unknown
  Bacterial polypetide isolated from the Sargasso Sea
MVKTRFAPSPSGYLHIGGVRTALYAWLYARNQGGKFLLRIEDTDIERSSEESKLSILEGMKWLGLDHDEEIIHQSERFEIYKKRADELISAGKAYESEGAIRFKADRSSNVIISDHVFGDVEVNADEMDDFIIMRSNGAPTYHFAVVIDDFESGITHVMRGDDHLKNTARHIQLMKAFDYPIPDFVHLPMILGPDGSRLSKRHGAMNVLQYRDDGFSSEALLNYLVRLGWSKGDQEIFSIQEMIDGFDLVGINKASAKFDIEKLRWVNQQHLLNSD

SEQ ID NO: 187320 - protein, 168 aa, Unknown
  Bacterial polypetide isolated from the Sargasso Sea
MSFNCRFAPSPTGPLHIGGVRTALFNWLLAKKNKGKYFLRIEDTDKERSKDEFKKQIIASLAWLGIEHDGDEYIQSKNISKHVAVAEELLKKGFAYKCYCSEEEINEQKEKCKKQGMPYVYNRKWRDAKDLKIPEGVKPVLRFKSKISGNTIIKDLVQGDRNISNSTI

SEQ ID NO: 187321 - protein, 426 aa, Unknown
  Bacterial polypetide isolated from the Sargasso Sea
YLRIEDTDKERSKDEFKKQIIESLSWVGIKHDDKEFIQSKNINKHKEIAEKLLKKDFAYKCYCSEEEIKEQKEKCKKQGIPYVYNRKWRDSKDLKIPKDVKPVIRFKSKVSGNTVIKDLVQGDINISNSIIEDFVILRQDGSPTYQLSATVDDHSMKISHVIRGDDHKINTFKQKQIYEAMKWDIPLFAHIPLIHSEKGSKLSKRDKSSTIDDYVKVGILPDALRNYLLRLGWAHKDKEIFSLDESIKLFDLKGVGKSPSKLDMSRILSLNEHYIKNIDEKILFDFLKSYAQRYKKTIDPSKEDVVFKSLNFLKNKAKTLNDIYQNSQYILSKEISISDEDLKLLDANSKKIINDFLNEFKNINNPNKESVEKLINSLISKYKTNFKGVGQPLRIALVGSRFGPGIYNIILSLTKDEVVKRISKIN

SEQ ID NO: 187322 - protein, 446 aa, Unknown
  Bacterial polypetide isolated from the Sargasso Sea
MHIGGVRTALFNYVYAKQKDGLFLIRIEDTDRERSTKEYEKDILDNLSSIGLSPDQKPINQSERSEIYTKAAEKIIESGNAYWCDCTPEELDKMRNEQTAAGIKPMYDGRSRNLGLERSEKTVLRLATPEDGDIIVNDIIRGEIKFNNNELDDLILLRSDGTPTYHLCNVVDDYEQKVTTVIRGEDHISNTPRQIHIQNALGYPELEYAHLPLVLGTDKKRLSKRNAATSLEEYREKGYLDSAILNTLARLGWSKGDKEIFYLDDLIKDFDIKEVQKAGAIFDISKLDWLNSQHLANLSLEDFKNQLEPFLDKLNININDHHDVDLLIQSMRTSDNTYSGIAESLIPYYREIETYDEKAITKFIKDKSTLNSLKDIFVNIDNWDENSIDIVLKEFQTQNELSVPSVNQPIRIALTGSTKSPSLGLTLAIFGREKSIERVNHLLDYL

SEQ ID NO: 187323 - protein, 462 aa, Unknown
  Bacterial polypetide isolated from the Sargasso Sea
GGLRTALFCWLYARKNGGKFIFRLEDTDQKRIFEGAENKLATTLEWSGIEIDEGPQYGGKHGPYRQSERLDIYGKFTSLLLEEGNAYRCFCTSERLEKLRNEQRKKGYNPRYDGFCRNIPKLEASRRVESGEDYVVRMKIPEVPETMVLNDLIRGIVSIDTSQSEDQVIVKSDGFPTYHLAVVIDDYLMKITHVVRGEEWISSFPKHLLLYRYFGWDPPQFAHLPLILNPDRTKLSKRQGDVAVEDFRNNGYLPESLLNFVAMLGWSPREDKELFTIPELIREFSLERVNKSGAIFDQEKLKWMNQQYIQKLELDDLQDRLNPFIKKSRYSGKDPKILRKIIKILQPRLVTLSEIEDRLPLFFENNPKASNPKVLKVLGEEKSKQVLTNFLKQAESFEKLTKNNLVELMKKVQNETKIKGKNLWIPLRYAITLDTEGPDLNLIVDFFGKEKCMHLARSALKF

SEQ ID NO: 187324 - protein, 336 aa, Unknown
  Bacterial polypetide isolated from the Sargasso Sea
MKKVATRFAPSPTGPLHIGGVRTALFNWLYSKNQKGNFYLRVEDTDKERSKDEYKDQIIKSLKWIGINYDGEEYIQSKKIEDHIKVANELLENGHAYKCYCSSEEIEEQKKRARQKKIPYIYNRKWRDKKEEDAPKDIKPVIRFKSKIDGNSILKDLVQGDVEIDNNTIEDFVILRNDGTPTYNLSASVDDHQMNMTHIIRGDDHKINTFKQIQIYQAMKWDLPSFAHIPLIHTIEGKKLSKRDKASTLDDYSKIGIMPDALRNYLLRLGWSYKDKEIFTLDESIEHFNLEGIGKSPSKLDMSRILSMNEHYIKNIDENDLFDQLIEYSKLYKSEI

SEQ ID NO: 187325 - protein, 76 aa, Unknown
  Bacterial polypetide isolated from the Sargasso Sea
MNKSSVRTRFAPSPTGYLHIGGARTALFAWLFAKSHEGDCLLRIEDTDKERSKEEYTEEIIRSFEWLGIEFDEDVV

SEQ ID NO: 187326 - protein, 173 aa, Unknown
  Bacterial polypetide isolated from the Sargasso Sea
MQRNSVKVRFAPSPTGELHLGGARTALFNWLYAKKCQGSFFLRIEDTDKERSSDIYTDQIIESLKWLGLHWDDPIIYQSGRIDRYKFYLNRLLEENKAYRCFCSKDDLNKSKNDEYFSYPGTCRNLSSEDIKSKLNQGISFAIRIKIDEGKTEFNDLIYGEIKVDHKELDDFI

SEQ ID NO: 187327 - protein, 465 aa, Unknown
  Bacterial polypetide isolated from the Sargasso Sea
MSKVATRFAPSPTGALHIGGVRTALFNWLFSKNQKGTFHLRIEDTDKERSKEEHKIQIINSLKWIGIEHDGEEYIQSQKIEDHIKIANELLKKGNAYKCYCSAEEIEEQKKRARQKKMPYIYNRKWRDADEKDAPKDIKPVIRFKSKIEGNSKLKDLVQGDVEIENNTIEDFIILRNDGTPTYNLSATVDDHQMGMTHIIRGDDHKINTFKQIQIYQAMGWNVPEFAHIPLIHTIEGKKLSKRDNASTLDDYSKIGIMPDALRNYLLRLGWSYQDKEIFTLDESIEFFNLEGIGKSPSKLDMSRILSMNEHYIKTIDENDLYQNLFEYCKIYKKEIKNDKETKVKSSLSFLKNKAKTLEDIYNNSKFIINDEVNFNQDDLKLIDDKAKKIISEFIKELSIISNINKESLEPVVNNLIKTNDTNFKGVGQPLRIGLTGSKFGPGLYDIVIALGKEEVLKRLTKIIS

SEQ ID NO: 187328 - protein, 276 aa, Unknown
  Bacterial polypetide isolated from the Sargasso Sea
MSKVATRFAPSPTGALHIGGVRTALFNWLFSKNQKGTFHLRIEDTDKERSKEEHKIQIIKSLKWIGIEHDGEEYIQSQKMENHIKIANELLKKGNAYKCYCSAEEIEEQKKRARQKKMPYIYNRKWRDADEKDTPKDIKPVIRFKSKIEGNSKLNDLVQGNVEIENNTIEDFIILRNDGTPTYNLSATVDDHQMGMTHIIRGDDHKINTFKQIQIYQAMGWDVPEFAHIPLIHTIEGKKLSKRDNASTLDDYSKIGIMPDALRNYLLRLGWSYKDK

SEQ ID NO: 187329 - protein, 433 aa, Unknown
  Bacterial polypetide isolated from the Sargasso Sea
MIITRFAPSPTGFLHIGGVRTALFNWLYAKNNSGKFLLRIEDTDRERSSNEAIDRIIDGLKWLGLENDGEIVYQHKNEKRHIEVAHMLLESGFAYRDWELEDDFDNLEKAHAIRFKIPDDGETIINDKVQGDVTFQNKEIEDFVLLRSDGTPTYMLSVVVDDYDMNISDIIRGDDHLINAAKQKLLYDSLKWDCPTFSHIPLIHGQDGSKLSKRHGSLGIEHYIEEGYLPEAIINYLLRLGWSHGDQEIFSLEEMINYFSIEKIRKSPSKFNIEKLNDINSIYLKNLSLETLITRIDSSYINLDKDKVKSISIIMPEILKRYKNIKDIKKNISFITNERPIEIDEDVTNLINNESKSYLEKLSKILKKLDKWDANEIEKTIKKFLKDEELNFKDIGLPLRAVLLGYLSPIGINTIIESLGKDEVLGRIEDIIR

SEQ ID NO: 187330 - protein, 344 aa, Unknown
  Bacterial polypetide isolated from the Sargasso Sea
GQLHLGGARTALSNYLFTKSQGGKFLVRIEDTDLERSKKEYTDQICQSLDWLGLKWDDELVFQSQNTSNYKSHIDTLLNDNKAYMCFASKEDLDEIRKESNSFHYPGIWRDRDVSEINSEIEKGSPFTIRLKTPQDGRTSFEDLIYGNISVENNEIDDFIIARSDGSPVYNLTNVVDDNSMEITHVVRGEDHISNTPKQILIYHALGFKEPIFAHLPMILGEDKKRLSKRHGAAGVNEYKRMGYQADALLNYLALLGWNPGTEDEIFDLASLIECFDIEKVQKKSAIYDQKKFNWISSQHLMKENSDKVLNRIKSIDPGWGESKSQDSLIKIIDLMKPRSKFSF

SEQ ID NO: 187331 - protein, 459 aa, Unknown
  Bacterial polypetide isolated from the Sargasso Sea
MKVTRFAPSPTGNLHIGGVRTALFNYVFSKQSGGLFLIRVEDTDRERSKKEYEEDIISGLEWLGISPDKTPIRQSERSDIYQKAADKLIDSGNAYWCDCSPEDLEEMREQQAADGKKPMYDGRSRNLGLERSDKTVLRLATPLEGETVVNDLIRGEITFNNSELDDLILLRSDGTPTYHFCNVVDDFDQGVTTVIRGEDHISNTPRQIHIQKALGYPDLEYAHLPLVLGEDKKRLSKRHAATSLNAYKEMGFTKETIINALALLGWSTENEIFSIDELIESFKLENVQKAAAVFDLKRFNWVSSQQLAKLDENSFFEVIKPFMENEDINEDYPNYKKILLAMRTSKTNLKDIAHATRPFFFELDGYDEKGVKKFLNESLETLTFALEVLSKLAEWNETELDMALIKVRDYFNLPIPKVNQPMRIALVGSTVSPSLGLTLELFGKEKSLERIQKAIDFIS

SEQ ID NO: 187332 - protein, 433 aa, Unknown
  Bacterial polypetide isolated from the Sargasso Sea
MIITRFAPSPTGFLHIGGVRTALFNWLYARNNSGKFLLRIEDTDRERSSNEAIEKIIDGLKWLGLENDGEIVYQHKNEKRHIEVAHMLLESGFAYRDWELEDDFGNLEKAHAIRFKIPDDEETIVNDKVQGDVVIQNKEIEDFVLLRSNGTPTYMLSVVVDDYDMNISDIIRGDDHLTNAAKQKLIYDSLKWDCPTFSHIPLIHGQDGSKLSKRHGSLGIEYYKEEGYLPEAIINYLLRLGWSHGDQEIFSLEEMINYFSIEKIRKSPSKFDIEKLNDINSIYLKNSSFESLIARIDTSYSNLTKDKIKSISIVMPEILKRYKNIKDIKKNISFITNKRPIKIDKDVTNLINGESISCLEKLSKILKKLDKWDANEIEQTIKKFLKDEELNFKDIGLPLRVVLVGFLSPIGINTIIESLGKDEVLGRIEDIIK

SEQ ID NO: 187333 - protein, 298 aa, Unknown
  Bacterial polypetide isolated from the Sargasso Sea
NTIEDFVILRNDNSPTYNLSAAVDDYQMKVTHIIRGDDHKINTFKQMQIYLAMKWELPNFAHIPLIHTLEGKKLSKRDKASTLDDYSKIGIMPEALRNYLLRLGWSYKDKEIFTLDESINYFNLEGIGKSPSKLDISRILSMNEHYIKNMNENDLYKRLNEYCNQYKKKIESSKEDKIKKSLIFLKNKAKTLEDIYNNSKYILFDEVNFDEKDLKLIDEKSKKIISDFIIEITKQKEISKNVLEPIINNLIKKHDTNFKGVGQPLRIALTGSKFGPGIYDIMLSLGKLDIEKRLSKII

SEQ ID NO: 187334 - protein, 463 aa, Unknown
  Bacterial polypetide isolated from the Sargasso Sea
MSFICRFAPSPTGPLHIGGVRTALFNWLLAKKNKGKFYLRIEDTDKERSKEEFKKQIIDSLAWIGIKHDGKEYIQSKNINKHKEIAEELLKKGFAYKCYCSEEEIKDQKEKCKKQGIPYVYNRKWRDPKDLQIPKDVKPVIRFKSKVSGNTVIKDLVQGDINISNSIIEDFVILRQDGSPTYQLSATVDDHLMKISHVIRGDDHKINTFKQKQIYEAMKWDIPQFAHIPLIHSEKGSKLSKRDKSSTIDDYVKIGILPDALRNYLLRLGWAYKDKEIFSLDESIKLFDLKGVGKSPSKLDMSRILSLNEHYIKNIDEKILFGFLKSYAQKYKKTIDPSKEEVVIKSLNFLKNKAKTLDDIYQNSQYILSKEISISPEDLKLLDANSKKIIGDFLNEFKNINNPNKESIEKLINSLISKYKTNFKGVGQPLRIALVGSRFGPGIYNIVLSLTKDEVVKRISKIN

SEQ ID NO: 187335 - protein, 333 aa, Unknown
  Bacterial polypetide isolated from the Sargasso Sea
MLPKDIKPVIRFKSKIEGNSQLKDLVQGVVEIENNTIEDFIILRNDGTPTYNLSATVDDHQMGMTHIIRGDDHKINTFKQIQIYQAMNWDVPEFAHIPLIHTIEGKKLSKRDNASTLDDYSKIGIMPDALRNYLLRLGWSYQDKEIFTLKESIEHFNLEGIGKSPSKLDMSRILSMNEHYIKTIDENDLYRCLNEYCKIYKEDIQDDKETKVKSSLSFLKNKAKTLEDIYNNSKFLINDEVNFNEDDIKLIDYKAKKIISEFINELSSISNINRDNLEPVVNNLIKINDTNFKGVGQPIRIALTGSKFGPGLYDIVMALDKEEVLKRLTKIIS

SEQ ID NO: 187336 - protein, 450 aa, Unknown
  Bacterial polypetide isolated from the Sargasso Sea
HIGGIRTALFNWLYSKNKGGSFFLRIEDTDKERSKDEYKDQIIKSLRWIGIENDGDEYIQSKKINDHINVANELLKNGHAYKCYCSSEEIEEQKKRAKQKKIPYIYDRKWRDKKETDAPKDIKPVIRFKSKIDGTTVLKDLVQGSIEIDNNTIEDFIILRNDGSPTYNLSASVDDHQMKMTHIIRGDDHKINTFKQIQIYQAMKWELPSFAHIPLIHTIEGKKLSKRDKASTLDDYSKIGIMPDALRNYLLRLGWSYKDKEIFTLDESIKHFNLEGIGKSPSKLDMSRILSMNEYYIKNIDENNLFDQLIDYCKLYKSEIKSDKKDKIKKSLIFLKNKAKTLEDIFNNGQYIMIEEVNFNQDDFKLIDNKAKKVISDFNSRLADVDNLNKETLEPLVNELIKSNDTNFKGIGQPLRIALTGSKFGPGIYDIIASLGKEEVSKRLTNKKLC

SEQ ID NO: 187337 - protein, 183 aa, Unknown
  Bacterial polypetide isolated from the Sargasso Sea
MKIVATRFAPSPTGPLHIGGVRTALFNWLYSKNKGGKFYLRIEDTDKERSKKEFKNQIINSLKWIGINYEDNEYIQSDKINDHINVANELLKKGFAYRCYCSSDEIEEQKKRAKQKKIPYIYNRKWRDKSESDAPKGIEPVIRFKSKVEGKTILKDLVQGNIDIENNTIEDFIILRADGSPYI

SEQ ID NO: 187338 - protein, 176 aa, Unknown
  Bacterial polypetide isolated from the Sargasso Sea
MKKVATRFAPSPTGPLHIGGVRTALFNWLYSKNKSGKFYLRIEDTDKERSKEEHKIQIINSLKWMGIEHDGEEYIQSKMIGEHINIAKKLLENGNAYKCYCSAEEIEEQKKRAKQKKIPYVYNRKWRDISEDQAPSDIKPVIRFKSKIEGTSLLKDLFQGNVEIEIILLRIYYFKK

SEQ ID NO: 187339 - protein, 102 aa, Unknown
  Bacterial polypetide isolated from the Sargasso Sea
MSKVATRFAPSPTGPLHIGGIRTALFNWLYSKNQKGSFFLRIEDTDKERSKVEYKNQIIQSLKWIGIQNDGNEYIQSKKENDHIKVANELLKNGHAYKCYVQ

SEQ ID NO: 187340 - protein, 148 aa, Unknown
  Bacterial polypetide isolated from the Sargasso Sea
MAFICRFAPSPTGPLHIGGVRTALFNWLLARKNKGKFYLRIEDTDKERSKDEFKKQIIESLSWVGIKHDDQEFIQSKNINKHKEIAEELLKKGFAYKCYCSEEEIKEQKEKCKKQGIPYVYNRKWRDPKDLQIPKDIKPVIRFKSKVS

SEQ ID NO: 187341 - protein, 466 aa, Unknown
  Bacterial polypetide isolated from the Sargasso Sea
MSKVATRFAPSPTGALHIGGVRTALFNWLYSKNQKGTFHLRIEDTDKERSKDEYKVQIINSLKWIGIEHDGNEYIQSTKIDDHIQIANELLKNGNAYKCYCSNEEIEEQKKRARQKKLPYIYNRKWRDADEKDIPKDINPVIRFKSKIKGSSVLKDLVQGDVEIENNTIEDFIILRNDGTPTYNLSATVDDHQMGMTHIIRGDDHKINTFKQIQIYLAMGWEVPNFAHIPLIHTIEGKKLSKRDNASTLDDYSKIGIIPDALRNYLLRLGWSYQDKEIFTLDDSIKYFNLEGIGKSPSKLDMSRILSMNEHYIKTIDEQELFKSLMEYCEIYKEKIKPEKEEKIKNSLSFLKNKAKTLEDIFNNAKFIILDKINFNPDDLKLIDDKAKKIIQEFKSEISSLNKLNREVLEPIVNNLIKKHETNFKGVGQPLRVILTGSKFGPGLYDILISLGKEEVDQRLGNKIIG

SEQ ID NO: 187342 - protein, 286 aa, Unknown
  Bacterial polypetide isolated from the Sargasso Sea
YHLAVVIDDHESGITHVMRGDDHLKNTARHIQLMNAFNYPIPQFVHLPMILGSDGSRLSKRHGAMNVLHYRDEGFSPEALLNYLVRLGWSKGDQEIFSIKDMTDGFDLSGINKASAKFDIEKLRWVNQQHILNTDNSELKMMLEVGSDTAKGLNDEVITNFINAYKNRVSTINDLVSSCDSLFSDEIKYDQASADKFLKKAILSPFKDVIDALKRSEWNQESISETLKSVCEKHEIGFGKIGQPIRIAVTGGTQSPPIDQTLILLDQSVVVDRIEAAIKYIEENFN

SEQ ID NO: 187343 - protein, 482 aa, Unknown
  Bacterial polypetide isolated from the Sargasso Sea
MIERARFAPSPTGPLHIGGVRTALFNYLIAKKSGGKFILRIEDTDSKRSVAGAEDHIKDSLKWLGLNIDEGPIKQSERRILYKKRVDELLKKGLAYYAFDSSTELERARKESNGEFKYNHETRKNMINSFTVSEEEARSRIERGGYVIRMIVPEKKTILVNDEIRGPLSFNSDEIEDKVIMKSDGMPTYHFANVVDDHDMKITSVVRGEEWLSSLPSHVTLYNHFGWSPPKFYHLPLILKSTGQGKLSKRDAEEQGHPVFAVQWEESKGFKESGYTPEGILNYLALLGWKGKGDDEKYSLNELVKKFNSKDINKSGARFDIKKAVWINHLHLRDFSSKKILSLCEQANVLLEKKYNADVCEEIIDLVKERLNTLFDVEKEVFVFVSQPKNYDKEVIEKITRNTIYNVLNFCKLNKELISEPSLLKDSLMSFGSEKQISFGNIMKTLRLCIVGSLSGPDLFKIMDIIGPEETLHRIENLINKI

SEQ ID NO: 187344 - protein, 202 aa, Unknown
  Bacterial polypetide isolated from the Sargasso Sea
MEVRTRIAPSPTGDPHVGTAYIALFNWAFARANKGKFLLRIEDTDLARSTKSSEEAIFSSLKWLGLDWDEGPDCGGDFGPYRQSERGEIYAGYVDRLLKAGHAFRCFCSKDRLDELRTSQQKAGETTRYDGLCLSLSKEDVDQKIAAGETSVVRMKVPETGECVFEDRLRGSISIGYDQIDMQVILKADDMPTYHLAVVVDD

SEQ ID NO: 187345 - protein, 104 aa, Unknown
  Bacterial polypetide isolated from the Sargasso Sea
MKITRFAPSPTGYLHIGGVRTALYNWLIAKKTNGKFLLRIEDTDRERSKDIFSKDILDSLAWLNIDFNESIVYQSKRTDIYKDAISTLLSSGKAYYCDMTQDEL

SEQ ID NO: 187346 - protein, 469 aa, Unknown
  Bacterial polypetide isolated from the Sargasso Sea
MTTKTRFAPSPTGFLHVGGARTALYSWLQARANNGEFVLRIEDTDIERSTQAACDAILEGMNWLGLTWDEGPYYQTKRFDRYNEIITQMLEQGTAYKCYCSRERIDALREAQAANGEAQKYDGCCRDLPARDTDEPFVVRFKNPIGGSVVFDDHVRGRIEFSNDALDDLIIARTDGVPTYNFCVVVDDWDMGITCVVRGEDHINNTPRQINILKALGAPIPEYAHVSMILGDDGAKLSKRHGAVSVMQYRDDGYLPEALLNYLVRLGWSHGDQEVFSLEEMKQYFKLDDINKAPSAFNTEKLVWLNQHYIKTLDPEYVASHLQWHMDDQKIDTSNGPALSAVVTALAERAKTLKELAASSRYFYEDFAEFDAEQAKKHLRGVALEPLQLVQQKLAALPEWTVEGIHQAIEATAAELEVGMGKVGMPLRVAVTGAGQSPGLDITLFLIGKARSEQRISKAIEFVADRINS

SEQ ID NO: 187347 - protein, 241 aa, Unknown
  Bacterial polypetide isolated from the Sargasso Sea
MKVNKTRFCPSPTGLLHLGNLRTSLFSFLMAKKTNGSFLLRIEDTDLERSKKEFSDAICADLKWVGLEWDEGPEAGGKEKSYYQSQRLNLYEEFYEKLLDQDLIYPCFTSEEELKIIRRNQIAAGQPPRYTGVWSQASEEEVQEELDKGNKPVYRFRIPKKRTISFTDLVKGEQSFSTDDLDDFIVRKKDSSPTFMFANAIDDSLMGVDLVLRGDDHLSNTPRQIALLESLNLSLPRYAHV

SEQ ID NO: 187348 - protein, 116 aa, Unknown
  Bacterial polypetide isolated from the Sargasso Sea
MSKVATRFAPSPTGPLHIGGIRTALFNWLYAKNKNGSFYLRIEDTDKERSKDEYKEQITKSLKWIGVENDGDEYIQSKKIEDHIKIANILLEKGFAYKCYCSTEEIEEQNLEQNKK

SEQ ID NO: 187349 - protein, 88 aa, Unknown
  Bacterial polypetide isolated from the Sargasso Sea
MKLRIAPSPTGNLHIGNARTALFNWLYAKANNGKFLVRIDDTDTERSTDEYEKNIIENLRWLGLDWDEGIEVGESNETYRQSSRLKDI

SEQ ID NO: 187350 - protein, 401 aa, Unknown
  Bacterial polypetide isolated from the Sargasso Sea
MSKVATRFAPSPTGPLHIGGVRTALFNWLYSKNQKGTFHLRIEDTDKERSKDEHKIQIIKSLKWLGIEHDGDEYIQSTKINDHVKIANELLKNGKAYKCYCSNDEIEEQKKRAKQKKLPYVYNRKWRDLTEADAPKDIKPVIRFKSKIEGTSILNDLVQGDVKIENNTIEDFIILRNDGTPTYNLSATVDDHQMKMTHIIRGDDHKINTFKQIQIYNAMKWELPKFAHIPLIHTIEGKKLSKRDNASTLDDYSKIGIMPDALRNYLLRLGWSYQDKEIFSLEESIKYFNLDGIGKSPSKLDMSRILSMNEHYIKSIDENELYKNLVEYCETYKEKIKPEKEVKIKTSLSFLKNKAKTLEDIFNNAKYIILDEVNFLNEDLKLIDEKTKKIISEFKSKLSSM

SEQ ID NO: 187351 - protein, 466 aa, Unknown
  Bacterial polypetide isolated from the Sargasso Sea
MSKVATRFAPSPTGPLHIGGVRTALFNWLYAKNKGGTFHLRIEDTDKERSKDEYKDQIINSLKWIGIECDGNEYIQSTKKKEHIDIANELLKKGHAYKCYCSTEEIEEQKKRAKQKKIPYIYDRKWRDKTDSEAPKNIKPVIRFKSKIDGSTILKDLVQGDVQIDNNTIEDFVILRNDGTPTYNLSAAVDDHIMNITHIIRGDDHKINTFKQMQIYLAMKWELPLFAHIPLIHTVDGKKLSKRDKASTLDDYSKKGIISDALRNYLLRLGWSFKDKEIFNLDESIKYFNLEGIGKSPSKLDMSRILSMNEHYIKNIDENSLYNLLNEYCHRYKIEITAEKAEKIKKSLSFLKNKAKTLEDIYKNAQYIISDTVNFNDDDLKLIDETSKKIISEFNGKISELNEFNREALEHIINDLIKSNNTNFKGVGQPLRIVLTGSKFGPGIYDIIVSLGKNEVKKRLGNKIFA

SEQ ID NO: 187352 - protein, 242 aa, Unknown
  Bacterial polypetide isolated from the Sargasso Sea
MSKVATRFAPSPTGPLHIGGVRTALFNWLFTKNQKGSFFLRIEDTDKERSKDEYKKQIIQSLKWIGIENDGNEYIQSKKIDDHIKVANELLKNGYAYKCYCSNEEIEEQKNRAKQKKIPYIYDRKWRDKNEADAPKDIKPTIRFKSKINGSTILKDLVQGAIEIENNTIEDFIILRNDGSPTYNLSASVDDHQMNITHIIRGDDHKINTFKQMQIYLAMKWEVPSFAHIPLIHTTEGKKLSK

SEQ ID NO: 187353 - protein, 337 aa, Unknown
  Bacterial polypetide isolated from the Sargasso Sea
MNSIVTRFAPSPTGNLHLGGIRTALLNYIIVEQAKKKLPNSKFYLRIEDTDKERSKDEYTKDILAGLDWLNINYDSEPQIQSSNIKRHQQIAKKLLENKKAFKCICSNETLDKKRELNKKNKVNNKRLCETCENDNKVQSTQNDYTVRIKVPNEGVNKFNDIIQGEISVNNKEVDNFIILRKDGTPTYMLSVVVDDFDMGVNFIIRGDDHLNNVFRQNLIYKAMKWKVPQYAHIPLIHGEDGKKLSKRHGAISINEFRNEGYLKESIINNLILLGWSPNKIEKNEFIQIDEIIESFDISKISKSSSIFSYEKLNFFNNHYIKSTDNSKYLIKYCGNN

SEQ ID NO: 187354 - protein, 442 aa, Unknown
  Bacterial polypetide isolated from the Sargasso Sea
SFLMAKKTNGSFLLRIEDTDLERSKKEFSNAICADLKWVGLEWDEGPEVGGEEKSYYQSQRLELYQEFYEKLLDQDLIYPCFTSEEELKIIRRNQIAAGQPPRYTGVWSQASEEEVQKELEKGNKPVYRFRIPKKRTISFTDLVKGEQSFSTDDLDDFIVRKKDSSPTFMFANAIDDSLMGVDLVLRGDDHLSNTPRQIALLESLNLSLPRYAHVSLFTGFDGAPLSKRNGSLSISDLKEMGYLPIAISNYLSRVGHTINDNDLKTQKELADSFETKNISSSPSKFDLDQLLFWQKKAVDNLTIDECASWLSGNLDNLPPTVQERSFIELIKENINFPNEAKEYVNNLFVNALSGDEENLKIIQSAGQEFFILALEVVNAGLSDWKQTCKDIEARTGKKGKELFMPLRVAITGQTRGPELDKVIELIGLERVLERLQEASQI

SEQ ID NO: 187355 - protein, 267 aa, Unknown
  Bacterial polypetide isolated from the Sargasso Sea
MTKKNRLRFAPSPTGPLHIGGLRTALFNYLFAKKTSGELVLRMEDTDQARKVEKSQEHIEDSLAWIGIEFDESSKKGGQFGPYNQSERKDIYKEHVSILIEKGWAYYAFDKKEKLDFHRLDHEKKGKKFIYNAHNRLKLDNSLSMDKKDVEERIQKEDYVVRFKTPSETGVVFNDIIRGQILVSTRDVDDKILFKSDGMPTYHLANVVDDHLMEITHVIRGEEWLPSLALHVLLYRAFDWQEPKFAHLPLILKPSGKGKLSKRDGDK

SEQ ID NO: 187356 - protein, 225 aa, Unknown
  Bacterial polypetide isolated from the Sargasso Sea
MSKVATRFAPSPTGALHIGGLRTALFNWLYSKNQKGTFHLRIEDTDKERSKDEHKVQIINSLKWIGIEYDGNEYIQSTKIDDHIKVANELLKNGTAYKCYCSSEEIEEQKKRARQKKLPYIYNRKWRDADEKDIPQDIKPVIRFKSKIEGKSILKDLVQGDVEIENNTIEDFIILRNDGTPTYNLSATVDDHQMGMTHIIRGDDHKINTFKQIQIYLAMGWEVPN

SEQ ID NO: 187357 - protein, 185 aa, Unknown
  Bacterial polypetide isolated from the Sargasso Sea
MSSSIVRTRFAPSPTGYLHIGGARTALFAWLYAKSYEGACLLRIEDTDKERSKEEYTQEIIQSFEWLGISFDEDIVYQSKNSLRYKEVIDFLLKEGSAYVCSGEDSQHDKVYRDQNLSRDQKTVVRFKMPETGSTKFDDLVKGQIEVSNDQLDDFIIERSDGSATYNFCVVVDDIDSEISHISEA

SEQ ID NO: 187358 - protein, 342 aa, Unknown
  Bacterial polypetide isolated from the Sargasso Sea
MTKKNRLRFAPSPTGPLHIGGLRTALFNYLFAKKTGGELVLRVEDTDQARKVEKSQEHIENSLAWIGIDFDESSKKGGQFGPYNQSERKDIYKKHVNVLIEKGWAYYAFDKKEKLDFHRLDHEKKGKKFIYNAHNRLKLDNSLSMDKKDVEERIQKENYVVRFKTPSETNVVFNDIVRGEILVGTRDIDDKILFKSDGMPTYHLANVVDDHLMEITHVIRGEEWLPSLALHVLLYRAFDWQEPKFAHLPLILKPTGKGKLSKRDGDKFGFPVYALDWADEKVYSGFNESGFLAESLINYMVFLGWSPGDEKEIYSIDELINDFTLEKIKKSGAKFDPQKLLG

SEQ ID NO: 187359 - protein, 137 aa, Unknown
  Bacterial polypetide isolated from the Sargasso Sea
MKKVATRFAPSPTGPLHIGGVRTALFNWLYSKNQNGNFYLRIEDTDKERSKEEYKNQIIKSLRWIGINHDGTEYIQSQKIDDHIKVANELLKKGCAYRCYCSTEEIEAQKKRAKQKKFHTFMTENGETKTRMRLLKM

SEQ ID NO: 187360 - protein, 459 aa, Unknown
  Bacterial polypetide isolated from the Sargasso Sea
MKVTRFAPSPTGNLHIGGVRTALFNYVFSKQSGGLFLIRVEDTDRERSKKEYEEDIISGLEWLGISPDKTPIRQSERSDMYQKAAEKLIDSGNAYWCDCSPEDLEEMREQQAAAGKKPMYDGRSRNLGLERSDKTVLRLATPLEGETVVNDLIRGEITFNNSELDDLILLRSDGTPTYHFCNVVDDFDQGVTTVIRGEDHISNTPRQIHIQKALGYPDLEYAHLPLVLGEDKKRLSKRHAATSLNAYKEMGFTKETIINALALLGWSTENEIFSIDELIESFKLENVQKAAAVFDLKRFNWVSSQQLAKLDENGFFEAIKPFMENEDVNEDYPNYKKILLAMRTSKTNLKDIAHATRPFFFELDGYDEKGVKKFLNESFETLTFALEVLSKLTEWNETELDMALIKVRDYFNLPIPKVNQPMRIALVGSTVSPSLGLTLELFGKEKSLERIQKAIDFIS

SEQ ID NO: 187361 - protein, 364 aa, Unknown
  Bacterial polypetide isolated from the Sargasso Sea
MSKVATRFAPSPTGPLHIGGVRTALFNWLFAKNKGGNFLLRIEDTDKERSKKEYQNQIIQSLKWIGINYDSDEYIQSTKISSHVKIAEDLLKKGNAYKCYCSNEEIEEQKTRAKQKKIPYIYDRKWRDKNESEAPKNIKPVIRFKSKIDGKSKLKDLVQGDVEIDNNTIEDFVILRNDGTPTYNLSVTVDDHDMKVTHIIRGDDHKINTFKQIQIYEAMNWDLPEFAHIPLIHTKEGKKLSKRDKDSTLDDYSKIGIMPEALRNYLLRLGWSFKDKEIFNLEESIKHFNLEGVGKSPSKLDLNRILSMNEYYIKNMKEDNLFDQLKEFCENYKEKILPEKEDQIKKSLIFLKNKAKTLEDIFNN

SEQ ID NO: 187362 - protein, 287 aa, Unknown
  Bacterial polypetide isolated from the Sargasso Sea
MTVVVDDWKMGITHVIRGDDHVNNTPRQMNILAALGAELPKYAHVPMILGDDGKRLSKRHGAVGVMQYRDNGFLPEALINYLVRLGWSHGDQEIFSKEELVQLFDLSDCNRAPSAFNTDKLVWLNQHYMKTLAPEYVAKHLAWHVADQKLDISTGPALTELVKVQAERVKTLKELVEVSRYFYEDFSEFEENAAKKHLRPVAAEPLVAVQTKLAELNDWSVEALHQAINDAAESLGLGMGKVGMPLRVAVTGGGNSPALDATLALIGKDRVLKRISMALHYISNRAE

SEQ ID NO: 187363 - protein, 115 aa, Unknown
  Bacterial polypetide isolated from the Sargasso Sea
MITRFAPSPTGLLHLGNIRTALINWLYAKNSGGKFILRIDDTDQERSKDEYISQIKYDLEWLGIDYDETFNQSSRFERYKEQFEKLKSDGRIYACYETSEELERKRKLQMAAGGK

SEQ ID NO: 187364 - protein, 168 aa, Unknown
  Bacterial polypetide isolated from the Sargasso Sea
MKVKTRFAPSPTGFLHVGGARTALYSWLFAKNQGGEFVLRIEDTDLERSTQEAIDAIIEGMEWLELNWDEGPYYQTKRFDRYNALIDEMLADGRAYKCYCSKERLEALREGQMANGEKPRYDGKCRDHAHDHPADAPHVIRFRNPTEGSVVFDDHVRGRIEFANTELD

SEQ ID NO: 187365 - protein, 461 aa, Unknown
  Bacterial polypetide isolated from the Sargasso Sea
MKPRLRFAPSPTGQLHLGGARTALSNYLYAKKNGGQFLVRIEDTDIERSKKEHIDQICNSLQWLGLNWDEELVYQSKRREYYSNSLEDLLSCGKAYRCFASKEELDQIRKENGSYHYNGLWRNKSDDDINRELEKKTPFTIRIKSPNEGHTVFDDMIYGSISISNSEIDDFIISRSDGSPVYNFTNVIDDQSMKITHVVRGEDHISNTPKQILIYKAFNWEPPIFAHLPMILGEDKKRLSKRHGATGVQSYRDEGFQPEALLNYLALLGWNPGTEEEIMDLEQLVSKFDISRVQKKAAVFDQKKLNWVSSQHLALQNDQDILDRIRLINTGWGIKKDNSFCLSVVSIVKTRSRSLVDLIDQAGYFFSDPSRFNENDAQKTWKEDTQGILEEIIQMLGAVDDWTANKLELIFKKYMENNGYGFGKVMKPVRLGLCGNLQGPSLYDIMELLGKELVIKRINYI

SEQ ID NO: 187366 - protein, 78 aa, Unknown
  Bacterial polypetide isolated from the Sargasso Sea
MKLRIAPSPTGNLHIGNARTALFNWLYAKANNGKFLVRIDDTDTERSTNEYEKNIIENLRWLGLDWDKGIEVGESIET

SEQ ID NO: 187367 - protein, 471 aa, Unknown
  Bacterial polypetide isolated from the Sargasso Sea
MVRTRFAPSPTGVLHIGSVRTALFCWLYARRHNGKFILRIEDTDLERSTQENVDAILDSMNWLGLDADEDPIFQTDRFDRYHEVANQLFESGKAYRCYSTKEELEALREEQKKKGEKTRYDGRYRDVPPKENNDNYVLRFKNPLDGSVIVEDAVKGKVEFKNDELDDLIILRSDGTPTYNFTVVVDDIDMNISHVIRGDDHLNNTPRQINIYEALGAKPPTFAHIPMTLGEDGSKLSKRHGAMDIREYREKGYLPAALLNYMARLGWSHGDQEVFSVDEMISLFDIRDINKASSTFSSDKLLWLNHQHINKLNYDEIIPLLKYHMAVLEIDYESGPDLKEIINVYSERSETVLDMAKSSIYCFQDIDDYDDKAVKKHLRPVILDPLNDVKSEFEKINNWKKENIDSAIEKIVNRYEINMGKLGQPLRVAVTGSSMSPSINKTLALIGKNRSIERINKAIEIIKKRIESNKK

SEQ ID NO: 187368 - protein, 247 aa, Unknown
  Bacterial polypetide isolated from the Sargasso Sea
MTQIRTRIAPSPTGDPHVGTAYIALFNRCFAHSNGGKFILRVEDTDRVRSSKNSELNIIDSLNWLGLTWDEGPDVGGKYGPYRQSDRTKIYLEHVDILLKNKNAFKCFCTPERLDQLRKHQLQEKTQVGYDGHCLNLSDEEIESRLRQGEDYVIRMKVPESGDCEFDDLLRGNVSINWSQVDMQVLIKSDGMPTYHFANVVDDHLMNITHVIRGEEWINSVPKHLLLYEYLGWEPPIFCHMPLLRNP

SEQ ID NO: 187369 - protein, 445 aa, Unknown
  Bacterial polypetide isolated from the Sargasso Sea
MNNSVTRFAPSPSGLLHVGNVRTALLNFLVSKKSNGKFILRIDDTDQERSKDKYIDSIKEDLSWLGLNYDECYQQSNRITLYDKAFDILKAKDLIYPCFETPDELDKKRKRLITRRMPPVYDRAALKLKQDEIKSLLDSGKKPYWRFKLSSKKVKFKDLIRGDVSVDLAAQSDPVIKREDGDYLYNLPSVVDDIDMNITHIIRGEDHITNSGIQIEIFNALNSNIPLFGHNSLLVSENGEPFSKRNAAASIEQLKEKDIDPNAVNSLNASIGSSVDIEAFESLDLLADKFEISSLSKSPARYSNNQLDKLNSQLISNYDFEKISLLLKDKNDCLDAEFWDCIKQNISTLSEVNDWIKILNEPIEGDFNLEENYLTIAQDLLPNEPWDSKTWDEWISRLKEKTQKKGKELFMPIRIALTGKTNGPELNKLILLMGYNKVMERLKRK

SEQ ID NO: 187370 - protein, 436 aa, Unknown
  Bacterial polypetide isolated from the Sargasso Sea
MKLRIAPSPTGNLHIGNARTALFNWLYAKANNGKFLVRIDDTDTERSTDEYEKNIIENLRWLGLDWDEGIEVGESNETYRQSSRFERYIEVAEELEKKGLAYREEGALRFKVPDDGDINFEDIVRGSMSFNLNDIEDFVILRSDNSPTYHLASTVDDIDYEITMIARGEDILSSTPKHILLMNALDAKHPDFCHLPLLFGPDGKKLSKRHGDTSVSAFKDKGILPESLFNYMCLLGWSPGNDLEIFDKKLAIEKFDLKNVLPNPAIFDTKKLLWMNGQYIRDTEDKIFKKLFLNSIQDSISRDLFDEELNRIDKIVKSVQERLETMNDIKEQVMFLLDEPFEINSDDWSDVNTEDGQQYMKNVREKFMSANNFDLDDIEVIMREELKALDIKPKIGFQITRVAVTGTKVSPPLFESIYALGKETTIARLAESIEDL

SEQ ID NO: 187371 - protein, 460 aa, Unknown
  Bacterial polypetide isolated from the Sargasso Sea
TARTAVFNWLYARRQQGSFLLRIEDTDKERSKPEYTQNILEGLRWLGIDWDEEPLIQSEQVQQHRAAIETLLKKGLAYRCYANEAELDAMREAQKASNQAPRYDNRHRNLTPDQEAAFQAEGREAVIRFRIDDNAEIRWNDMVRGAMSWRGADLGGDMVVARRAPADQIGDPLYNLVVVVDDAAMAISHVIRGEDHIANTAKQLLLYEALDLPAPTFAHAPLILNAEGRKLSKRDGVTSINDFRTMGYTAEAIANYMTLLGWSVPEGMEERFTLPEAAAVFSFDRVNKAGARFDWDKLNWLNGQVLHALPAQQLLDDLRPLWAEQGWALPDDSSWGLELCELLGPSLTLLKDGVEQATPFFKRPDLEDDGLRQLETDGARTAVAQLLQILEAEPWDGKDTDRAKQLLADAAKGAGVKKGVVMKSLRAALLGRLQGPDLITTWCLLARIGEDLPRLQRCLV

SEQ ID NO: 187372 - protein, 347 aa, Unknown
  Bacterial polypetide isolated from the Sargasso Sea
IPYIYDRKWRNKSESEAPEEIDPVIRFKSKVEGKSILKDLVQGNIEIENNTIEDFVILRADGSPTYNLSASVDDHIMGMTHIIRGDDHKINTFKQIQIYEAMNWEIPSFAHIPLIHTIDGKKLSKRDNVSTLDDYSKIGIMPNALRNYLLRLGWSYKDKEIFDLDESIKYFNLEGIGKSPSKLDISRIYSMNEHYIKNIDENDLFNFLITYCETFQEKIPDVAQKKIKNSLHFLKNKAKTLEDIYKNSKFLINDKVQIEKEDIKLLDKTAIKIIKLFCDDINRLSDFTRETLEPIINDLIKKNNTNFKGVGQPLRICLTGSKFGPGIYDILCALGKEEVSKRLSQIR

SEQ ID NO: 187373 - protein, 314 aa, Unknown
  Bacterial polypetide isolated from the Sargasso Sea
FKKMQSGKCKEGEHVLRAKIDMASGNINMRDPIIYRIMHHSHPRTGSAWHVYPTYDFAHGQSDALENISHSICTLEFEDHRPLYEWFLNNLPVASKPRQHEFARLSLTHTVLSKRVLTRLVDEKLVSGWDDPRMPTLAGLRRRGYPPEAIRDFAARIGVSKRDSIVDVAMLEHCVRNVLNQKASRYLAVLRPVKVIIDNYPPGETEQLEAPNNPNDVEAGSRRIPFCRELYIEEDDFMEEPPRKFFRLAPGKEVRLRYAYLITCTNIVKDNTGKVTEIHCTYDPETKGGTLRTDVKSRALYTGSLWTMRTLQRS

SEQ ID NO: 187374 - protein, 151 aa, Unknown
  Bacterial polypetide isolated from the Sargasso Sea
MSKKDKYRGKDFIRQMIHHDIDQGVNDGRLATRFPPEPNGYLHIGHALSICINFGIAEEFDAPCYLRFDDTNPAKESDEYVNSIMEDVKWLGFDWGNNLAHASDYFESIHEFAIELIEKDLAFVDSQTSEEIRNTRGTLNSPGMKVHIVIA

SEQ ID NO: 187375 - protein, 304 aa, Unknown
  Bacterial polypetide isolated from the Sargasso Sea
CISDAIEGITHSLCTLEFQDNRRLYDWVIENISIDCTPRQYEFSRLNLEYTVLSKRRLIQLVDENHVHGWDDPRMPTIAGLRRRGYTPGSIVEFCKRIGVTKMDNMVEMSMLEACIRDDLNANAPRAMAVLDPIKLVIENYEEGQTETLVAPNHPNDESMGTRNIGFSREVYIEAEDFRESANKKFKRLVLDKEVRLRNAYVVKANRVEKDENGYVTTVYCTYDPDTLGKDPADGRKVKGVIHWVDAATAQAAEFRLYDRLFNVPNPAAEENFTDAINPDSLEVKHGWVEAGKADNVPEVGAWQ

SEQ ID NO: 187376 - protein, 270 aa, Unknown
  Bacterial polypetide isolated from the Sargasso Sea
MSKKDKYRGKDFIRQMIHHDIDSGVNDGRLATRFPPEPNGYLHIGHALSICINFGIAEEFDAPCYLRFDDTNPAKESDEYVNSIMEDVKWLGFDWGNNLAHASDYFESIHEFAIELIEKDLAFVDSQTSEEIRNTRGTLNSPGIESPYRNRSVSENLGLFNRMKNGEFENGEHVLRAKIDMSSPNINLRDPVIYRILNLEHQRTGKTWCIYPMYDFAHTLSDAIEGTTHSLCTLEFEDHRPLYEWFLDNLNLSTRPRQIEFSRLNVEHTI

SEQ ID NO: 187377 - protein, 220 aa, Unknown
  Bacterial polypetide isolated from the Sargasso Sea
YTPASIREFCQRIGITKQENMIEAAMLDACIREELNEYAPRAMAVLRPLKVVIENYPEGQIETIQAASHPSDESMGTRELAFGRELYIDVADFREEANKQYKRLVMGKEVRLRNAYVIKAERCDKDSEGNITTVYCSYDADTLGKNPADGRKVKGVIHWVEATTAKPAEFRLYQRLFTDPNPAAAETVDEVLNPNSLEVVNGLVEASLVNAPAEKAYQFE

SEQ ID NO: 187378 - protein, 309 aa, Unknown
  Bacterial polypetide isolated from the Sargasso Sea
PAKEEQEFITAIEADVRWLGFEWGEHRYFASDNFEQLYAWAEHLIADAKAYVDDLSATEMREYRGTLTEPGKDSPHRNRSVDENLRLFRRMRAGEFEDGARVLRAKIDMASGNINLRDPVLYRILRAQHPRTGNAWCIYPTYDYAHGQSDAIEGVTHSLCTLEFEDHRPLYDWLIENLPTPSRPRQYEFSRLNLSYTVLSKRLLTQLVQDGYVSGWDDPRMPTLAGLRRRGLPADALRDFTSRIGVTKSDSVVDMALLDHCVRDSLNKSALRRMAVLDPLKIVIENYPEGESEQLEAVNNPENDADGTR

SEQ ID NO: 187379 - protein, 293 aa, Unknown
  Bacterial polypetide isolated from the Sargasso Sea
YYASDYFSILFDFAVKLIKEGKAFVDSQPPETIRSQRGSLQKPGSNSPFRDRDVNTNLDLFHRMREGEFKEGEHILRAKIDMSSPNMNMRDPALYRIREKDHYRTGNQWNIYPMYDFTQCLSDAIEGVTHSICTLEFEDHRPLYDWVIENVETSNRPKQIEFARLEIDYSITSKRKLLSLVEEGNVSGWDDPRLQTIKGMRRRGYPPEAIKNFCELIGITKKQAVIDLSTLENCVREELDKKAPRIMAVLDPLKVIIKNFPGNTSEQLNAPNHPKDSTFGERKLPITKEIYIE

SEQ ID NO: 187380 - protein, 206 aa, Unknown
  Bacterial polypetide isolated from the Sargasso Sea
MNENQTPAPPPSHFIRKIIEADLESGNHQQVVTRFPPEPNGFLHIGHAKSIFLNFGMPRDYGGHCFMRFDDTNPVKEDATYSQAILEDVRWLGFDWGNRLTHASDYFEQLYEFASVLIRRGKAYVDSLSAEKIREYRGTLTEPGSNSPFRDRTIEENLDLFQRMRDGEFEDGSHVLRAKIDMAAPNIHMRDPTLYRIRKVSHHRTG

SEQ ID NO: 187381 - protein, 207 aa, Unknown
  Bacterial polypetide isolated from the Sargasso Sea
MPATDFIRKIIHEDLESGKHQCLVTRFPPEPNGHLHIGHAKSIQLNFGTAKEFKGICFMRFDDTNPLKEEEEYVEGILHDVRWMGYDWEDKLTYASDYFEQLYEFAEELIKKGKAYVESQSAEEIRRTRGTLTESGRNSPFRDRNVEENLKLFRQMRAGEFDDGTHVLRAKIDMASPNINMRDPVLYRIRKVPHQRTANSWCIYPLY

SEQ ID NO: 187382 - protein, 81 aa, Unknown
  Bacterial polypetide isolated from the Sargasso Sea
MSKKDKYRGKDFIRQMIHHDIDQGVNDGRLATRFPPEPNGYLHIGHALSICINFGIAEEIDAPCYLRFDDTNPAKESDEYV

SEQ ID NO: 187383 - protein, 261 aa, Unknown
  Bacterial polypetide isolated from the Sargasso Sea
MTVDTQKSDEPGNDFIRQRIKSDVSANGLLHGVITRFPPEPNGFLHIGHAKSICLNFGVAQEFGGKTFLRFDDTNPEKEDEIFVQSILEDVKWLGYTWDHLTYASDYFEQLYTFAEGLILDGKAYVCSLTSEEIRESRGTLTEVGKNSPYRDRSIDESLEMFRSMKQGKFEEGSQVLRLKIDMASPNMNLRDPVIYRIRYQSHQRTGDKWCIYPMYDYTHCICDALEHISHSLCTLEFEDHRPLYDWVIENIDIDYHPPQI

SEQ ID NO: 187384 - protein, 306 aa, Unknown
  Bacterial polypetide isolated from the Sargasso Sea
TQKQLHHKREPQQNRGKESPYRRRSEEENLSLFSKMRAGKFEEGEHVLRAKINMSSPNMLLRDPVMYRVINKSHQRTLKKWCIYPMYDWAHGQSDFIEKISHSLCTLEFKPHRDLYEWFLYALGPKLDNAPKQREFARLNLSHTITSKRKLKRLIDEGHVNGWDDPRMPTISGLRKRGYTPESLKKFVRTAGVAKRENIIELSLLEFCIREHLNKISPRIMAVLDPIKLIIENYPEGKEEQLIGEINPEDPSEGTRKIPFSKELFIEKEDFQEQTEEGFFRLSLGHEVRLKNAYIIKAKEIKRDEE

SEQ ID NO: 187385 - protein, 316 aa, Unknown
  Bacterial polypetide isolated from the Sargasso Sea
MRVRSEIAAFEENKDLFLRMRDGEFNNGSKTLRAKIDMGHPNMNMRDPVVYRILHAHHHRTKDKWCVYPMYDWAHGLEDSIEGITHSLCSLEFEDHRPLYDWYLEQLGVYHPQQIEFARLNLSYTIMSKRKLKKLVENGLVDGWDDPRMPTISGFRRRGYTPQSIKNFMEEVGVAKRDNVMDVAKLESSLRTDLNKRSDRRMAVLNPLKVVITNYPKDSDELVRAKNNPEDDSAGARNIPFSREIYIEKEDFMENPPKKYFRLSPGSEVRLKFAYFIKCNDVIKDEYGEVVELHCTYDKNTKGGKSSDGRKSKRNP

SEQ ID NO: 187386 - protein, 285 aa, Unknown
  Bacterial polypetide isolated from the Sargasso Sea
GKAYVESQSSEEIRKTRGTLTEPGKDSPFRERSVEENLNLFRQMRAGDFDDGKYVLRAKIDMASPNINMRDPVLYRIRKFPHQRTANRWCIYPLYDFTHGLSDSLEGVTHSLCTLEFEDHRPLYDWILAEVSAPCIPRQIEFSRLNLRYTVLSKRKLIQLVEEGHVSGWDDPRMLTLSGLRRRGYPPSAIRLFCERIGISKSANNIDMSVLEDCAREVLDKKAPRMMCVLKPLKVIITNYPEDKAEEFEPARHPKNPEMGKRKVPFSREIYIDKDDFQEDPPPNF

SEQ ID NO: 187387 - protein, 331 aa, Unknown
  Bacterial polypetide isolated from the Sargasso Sea
NITHSICTLEFEDHRPLYDWYLNCLNVYHPQQIEFARLNLNYTIMSKRKLKRLVDEGYVDGWSDPRMPTISGLRRRGYTPESIKNFSDAIGVTKRDAIVDVAKLENSLREDLNKKAPRVMGVLEPIKVIITNYPDNEIEYLDAKNNPEDESAGKRKLAFSKEIFIDKNDFMEDPPKKFFRLSPGKEVRLKFAYYIVCENVIKNDNGEITEIHCSYDPNTKGGMSEDGRKVRGTLHWVSTQECIEAEVRLYDRLFMSDNPENNGNFFDDLNPESLSIIKKAKLESSLSTASTETIYQFERTGYFIKDSKDSSVNNLIFNRAVSLRDSWARLN

SEQ ID NO: 187388 - protein, 104 aa, Unknown
  Bacterial polypetide isolated from the Sargasso Sea
MSDNSNHESSNFIRNIIKDDVKNKKNKSLVHTRFPPEPNGYLHIGHAKSICLNFGIADDFKGGLCNLRFDDTNPAKEDPEYTDSIQQDVKWLGFDWSDRLFYAS

SEQ ID NO: 187389 - protein, 314 aa, Unknown
  Bacterial polypetide isolated from the Sargasso Sea
FLENLPVLSKPRQYEFSRLNLSHTVLSKRKLIKLVEDNFVLGWDDPRMPTIAGMRRRGVPPTAIKDFIERIGVTKSDGIVEMSYLDNTIREHLNQTSLRRMAVLDPLKVIIDNFPEDLEDKLEAINNPNDESAGTREISFSREIYIERSDFLEDPPNKYFRLAPGKEVRLRYAYLVTCTKVIKDSNGKILEVHCLYDPESRGGNAPDGRKVKGTIHWVSAQYSNKANVNLYKNLFNSEMPDTGEDWLDNINQDSLEVRENCYIENALTNSTAGETVQFERLGYFCLDSSSEINNIVFNRTVSLRDTWTKKTSKS

SEQ ID NO: 187390 - protein, 320 aa, Unknown
  Bacterial polypetide isolated from the Sargasso Sea
GSRVLRAKIDMKAGNINLRDPVIYRISDISHPRTGELWKIYPTYDFAHGQTDAIEGITHSLCTLEFEDHRPLYDWFIKNLPVPAKPKQYEFSRLNLENTVLSKRRLNLLVEKQLVSGWDDPRMPTVSGLRRRGVPAFAIRDFISRLSIGKSEGIVESAMLDHCVRDYLNKFAERRMAVLRPLKIVIRNYPKNKTEEIDALNHPGDESKGRRKLPFSREIYVERDDFMESPPKKFYRLGPGREVRLRFAYLVTCEEIIKNEIGDVVELRCSYDPESKGGNAPDGRKVRGTIQWVSAQHAIPAEVRLYEPLFKNSADANEDD

SEQ ID NO: 187391 - protein, 266 aa, Unknown
  Bacterial polypetide isolated from the Sargasso Sea
PRMSTLSGFRRRGYTPASIRNFCDMIGVNRAGGVVDIGMLEFAIREDLDANAARAMCVLKPLKVVITNYPEGQVENLELPRHPKQDMGVRVLPFSRELYIDAGDFEEVPPAGFKRLIPGGEVRLRGSYVIRADEAVKDDQGNIVELRCSYDENTLGKNPEGRKVKGVIHWVPAAESVECEVRLYDRLFRSANPEKDEEGGSFLDNINLESLVVLKGCRAEPSLASAEPEERFQFEREGYFCADMKDSKPGAPVFNRTVTLRDSWGQ

SEQ ID NO: 187392 - protein, 207 aa, Unknown
  Bacterial polypetide isolated from the Sargasso Sea
MNKNFIQKIIDEHNETGKFKSKVHTRFPPEPNGYLHIGHAKAICLNFNIAEEYDGKCNLRFDDTNPLAEEDEYVRSIQDDVKWLGFDWKGRIYFASDYFQQMYDYAIQLINNGNAYVCDLTSEEIKENRGTLQKPGTESPYRDRSLDENLNLFARMKSGEFENGSKTLRAKIDMSHPNMNMRDPVIYRILHANHHRTADRWCIYPNV

SEQ ID NO: 187393 - protein, 166 aa, Unknown
  Bacterial polypetide isolated from the Sargasso Sea
MKDSKPRDFIRQIIHDDTKNQDSRKVITRFPPEPNGFLHIGHAKSICLNFAVAHENKGKTFLRFDDTNPLKEDDVYVQSIKEDVSWLGFDWEDRLTFASDYFENLYQSAIKLINKGLAYVDSLNADEIREYRGTLTEPGKDSPFRNRSPEENLELFQRMKNGEFSD

SEQ ID NO: 187394 - protein, 113 aa, Unknown
  Bacterial polypetide isolated from the Sargasso Sea
MNKKDKYRGKDFIRQMIHHDIDSGVNDGRLATRFPPEPNGYLHIGHALSICINFGIAEEFDALCYLRFDDTNPAKESDEYVSSIMEDVKWLGFDWGDNLAHASDYFESIYELA

SEQ ID NO: 187395 - protein, 185 aa, Unknown
  Bacterial polypetide isolated from the Sargasso Sea
MKNFIQKIIDEDNLSGKWSSRVHTRFPPEPNGYLHIGHAKSICLNFGIAEKNNGKCNLRFDDTNPVKEEDEYVRSIIDDVKWLGFDWEERLYYASDYFDQMYDHALTLIQNGDAFVCDQSSDQMRDCRGTLKQPGEESPNRNRSIEENLELFQRMKNGDYPDGQKTLRAKIDMSHSNLNMRDPVI

SEQ ID NO: 187396 - protein, 157 aa, Unknown
  Bacterial polypetide isolated from the Sargasso Sea
MSESNTVIKNFIQKIIDEDNLSGKWSNRVHTRFPPEPNGYLHIGHAKSICLNFGIAEKNNGKCNLRFDDTNPVKEEDEYVRSIIDDVKWLGFDWEERLYYASDYFDQMYDHALTLIQNGDAFVCDQSSDQMRDCRGTLKQPGEESPNRNRSIEENLE

SEQ ID NO: 187397 - protein, 275 aa, Unknown
  Bacterial polypetide isolated from the Sargasso Sea
PNGYLHIGHAKSICLNFGIAEKNNGKCNLRFDDTNPTKEDDEYVKSIIEDVKWLGFDWEDRLYFASDYFEQMYSHAITLIKNGKAYVCDQTSQEIRECRGTLKNPGIESPFRGRSIEENLDLFGKMKMGEFGDGAKTLRAKIDMSHPNLNMRDPVIYRILHASHHRTNDKWCIYPMYDWAHGLEDSIERITHSICTLEFEDHRPLYDWYLKQLDIYHPQQIEFARLNLNFTVVSKRKLKQLVDERIVDGWDDPRMPTISGLRRRGYTPKSIRKFA

SEQ ID NO: 187398 - protein, 109 aa, Unknown
  Bacterial polypetide isolated from the Sargasso Sea
MTANNNTDNFIRKIIDHDNESGKWDGRVHTRFPPEPNGYLHIGHAKSICLNFGLAIEYDGKCNLRFDDTNPLKEESEYVRSIIEDVSWLGFSWGNEPLFASDYLAKCMT

SEQ ID NO: 187399 - protein, 82 aa, Unknown
  Bacterial polypetide isolated from the Sargasso Sea
MNKPDATPPSHFLRQIVQADLDSGKHSSIVTRFPPEPNGYLHIGHAKSICLNFGLAKEFGGVCNLRFDDTNPAKEEQEYIDA

SEQ ID NO: 187400 - protein, 295 aa, Unknown
  Bacterial polypetide isolated from the Sargasso Sea
KGPNFIEQIIDGDISRGFKKDNLRFRFPPEPNGYLHIGHLKAICLNFNLGEKYGAPVNLRFDDTNPEKEAKEYVDAIKNDILWLGYKWNKECYASDYFEQLYNWAIVLIEKDLAYIDSQSSEDIANQKGTPTKDGKPSPYRDRDKEESLKIFKEMHNGDHKQGEHVLRAKINMSSPNMLMRDPVIYRAMEVKHHRTGDSWKIYPMYDWTHGESDYIEQVSHSLCTLEFEPHRELYDWFLDSISPLKGVRPKQREFSRLNLSYTITSKRNLAKLVEEGVVGGWDDPRMPTISGLRN

SEQ ID NO: 187401 - protein, 332 aa, Unknown
  Bacterial polypetide isolated from the Sargasso Sea
RHARHHQTGDKWCIYPTYDFTHCISDAIENVTHSLCTLEFEDHRPLYDWILNNLDSDSLRVISDLSDSDMTFVLPQQTEFAKLKLNYTIMGKRKLKEMVEMGLVDGWDDPRLPTLAGMRRRGFTAASIRNFCETVGVSRSEGTVDLSMLEHCVREDLDQCASRVMCVLNPMKVTIRNIKESEVENLSLQNHPKNESMGTRTVPFTREIYIDRSDFEENPAPGFKRLVLGGEVRLRGSYVIKCEEILRDSEGEIIELICSADRETLGRRPEGRKVKGVIHWVSAVYGQEVSLMLYDRLFMVENPEAKEIKDYKEFLNPESLSVVKNCVIEPSA

SEQ ID NO: 187402 - protein, 188 aa, Unknown
  Bacterial polypetide isolated from the Sargasso Sea
MTATDFIRSIIRNDLESGKHKRLVTRFPPEPNGHLHIGHAKSIQLNFGTAEEFKGICFMRFDDTNPLKEEEEYVDGILKDVRWMGYNWEKRITYASDYFEQLYEFAEELIKKGKAYVESQSADEIRSKRGTLTEPGINSPFRDRSVEENLTLFRQMRAGEFDDGNHVLRAKIDMASPNINMRDPVLYR

SEQ ID NO: 187403 - protein, 263 aa, Unknown
  Bacterial polypetide isolated from the Sargasso Sea
MPTIAGLRRRGFTPASLREFAKRIGVTKQDNMIEISALDSCIREDLDANAPRAMAVIDPLKVTISNYNAADVEWLEVHNHPKEESMGSRKVPFGRTLYIDRADFREEANKKYKRMVTGGEVRLRGAYVIRADEVIKNEAGDIVELICSYDPDTLGVNPADGRKVRGVIHWVEASQAVPAEFRIYDKLFTVANPAAEEDFLAVINPASLTVKTGWVEPSLKAAEAEKAFQFEREGYYCADNKDSTPDHLVFNRTVALRDTFFED

SEQ ID NO: 187404 - protein, 255 aa, Unknown
  Bacterial polypetide isolated from the Sargasso Sea
LTADEIREYRGTLTEVGRDSPYRNRSTEENLQIFHDMRDGKFPEGERVLRAKIDMGSGNINLRDPVIYRILNAHHPRTGDTWCVYPTYDFAHGQTDALEGVTHSLCTLEFADHRPLYEWFIEALPVPSEPKQYEFAKLQISHTVLSKRNLTRLVMEQHVSGWDDPRLPTLSGLRRRGVPAEAVKDFVARVSVSKNEGEVELALLEHCIRDNLNYSAERRLAVLKPLKVVIENFPEGKIEWLPALNNPNSDKPEQR

SEQ ID NO: 187405 - protein, 122 aa, Unknown
  Bacterial polypetide isolated from the Sargasso Sea
MKNKNKHFIQKIIDEHNSSGKFNNKVQTRFPPEPNGYLHIGHAKAICLNFNIAEEYNGKCNLRFDDTNPIAEEEEFVRSIQKDVKWLGFDWEDRLCFASDYFHQMYEYAIQLIQKGSAYVCE

SEQ ID NO: 187406 - protein, 211 aa, Unknown
  Bacterial polypetide isolated from the Sargasso Sea
MAVLHPVKVVIENLAADEVLTAPAHPNKPEMGTRELHFSREIFIDEADFKEEANKQFKRLVLGKEVRLRNAYVIKAERVEKDADGKVTCIYCSYDPETLGKDPADGRKVKGVIHWVSATHSLPAEVRLYDRLFKVPNPGAEDDFEAALNPESLVIIEGARVEASLKDAKPEFAYQFEREGYFCADNKLSSAERLVFNRTVALRDVWGKAEV

SEQ ID NO: 187407 - protein, 178 aa, Unknown
  Bacterial polypetide isolated from the Sargasso Sea
NNSGKFNNKVHTRFPPEPNGYLHIGHAKAICLNFNIAEEYNGKCNLRFDDTNPIAEEEEFVRSIQEDVKWLGFDWQDRLCFASDYFQEMYEYAIQLIQKDSAYVCELTTDEIKNTRGTLNEPGSESPYRNRSVNENLDLFKRMRSGEFENGSKTLRAKIDMGHPNMNMRDPVIYKNFT

SEQ ID NO: 187408 - protein, 219 aa, Unknown
  Bacterial polypetide isolated from the Sargasso Sea
MSESNTVINNFIQKIIDEDNLSDKWGNRVHTRFPPEPNGYLHIGHAKSICLNFGLAEKNNGKCNLRFDDTNPVKEEDEYVRSIIEDVKWLGFNWEDRLYYASDYFDHMYNHALTLIQNGDAFVCDQSSDQMKDCRGTLKQPGQESPNRNRSVDENLKLFQKMKNGDFSDGSKTLRAKIDMSHPNLNMRDPVIYRILHASHHRTGDKWCIYPMYDWAHGL

SEQ ID NO: 187409 - protein, 226 aa, Unknown
  Bacterial polypetide isolated from the Sargasso Sea
KKNMIEAAMLDACIREELNEYAPRAMAVLRPLKVVIENYPEGQIETIQAASHPSDESMGTRELAFGRELYIDVADFREEANKQYKRLVMGKEVRLRNAYVIKAERCDKDSEGNITTVYCSYDADTLGKNPADGRKVKGVIHWVEATTAKPAEFRLYQRLFTDPNPAAAETVDEVLNPNSLEVVNGLVEASLVNAPAEKAYQFEREGYFCADNKDSSAEHLVFNLTV

SEQ ID NO: 187410 - protein, 111 aa, Unknown
  Bacterial polypetide isolated from the Sargasso Sea
MSHVDTEVRPSNFIRNIIDEDLSSGKHSQVHTRFPPEPNGFLHIGHAKSICLNFGIAQDYQGQCNLRFDDTNPEKEDINYVKSIQEDVRWLGFQWSGDIRYSSNYFDQLHQ

SEQ ID NO: 187411 - protein, 288 aa, Unknown
  Bacterial polypetide isolated from the Sargasso Sea
NWNIYPMYDWTHGESDYIEQVSHSLCTLEFEPHRELYDWFLDAISPLKGIRPKQREFSRLNLSYTITSKRKLAQLVDQKLVSGWDDPRMPTISGLRKRGYTPQALKNFALTVGVSKRENVIDASLLEFCVRSDLNEVAPRAMAVINPLKIKIINYNKGEGENINFEVNPQNQEAGKREIMFTDEMYIEKEDFQENPEEGFFRLSPGEEVRLKNAYIIKAVDVIKDEKGDISEVLCEYDKKSKSGSNTPESNRKVNGTIHWVSAKEAVSAKINIYDRLFKVEKPGKNTT

SEQ ID NO: 187412 - protein, 79 aa, Unknown
  Bacterial polypetide isolated from the Sargasso Sea
MKNKNKHFIQKIIDEHNNSGKFNNKVHTRFPPEPNGYLHIGHAKAICLNFNIAEEYNGKCNLRFDDTNPIAEEEEFVRS

SEQ ID NO: 187413 - protein, 169 aa, Unknown
  Bacterial polypetide isolated from the Sargasso Sea
MTQSPSTPDHANDPGRTDFVRDLVASDIATARFAGRVQTRFPPEPNGFLHIGHAKAIVLDFAIALENNGSCFLRFDDTNPATEDQAYADAICEDIEWLGFSPDGITHASDYFEQLYEWAELLVTKGLAYVDEQSADLIAEQRGGFGQPGVESPFRNRAPDDNLRLLRAM

SEQ ID NO: 187414 - protein, 322 aa, Unknown
  Bacterial polypetide isolated from the Sargasso Sea
TLKKPGIDSPYRNRTVDENIDLFAKMRSGDFANGEKTLRAKIDMAHSNLNMRDPVMYRILHVAHHRTGDEWCIYPMYDWAHGLEDSIEKITHSICTLEFEDHRPLYDWYLDQLEAYHPQQIEFARLNLNHTVVSKRKLKRLVDDGFVDGWDDPRMPTISGLRRRGYTPESIRDFSERVGVTKRDAVVDVAKLENSLRDDLNKRSPRVMAVLDPLKVVITNYPTDELDYVDAINNPEDENAGKRKLAFSKEIYIERNDFMEEPPKKFFRLSPGKEVRLKFAYYITLYEVIKDEKGKIIEIRCTYDPKYRGGRSEDGRKVRGTL

SEQ ID NO: 187415 - protein, 286 aa, Unknown
  Bacterial polypetide isolated from the Sargasso Sea
IIDDDNHTKKWDKRVHTRFPPEPNGYLHIGHAKSICLNFGIAQKYGGKCNLRFDDTNPLKEEDEYVKSIIDDVKWLGFHWEDEPLYASNYFEQMFDYAIELINQGNAYVCDLKSDEVKDQRGTLKNPGIESPFRNRSISENLELFKKMRAGDFLDGEKTLRAKIDMQHANLNMRDPVMYRILHAKHHRTGSKWCIYPMYDWAHGLEDSIEKITHSICTLEFEDHRPLYDWYLNSLKVYHPQQIEFARLNLNYTIMSKRKLKRLVDEGHVDGWSDPRMPTISGLKRR

SEQ ID NO: 187416 - protein, 182 aa, Unknown
  Bacterial polypetide isolated from the Sargasso Sea
FTHSLCTLEFQDNRRLYDWILDNITIACHPQQIEFSRLNLEYQVMSKRKLHNLVEGGHVAGWDDPRMPTIAGLRRRGFTPASLREFAKRIGVTKQDNMIEISALDSCIREDLDANAPRAMAVIDPLKVTISNYNATDVEWLEVHNHPKEESMGSRKVPFGRTLYIDKADFRKEANKKYKRMV

SEQ ID NO: 187417 - protein, 306 aa, Unknown
  Bacterial polypetide isolated from the Sargasso Sea
YRIRYQSHQRTGDKWCIYPMYDYTHCICDALEHISHSLCTLEFEDHRPLYDWVIENIDIDYHPPQIEFSRLGLEYTVMSKRHLSQLVADKIVEGWDDPRMPTIAGLRRRGVPPAAIREFCSRVGVTKQSNVVEMELLEFCIRQELESNSPRAMCVLEPLKVVITNWDQGELLLEAPWHPKRENLGSRSIPFSGTLYIEREDFSVEPPSKWKRLQPDGLVRLRYGFIIQCDELVYGENGEISELRCTYFPESRSGQDTSGLKPKGVIHWVSESGAQQIKVKKYARLFHVPDPKADNFMDEINIESLL

SEQ ID NO: 187418 - protein, 257 aa, Unknown
  Bacterial polypetide isolated from the Sargasso Sea
DEDNLSDKWGNRVHTRFPPEPNGYLHIGHAKSICLNFGIAEKNNGKCNLRFDDTNPVKEEDEYVKSIIEDVQWLGYDWGNNLFFASDYFDQMYDYALMLIRNGNAFVCDQSIDQMKESRGTLTQPGKESPNRNRSIEENLELFQCMKNGDYPDGQKTLRAKIDMSHSNLNMRDPVIYRILHASHHRTGNKWCIYPMYDWAHGLEDSIEKITHSICTLEFEDHRPLYDWYLDKLGVYHPQQIEFARLNLNFTVKNKRK

SEQ ID NO: 187419 - protein, 251 aa, Unknown
  Bacterial polypetide isolated from the Sargasso Sea
WKIYPMYDWTHGESDYIEQVSHSLCTLEFEPHRELYDWFLDSISPLEGIRPKQREFSRLNLSYTITSKRNLAKLVEEGVVDGWDDPRMPTISGLRNRGYTPESLKSFALTVGISKRENVIDVSLLEFCVRTHLNEEAQRAMAVLDPLKISIINYNKNKEESVNFDINPQKPGQGKRETLFSKNIYIEREDFQENPEEGFFRLSPGEEVRLKNAYIIKATNIIKNENGQITEVECEYDEKSKSGSNTEESNR

SEQ ID NO: 187420 - protein, 284 aa, Unknown
  Bacterial polypetide isolated from the Sargasso Sea
ITSKRKLAQLVDNEMVSGWDDPRMPTISGLRKRGYTPQSLKNFALTVGVSKRENVIDASLLEFCVRSHLNEVAPRAMAVINPLKIKIINYDKHEGEKISFEINQQNEEAGKREIAFTDEMFIEKEDFQENPEEGFFRLSPGEEVRLKNAYIIKAVEVVKDQEGNISQVLCEYDQKSKSGSNTPESNRKVKGTIHWVSAKEAVSAKINIYDRLFKVEEPGKNATIENEINENSLITKEALVEPYLLEAKEGQQFQFQRLGYFVKTDNKKTLEFNKTVGLRDGWKK

SEQ ID NO: 187421 - protein, 257 aa, Unknown
  Bacterial polypetide isolated from the Sargasso Sea
MKSPNMHMRDPVLYRIINFDHHRTKDKWKIYPTYDWAHGQSDYIEGISHSFCTLEFEVHRELYDWFINNINNKSELVPKQREFARLNLSYTIMSKRKLAELVGSGLVEGWDDPRMPTISGLRRRGVPPESILNFCEKVGVSKRENIIDYSLLDFCCREVLNKIAYRLMVILDPIELEIMNYKDKEREILIAENNPEDSAFGNREITFSKNLLIEKDDFKEEANRKFFRLTIGKEVRLKNGYIIKGEKVDKDNNGNIK

SEQ ID NO: 187422 - protein, 260 aa, Unknown
  Bacterial polypetide isolated from the Sargasso Sea
MYDWTHGESDYIEQVSHSLCTLEFEPHRELYDWFLDSISPLKGIRPKQREFSRLNLSYTITSKRNLAKLVEEGVVDGWDDPRMPTISGLRNRGYTPESLKSFALTVGISKRENVIDVSLLEFCVRTHLNEEAPRAMAVLDPLKISIINYNENNEESVNFDINPQKPGQGKREILFSKNIYIEREDFQENPEEGFFRLSPGEEVRLKNAYIIKAKNIIKNEEGQITEVECEYDEKSKSGSNTEESNRKVKATVHWVSAETA

SEQ ID NO: 187423 - protein, 257 aa, Unknown
  Bacterial polypetide isolated from the Sargasso Sea
MKNKNFIHHIIDKDNQDGKYDGRVYTRFPPEPNGYLHIGHAKAICLNFSIAEEYNGKCNLRFDDTNPIAEEKEYVESIKKDIRWLGFDWKDRIFFASDYFDDMYRYAISLINNNLAYVCDLTNEEIKDMRGTLTTFGKESPFRNRSIDENLKLFQDMKGGKFKNGEKTLRAKIDMSHSNLNMRDPVIYRILHAHHHRTGNDWCIYPMYDWAHGLEDSIERITHSLCSLEFEDHRPLYDWFLDSLNVYHPQQKLNLLA

SEQ ID NO: 187424 - protein, 323 aa, Unknown
  Bacterial polypetide isolated from the Sargasso Sea
WLPGFPPEPNGYLHIGHAKSICLNFGIASEFAGRCNLRFDDTNPAKEDQEFIDAIREDVSWLGFDWDGDVKYASDNFEQLYAWAEHLIEADKAFVDDLTAEEMREYRGTLTEPGKNSPHRDRSVDENLDLFRRMRAGEFEDGARVLRAKIDMASGNINLRDPVLYRIVRASHPRTRDNWFIYPTYDFAHGQTDAIESVTHSLCTLEFEDHRPLYDWLIENLPVPSHPRQYEFSRLNMTYTVLSKRRLMQLVEEGHVAGWDDPRMPTISGLRRRGVPPVSIRDFISRLAISKSEGTVEAAMLEHCIREPLNDSALRRMAVLRPL

SEQ ID NO: 187425 - protein, 194 aa, Unknown
  Bacterial polypetide isolated from the Sargasso Sea
MKDSKPRDFIRQIIHDDMRNQDSRKVITRFPPEPNGFLHIGHAKSICLNFAVANENKGKTFLRFDDTNPLKEDDVYVQSIKEDVSWLGFDWEDRLTFASDYFENLYQSAIKLINKGLAYVDSLNADEIREYRGTLTEPGKDSPFRNRSPEENLELFQRMKNGEFSDGEMILRAKIDMKSPNMNMRDPAIYRIRK

SEQ ID NO: 187426 - protein, 242 aa, Unknown
  Bacterial polypetide isolated from the Sargasso Sea
MEDKNNKSNFIRDIIDSDIRLEKNDNRVHTRFPPEPNGYLHIGHAKSICLNFGIAESYPNGKCNLRFDDTNPLKEEEEYVDSIIEDVQWLGFNVKNRIFYASDYFDQFYDYAVQLVRGNLAYVDDQLSEEIKNTRGTLKDPGVNSPYRNRSVEENLDLFQKMKDGLFKDGEKVLRAKIDMSHPNLNMRDPIMYRILHINHHRTYDKWCIYPMYDWAHGLEDSLEKITHSICTLEFSDHRLLY

SEQ ID NO: 187427 - protein, 233 aa, Unknown
  Bacterial polypetide isolated from the Sargasso Sea
GDEWCIYPMYDWAHGIEDSLEKITHSICTLEFEDHRLLYDWYLDQLETYHPQQIEFARLNLNYTVVSKRKLKRLVDDGFVDGWDDPRMPTISGLRRRGYTPESIRNFSEGVGVTKRDTVVDVAKLENALRDDLNKRSLRVMAVLDPLKVVITNYPDKELDYVDAINNPEDENAGKRKLAFSKEIYIERNDFMEEPPKKFFRLSPGKEVRLKFAYYITCNEVIKDGKGKIIELR

SEQ ID NO: 187428 - protein, 203 aa, Unknown
  Bacterial polypetide isolated from the Sargasso Sea
MHIGHLKAICLNFNLGKKYNSPVNLRFDDTNPEKEAKEYVDAIKHDINWLGFDWDKECYASDYFDQLHEWAIILIKKNKAYIDSQTSEQIATQKGTPTKPGQNSPFRERPNEESLSIFEGMYKGEYNQGEHVLRAKIDMASPNMLMRDPVVYRVMKVSHHRTGENWNIYPMYDWTHGESDYIEQVSHSLCTLEFEPHRELYDW

SEQ ID NO: 187429 - protein, 89 aa, Unknown
  Bacterial polypetide isolated from the Sargasso Sea
MICISKGCFLRPVIRSYAVIRCLRLEEPVMSEAEARPTNFIRQIIDEDLASGKHTTIHTRFPPEPNGYLHIGHAKSICLNFGIAQDYQG

SEQ ID NO: 187430 - protein, 257 aa, Unknown
  Bacterial polypetide isolated from the Sargasso Sea
MSESNTVIKNFIQKIIDEDNLSDKWGNRVHTRFPPEPNGYLHIGHAKSICLNFGLAEKNNGKCNLRFDDTNPVKEEDEYVRSIIEDVKWLGFNWEDRLYYASDYFDHMYNHALTLIQNGDAFVCDQSSDQMKDCRGTLKQPGQESPNRNRSVDENLQLFQKMRNGEFSDGSKTLRAKIDMSHPNLNMRDPVIYRILHASHHRTGDKWCIYPMYDWAHGLEDSIEKITHSICTLEFEDHRPLYDWYLQKPRRLSSAAD

SEQ ID NO: 187431 - protein, 200 aa, Unknown
  Bacterial polypetide isolated from the Sargasso Sea
ETYLRFDDTNPAAEKKEYVDSIKSSVAWLGHEPTKITYSSDYFDQLFELAIELIKRGKAYVCHQTKEETAASRQALQGFQLHCSRNGLKKYDTPLPPGAASPFRDRSVEENLQLFDEMSKGVWPEGACCLRMKGDLRSDITSMWDLAAYRVKFEAHPHSGDKYCIYPTYDYTHCLVDSLENITHSLCTLEFETRQAPNGP

SEQ ID NO: 187432 - protein, 553 aa, Unknown
  Bacterial polypetide isolated from the Sargasso Sea
MSQANSPTNFIRQIIDEDLASGKHSSVHTRFPPEPNGYLHIGHAKSICLNFGIARDYQGQCNLRFDDTNPVKEDIEYVESIKQDVQWLGFQWNGEICYSSDYFDKLHGYAIELIEKGLAYVDELSAEQMREYRGTLTAPGKNSPFRDRSVAENLALFEKMKNGEFAEGAACLRAKIDMASPFMVMRDPVIYRIKFAHHHQTGDKWCIYPMYDFTHCISDALEGITHSICTLEFQDNRRLYDWVLDNITIDCHPRQYEFSRLNLEYTVMSKRKLNLLVTEKHVDGWDDPRMLTVSGLRRRGYTPASIREFCKRIGVTKQDNIVEMSMLEACIREDLNENAPRAMAVLHPVKVVIENLAADEVLTAPAHPNNAEMGTRELNFTREILIDEADFKEEANKQFKRLVLGKEVRLRNAYVIKAERVEKDADGKVTCIYCSYDPETLGKDPADGRKVKGVIHWVSATHSLPAEVRLYDRLFKVPNPGAEEDFEAALNPDSLVIIEGARVEASLKNAKPEQAYQFEREGYFCADNKLSSPEHLVFNRTVALRDVWGKAEA

SEQ ID NO: 187433 - protein, 351 aa, Unknown
  Bacterial polypetide isolated from the Sargasso Sea
MSDKKKYRGKDFIRQMIHHDVDSGVNDGRLATRFPPEPNGYLHIGHALSICINFGIAKEFDAHCYLRFDDTNPAKESDEYVNSIMEDVKWLGFDWGNDLAHASDYFDSIHEFAIELIEKDLAYVDSQTSEEIKNSRGTLNAPGTKSPYRDRPISENLGLFDRMKNGEFENGEHVLRAKIDMSSPNINLRDPIIYRILHLDHQRTGSKWCIYPMYDFAHTLSDAIEGTTHSLCTLEFEDHRPLYEWFLDNLDLPTRPRQIEFSRLNLEHTITSKRKLADLVVSGHVSGWDDPRMPTLSGLRKRGYPASAIKEFCNRVGITKKDKTIEMSLLESTVREELDSSCNRVMAILNP

SEQ ID NO: 187434 - protein, 418 aa, Unknown
  Bacterial polypetide isolated from the Sargasso Sea
PAKESDEYVNSIMEDVKWLGFDWGNNLAHASDYFESIYEFAIELIEKDLAFVDSQTSEEIRNTRGTLNSPGIESPYRNRSVSENLGLFNRMKNGEFENGEHVLRAKIDMSSPNINLRDPVIYRILNLEHQRTGKTWCIYPMYDFAHTLSDAIEGTTHSLCTLEFEDHRPLYEWFLDNLNLSTRPRQIEFSRLNVEHTITSKRKLGELVDSGDVSGWDDPRMPTISGLRKRGYPASALREFCKRVGITKKDKSIEMSLLESTVREELDATCNRVMAIMNPLKVTIKNYPDGESETLEASNHPKKKEMGSREMPFGKNIFIEKDDFMESPEEDFYRLSPGAEVRLRYAYIIKCEEIIKDEDGEIIELICSYDPDTKSGVGTSKKKVKSAIHWVSADHSIKGKVSLFETLYSDPSPDSDSP

SEQ ID NO: 187435 - protein, 412 aa, Unknown
  Bacterial polypetide isolated from the Sargasso Sea
IRNNILYASDYFDIFYEHAITLIKSGDAYVDDQSAELIKSARGNLNEPGINSPFRNRTVEENLTLFKNMKSGLYANGEKVLRAKIDMSSPNLNMRDPIMYRIIHANHHRTGNKWCIYPMYDWAHGLEDSIEGITHSICTLEFEDHRPLYDWYLSQLKIHHPQQIEFARLDLNYTVMSKRKLKELVDNKHVVGWSDPRMPTISGLRNRGYSPDAIKMFCEKIGVAKRNNIIEYALLEYCVREDLNKKAMRVMAVLEPIKLIIDNYPDNTSEDLIADNNPENQNDGTRIIPFSKELWIEKSDFMEDAPKKYFRLSIGKEVRLKHAYYVTCTKVVKDNNGAVIAVHCNYDPNSKGGWTDDGRKVRGTLHWVSVKHAIDAEVRLYDRLFTADNPLDSKKYNHFIDTINPQFTYYYT

SEQ ID NO: 187436 - protein, 447 aa, Unknown
  Bacterial polypetide isolated from the Sargasso Sea
MAATGGKWRTRFPPEPNGYLHIGHAKAMYFDFGVAKQFGGTTTLRFDDTNPEAEKQEYIDSIIGSVKWLGHEPVETTYSSDYFDQLYEYALQLIKSGNAYVCFQNKEQTFESRKLLQTFQKTCVDGNLPRYDTPLPEGAESPWRNTSVEENLELFEKMKNGEFKEGECSLRMKGDLRSDIPSMWDLAAYRVKFASHPHTGDKWCIYPTYDYTHCLVDSLENITHSLCTLEFESRQAPNGSYYWLLDALDAYKPVTWEFSRCNITYNVMSKRKLNLLVTKGYVNGWDDPRLLTLEGLRRRGYTPTAINAFCSSLGVTRNDNTQHLGRLEQVMREELKDSASRYFAVVDPVKVNITNHPGGEVICEAPVHPSFPERGMRRINLTSTIFIERTDFKTEDVNGYFGMAPGKTIRLQFGYNVTCTDYKTGADGSIEEINVTIDMESRSQKPP

SEQ ID NO: 187437 - protein, 511 aa, Unknown
  Bacterial polypetide isolated from the Sargasso Sea
MEDKESPLNFIELIIENDLKKGLDQKQLSFRFPPEPNGYLHIGHVKAICLNFNLGLKYKAPVNLRFDDTNPQNEEVKYVNAIKEDIKWLGYSWEKECYASDYFDQLHEWAKYLIDNDFAYIDSQTSNEIADQKGTPTILGTKSPYRNRPTSESRNIFLEMTQGKHPEGAHVLRAKIDMNSPNMLLRDPIIYRVLDKPHHRTGYKWCIYPMYDWTHGQSDYLEQITHSLCTLEFKPHRDLYDWFLKTLPLDEMLPKQIEFARLNLSYTVTSKRKLKELIDKKIVYSWDDPRMPTISGLRRRGYTPESLKNFVHTAGIAKRDNIIEASLLEFCARDHLNKIAPRVNAVVNPLKLTISNYDRDEELLNGEINPENPSSGTREIPFSKHLYIDKEDFKEEANKKYFRLTIGKEVRLKNAYIIKGESVIKDKEGNLTEVICTYDKQSKSGSGSDASKRKVKGTLHWVSQKHAIKVKVNLYDRLFVDPAPDQHKDKSFLDFINPNSLQEVSAFVEPS

SEQ ID NO: 187438 - protein, 394 aa, Unknown
  Bacterial polypetide isolated from the Sargasso Sea
MDKKNKSDNFIIKIIERDNELGKWGERVHTRFPPEPNGYLHIGHAKSICLNFGIAIEFDGKCNLRFDDTNPLKEESEYVRSIIEDVSWLGFSWQDEPLFASDYFDQMHDYAVELIKKGKAYVCDLDPDQVRLQRGTLKKPGIDSPYRNRSIEENIDLFAKMRSGDFANGEKTLRAKIDMAHSNLNMRDPVMYRILHATHHRTGDEWCIYPMYDWAHGLEDSIEKITHSICTLEFEDHRPLYDWYLDQLEAYHPQQIEFARLNLNHTVVSKRKLKRLVDDGFVDGWDDPRMPTISGLRRRGYTPESIRDFSERVGVTKRDAVVDVAKLENSLRDDLNKRSPRVMAVLDPLKVVITNYPTDELDYVDAINNPEDENAGKRKLAFFKRNIYRKETIS

SEQ ID NO: 187439 - protein, 546 aa, Unknown
  Bacterial polypetide isolated from the Sargasso Sea
MADVEHRPTNFIRQIIDADLASGKHNTTVTRFPPEPNGYLHIGHAKSICLNFGIAQDYNGQCNLRFDDTNPEKEDIDFVNSIQQDVQWLGFQWSGNVRYSSDYFDTLYGYAVELINKGLAYVCFLNAEQMREYRGNLTQPGKNSPTRDTSPAENLALFEKMRAGGFKEGECSLRAKIDMSSAFICMRDPVIYRVKFAHHHQTGDKWCIYPMYDFTHCISDALEGITHSLCTLEFQDNRRLYDWILDNITIDCHPQQIEFSRLNLEYQVMSKRKLHTLVEGGHVAGWDDPRMPTIAGLRRRGFTPASLREFAKRIGVTKQDNMIEISALDSCIREDLDANAPRAMAVIDPLKVTISNYNAADVEWLEVHNHPKEESMGSRKVPFGRTLYIDRADFREEANKKYKRMVTGGEVRLRGAYVIRADEVIKNEAGDIVELICSYDPDTLGVNPADGRKVRGVIHWVEASQAVPAEFRIYDKLFTVANPAAEEDFLAVINPASLTVKTGWVEPKFKAAEAEKAFQFEREGYYCADNKDSTPDHLGVNRTVAL

SEQ ID NO: 187440 - protein, 569 aa, Unknown
  Bacterial polypetide isolated from the Sargasso Sea
MNTERNDAPAASNFIRNIIDEDNRTGKWGQRVETRFPPEPNGYLHIGHAKSICLNFGVARNYGGVCHLRFDDTNPEKESVEYVDSIIDSVRWLGFEWQKDGKEQLYFASDYYDKLYEFAELLIERGKAYVDSQSAEEMRANRGSASEVGTPSRFRERSVQENLDLFRRMKAGEFKEGEHVLRAKIDMSSPNFNMRDPVIYRIRFAHHYRTGDKWCVYPMYDYTHCISDALENITHSLCTLEFEDHRPLYDWILNELAEAGIFTRPLPQQIEFSRLNLTYAITSKRKLLQLVTEGHVDGWDDPRMPTIVGVRRRGFTPEAIQLFCERIGVTKVDSWIDMSVFEGALRDDLDDKAPRTAAVLDPLKLIIDNFPEGVSEPCNAPVHPHHPEMGVREFPISRELWIERDDYNETPPKGYFRLFPGNKVRLRYGYVIECIGADKDENGNIVAVHCNYFPDSKSGTEGANNYKVKGNIHWVSAAGAVPAEVRIYDRLFKEPQPDAGGRDFLEALNPDSKRVVNAYLEPGARDALPEQRYQFERHGYFVADRVDSKPGKPVFNRIVSLRDSWGKPA

SEQ ID NO: 187441 - protein, 189 aa, Unknown
  Bacterial polypetide isolated from the Sargasso Sea
MSHVDTEVRPSNFIRNIIDEDLKSGKHTSVQTRFPPEPNGYLHIGHAKSICLNFGIARDYQGLCNLRFDDTNPEKEDIDYVNSIQADVRWLGFQWDGEVRYSSNYFDQLHQYAVELINKGLAYVCFLNADETREYRGTLKEPGKNSPYRDTSVEENLQLFEKMRKGEFKEGECALRAKIDMASPFMCMR

SEQ ID NO: 187442 - protein, 553 aa, Unknown
  Bacterial polypetide isolated from the Sargasso Sea
MADVEHRPTNFIRQIIDADLASGKHNTTVTRFPPEPNGYLHIGHAKSICLNFGIAQDYQGQCNLRFDDTNPEKEDIDFVNSIQQDVQWLGFQWSGNVRYSSDYFDTLYGYAVELINKGLAYVCFLNAEQMREYRGNLTQPGKNSPTRDTSPEENLALFEKMRAGGFKEGECSLRAKIDMSSAFICMRDPVIYRVKFAHHHQTGDKWCIYPMYDFTHCISDALEGITHSLCTLEFQDNRRLYDWILDNITIACHPQQIEFSRLNLEYQVMSKRKLHTLVEGGHVSGWDDPRMPTIAGLRRRGFTPASLREFAKRIGVTKQDNMIEISALDSCIREDLDANAPRAMAVIDPLKVTISNYNAADVEWLEVHNHPKEESMGSRKVPFGRTLYIDRADFREEANKKYKRMVTGGEVRLRGAYVIRADEVIKNEAGDIVELICSYDPDTLGVNPADGRKVRGVIHWVEASQAVPAEFRIYDKLFTVANPAAEEDFLAVINPASLTVKTGWVEPSLKAAEAEKAFQFEREGYYCADNKDSTPDHLVFNRTVALRDTFFED

SEQ ID NO: 187443 - protein, 556 aa, Unknown
  Bacterial polypetide isolated from the Sargasso Sea
MSHVDTEVRPSNFIRNIIDEDLKSGKHTSVQTRFPPEPNGYLHIGHAKSICLNFGIARDYQGLCNLRFDDTNPEKEDIDYVNSIQADVRWLGFQWDGEVRYSSNYFDQLHQYAVELINKGLAYVCFLNADETREYRGTLKEPGKNSPYRDTSVEENLQLFEKMRKGEFKEGECALRAKIDMASPFMCMRDPVIYRIRFAHHHQTGDKWCIYPMYDFTHCISDALEHITHSLCTLEFQDNRRLYDWVLDNLDDFQAPNRTRQYEFSRLNLEYTLMSKRKLNDLVTRKLVSGWDDPRMPTIAGLRRRGYTPASIREFCQRIGITKQENMIEAAMLDACIREELNEYAPRAMAVLRPLKVVIENYPEGQIETIQAASHPSDESMGTRELAFGRELYIDVADFREEANKQYKRLVMGKEVRLRNAYVIKAERCDKDSEGNITTVYCSYDADTLGKNPADGRKVKGVIHWVEATTAKPAEFRLYQRLFTDPNPAAAETVDEVLNPNSLEVVNGLVEASLVNAPAEKAYQFEREGYFCADNKDSSAEHLVFNLTVALRDSFE

SEQ ID NO: 187444 - protein, 104 aa, Unknown
  Bacterial polypetide isolated from the Sargasso Sea
RKVKGVIHWVPAAESVECEVRLYDRLFRSANPEKSEEGGSFLDNINPESLVVLTGCRAEPSLAKASADDRFQFEREGYFCLDKDSTAGALVFNRTVTLRDSWGQ

SEQ ID NO: 187445 - protein, 552 aa, Unknown
  Bacterial polypetide isolated from the Sargasso Sea
MSDKQRNFIQRIIDEDNLSNKYDKRVHTRFPPEPNGYLHIGHAKAICLNFNIADEYGGKCNLRFDDTNPVSEDIEYVNAIKDDVEWLGYNWDDRLCFASDYFEKMHQYAIQLIEQGDAFVCDLTSDEIRQSKGNLTEPGNDSPYRNRSISENIDLFSRMTAGEFQNGERTLRAKIDMSHPNLNMRDPVMYRIIHKSHHRTKNNWCVYPTYDWAHGLEDSIENITHSLCSIEFEDHRPLYDWYLDKLNVYHPQQIEFARLNLDYTVMSKRKLKKLVDEKHVSGWDDPRMPTISGMRRRGYTAHAIRAFMDEVGVAKRDNVMELAKLEHHLRQHLNKVSQRRMAVLNPLKIIITNYPKNSSEKIEAINNPENPDDGLRNITFGSEIYIEQNDFMEDPPKKFFRLTLGREVRLRYAYYITCNKVIKDKDGNPIELHCTYDPESKGGTPDGRKVKATLHWVNAQDSIKAKVNLYDRLFSEPSPDSVDDFLSVINQTSLEVLSNCMLESSLLDFSPSETVQFERLGYFCLDLNSSEDHPVFNRTVTLRDSWTKIAKQ

SEQ ID NO: 187446 - protein, 501 aa, Unknown
  Bacterial polypetide isolated from the Sargasso Sea
FNLGKKYNSPVNLRFDDTNPEKEAKEYVDAIKHDINWLGFDWDKECYASDYFDQLHEWAIILIKKNKAYIDSQTSEQIATQKGTPTKPGQNSPFRERPNEESLSIFEGMYKGEYNQGEHVLRAKIDMASPNMLMRDPVVYRVMKVSHHRTGENWNIYPMYDWTHGESDYIEQVSHSLCTLEFEPHRELYDWFLDAISPLEGIRPKQREFSRLNLSFTITSKRKLAQLVEKKIVSGWDDPRMPTISGLRKRGYTPQSLKNFAVTVGVSKRENVIDASLLEFCVRSHLNEIAPRAMAVINPLKIKIINYAKQEGEKINFDINPQNKEEGKREIIFTDEMFIEKEDFQENPEDGFFRLSPGEEVRLKNAYIIKAVDVVKDEKGGVTEVLCEYDPKSKSGSNTPESNRRVKGTIHWVSSKKAVRAKINIYDRLFKVEEPGKNETIENEINENSLITKEAFVEPYLSNAKDGQQYQFQRLGYFVKTDNKKTLEFNKTVGLRDGWKK

SEQ ID NO: 187447 - protein, 555 aa, Unknown
  Bacterial polypetide isolated from the Sargasso Sea
MSDKKKYRGKDFIRQMIHHDIDSGVNDGRLATRFPPEPNGYLHIGHALSICINFGIAKEFDAPCYLRFDDTNPAKESDEYVNSIMEDVKWLGFDWGNDLAHASDYFDSIHEFAIELIEKDLAYIDSQTSEEIKNSRGTLNAPGIESPYRDRPISENLGLFDRMKNGEFENGEHVLRAKIDMSSPNINLRDPIIYRILHLDHQRTGSKWCIYPMYDFAHTLSDAIEGTTHSLCTLEFEDHRPLYEWFLDNLDLPTRPRQIEFSRLNLEHTITSKRKLADLVVSGHVSGWDDPRMPTLSGLRKRGYPASAIKEFCNRVGITKKDKTIEMSLLESTVREELDSSCNRVMAILNPLKVTIKNYPEGETEMLDARNHPKDKEMGSRQLPFSQNILIEKDDFMESPNEDFFRLSPGAEVRLRYAYIIRCDEVIKDENGEIVELICSYDPETKSGTGTSNKKVKSAIHWVSSDHSVSGNVNLFETLYNDPNPDSESPINQNSMVEIHNPAFEKSLVDAVVGSRFQFERNGYFILNTVEDERLSFNRIVTLKDTWAKIQKKKG

SEQ ID NO: 187448 - protein, 344 aa, Unknown
  Bacterial polypetide isolated from the Sargasso Sea
PMYDFAHTLSDAIEGTTHSLCTLEFEDHRPLYEWFLDNLNLSTRPRQIEFSRLNVEHTITSKRKLGELVDSGDVSGWDDPRMPTISGLRKRGYPASALREFCKRVGITKKDKSIEMSLLESTVREELDATCNRVMAIMNPLKVTIKNYPDGESETLEASNHPKKKEMGSREMPFGKNILIEKDDFMESPEEDFYRLSPGAEVRLRYAYIIKCEEIIKDEDGEIIELICSYDPDTKSGVGKSKKKVKSAIHWVSADHSITGKVSLFETLYSDPSPDSDSPLNPNSKLEIDEAQFEQSLSNAKIGSRFQFERSGYFILDEIEDEKLSFNRIVTLKDTWAKIQKKKK

SEQ ID NO: 187449 - protein, 410 aa, Unknown
  Bacterial polypetide isolated from the Sargasso Sea
MKNTNKHFIQKIIDEHNLSGKFNNKVHTRFPPEPNGYLHIGHAKAICLNFNIAEEYNGKCNLRFDDTNPIAEEEEFVRSIQEDVKWLGFDWEDRLCFASDYFQQMYEYALQLIQKGSAYVCELTPDEIKNTRGTLNEPGSESPYRNRSVDENLDLFKRMKLGEFDNGSKTLRAKIDMGHPNMNMRDPVIYRILHAHHHRTKDEWCIYPMYDWAHGLEDSIEGVTHSLCSLEFEDHRPLYDWYLDELGAYHPQQIEFARLNLSYTVMSKRKLKILVDNKHVEGWDDPRMPTISGFRRRGYTPEAIRNFMEEVGVAKRDNVMDVAKLESSLRSDLNQRSLRRMAVLNPLKVIITNYPEDKEELVTAKNNPEDESTGTRELPFSRELYIEKDDFLEEPSKKFFRLSPGNEVRF

SEQ ID NO: 187450 - protein, 569 aa, Unknown
  Bacterial polypetide isolated from the Sargasso Sea
MSTERNDAPAASNFIRNIIDDDNRTGKWGGRVETRFPPEPNGYLHIGHAKSICLNFSVARDYGGVCHLRFDDTNPEKESVEYVDSIVDAVRWLGFDWRKDAVDHQYFASDYYDKLYEFAELLIQRGKAYVDSQSADEMRANRGSLTEGGKPSPFRDRTPEENLDLFRRMKAGEFKEGEHVLRAKIDMASPNMNMRDPVIYRIRYAHHYRTGDAWCVYPMYDYTHCISDALEGITHSLCTLEFEDHRPLYDWVLNELAEAGKFTRPLPQQIEFSRLNLTYAITSKRKLLQLVTEGHVDGWDDPRMPTIVGVRRRGFTPESIHLFCERIGVTKIDSWIDMSIFEGALRDDLDDKAARTVAVLDPLKLVIDNYPEDLEEACTAPVHPHHPDRGVRTFPISRELWIEREDFVENPPKGYFRLFPGNKVRLRYGYVIECTGFDKDADGNVTAVHCNYFPDSKSGTEGANTYKVKGNIHWVSAKHAQPAEVRIYDRLFKEPHPDAGGANFLEALNPDSKKIVQAYIEPGNDDIAPETRLQFERHGYFVADRVDSKPGKPVFNRIVGLRDSWGKPA

SEQ ID NO: 187451 - protein, 130 aa, Unknown
  Bacterial polypetide isolated from the Sargasso Sea
MTKTNNTDNFIRKIIDKDNESDKWGGRVHTRFPPEPNGYLHIGHAKSICLNFGLAIEYDGKCNLRFDDTNPIKEESEYVRSIIEDVSWLGYSWGNEPLFASDYFGKMYDFAVELIKAGKAYVCDLDPDQK

SEQ ID NO: 187452 - protein, 521 aa, Unknown
  Bacterial polypetide isolated from the Sargasso Sea
MAEKELQTNFIKNIIIDDIKSNKTKKLITRFPPEPNGYLHIGHAKSICLNFELAKEFGGQCNLRFDDTNPEKESDEYIKSIQEDVRWLGFSWDKLCFASDYFDQLYDYALKLIEKDLAYVDSQTGDQIKQSRGTLQEPGINSPYRDRSVQENLTLFKDMKDGKFPDGTHVLRLKIDMKNSNINMRDPVIYRIKHFRHHRTQDKWCIYPMYDFTHCLSDAIEGITHSLCTLEFEDHRILYDWIIDKCDIKNKPRQIEFARLELENCVMSKRKLNELVNNKDVEGWDDPRMPTISGLRNKGFTAKSIRDFCGRIGITKKNSEIQFSVLENSIREELNESSPRAFGILKPLKVKIINFDEGERQIEASNGRKLILSNEIFIDEDDFMESPPEKYFRLYPGNTVRLKYACNITCKNVVKNNDGSIDFLECEYDKDSYELTKDKKVKGIIHWLDQKSSVQSVIQNFEGAKKVTYDKAVVEASILNLKKENNCQFERVGYYKINNVNNGSHECYQIVTLKDTSKRKV

SEQ ID NO: 187453 - protein, 556 aa, Unknown
  Bacterial polypetide isolated from the Sargasso Sea
MSHVDTEVRPSNFIRNIIDEDLKSGKHTSVQTRFPPEPNGYLHIGHAKSICLNFGIARDYQGLCNLRFDDTNPEKEDIDYVNSIQADVRWLGFQWDGEVRYSSNYFDQLHQYAVELINKGLAYVCFLNADETREYRGTLKEPGKNSPYRDTPVEENLRLFEKMRLGEFKEGECALRAKIDMASPFMCMRDPVIYRIRFAHHHQTGDKWCIYPMYDFTHCISDALEHITHSLCTLEFQDNRRLYDWVLDNLDDFQAPNRTRQYEFSRLNLEYTLMSKRKLNDLVTRKLVTGWDDPRMPTIAGLRRRGYTPASIREFCQRIGITKQENMIEAAMLDACIREELNEHAPRAMAVLRPLKVVIENYPEGQIETIQAASHPSDESMGTRELAFGRELYIDVADFREEANKQYKRLVMGKEVRLRNAYVIKAERCDKDSEGNITTVYCSYDADTLGKNPADGRKVKGVIHWVEATTAKPAEFRLYQRLFTDPNPAAAETVDEVLNPNSLEVVNGLVEASLANAPAEKAYQFEREGYFCADNKDSSAEHLVFNLTVALRDSFE

SEQ ID NO: 187454 - protein, 504 aa, Unknown
  Bacterial polypetide isolated from the Sargasso Sea
MAAIASLRFDDTNPVKEDATYSQAILEDVRWLGFDLENRLTHASDYFEKLYEFACVLIRRGKAYVDSLSAEKIREYRGTLTEPGSNSPFRDRTIEENLSLFQRMREGEFEDGSHVLRAKIDMAAPNIHMRDPTLYRIRKVSHHRTGNVWCIYPMYDFTHCLSDALEGVTHSLCTLEFEDNRPLYDWVLQEAEAPCLPKQYEFSRLNLQYTVLSKRKLIQLVEENHVEGWDDPRMPSLIGIRRRGFPPESIRLFCQRIGISKSENNIDFSVLEDCAREVLNQDAPRAFAVLKPLKVVITNFPENQVEMLDAPVHPQDPEAGRRSLPLTREILIEEDDFLKDPPRKFFRLAPGKEVRLRYGYVIRCDEVVRDDSGKISELRCTYDPQTAKGAQPEGRKVKGIIHWVSATHSISTEVRLYDRLFHEASPGSKNEDGDFLRDLNPDSIQILKNCRLEPGLKNVKGGSRYQFERLGYFCADLKNSSNELPVFNRIVTLRDTWAKLTRSD

SEQ ID NO: 187455 - protein, 209 aa, Unknown
  Bacterial polypetide isolated from the Sargasso Sea
MTVDTQKSDEPGNDFIRQRIKSDVSADRLSHGVITRFPPEPNGFLHIGHAKSICLNFGVAQEFGGKTFLRFDDTNPEKEDEIFVQSILEDVKWLGYTWDNLTYASDYFEQLYTFAEGLILDGKAYVCSLTSEEIRESRGTLTEVGKNSPYRDRSIDESLEMFRSMKQGKFEEGSQVLRLKIDMASPNMNLRDPVIYRIRYQSHQRTGDK

SEQ ID NO: 187456 - protein, 438 aa, Unknown
  Bacterial polypetide isolated from the Sargasso Sea
MAETEHRPTNFIRQIIDKDLSSGLHDAIKTRFPPEPNGFLHIGHAKSICLNFGIAQDYTGTCNLRFDDTNPAKEDITFVNSIKEDVQWLGFTWDGEARYSSNYFDQLHAYAVELIEKGLAYVDFSAQDVMREMRGTLKEPGQNSPYRDTDVETNLSEFAKMTAGEYKEGECSLRAKIDMASPFMCMRDPVIYRVKHAHHHQTGDKWCVYPMYDFTHCISDAIEGITHSLCTLEFQDNRRLYDWVIENISIDCTPRQYEFSRLNLEYTVLSKRRLIQLVDENHVHGWDDPRMPTIAGLRRRGYTPGSIVEFCKRIGVTKMDNMVEMSMLEACIRDDLNANAPRAMAVLDPIKLVIENYEEGQTETLVAPNHPNDESMGTRNIGFSREVYIEAEDFRESANKKFKRLVLDKEVRLRNAYVVKANRVEKDENGNVTTVFVL

SEQ ID NO: 187457 - protein, 237 aa, Unknown
  Bacterial polypetide isolated from the Sargasso Sea
MGKRASRKPFMSKKDKYRGKDFIRQMIHHDIDSGVNDGRLATRFPPEPNGYLHIGHALSICINFGIAEEFDAPCYLRFDDTNPAKESDEYVNSIMEDVKWLGFDWGDNLAHASDYFESIHEFAIELIEKDLAFVDSQTGEEIRNTRGTLNSPGIESPYRNRSVSENLGLFNRMKNSEFENGEHVLRAKIDMSSPNINLRDPVIYRILNLEHQRTGKTWCIYPMYDFAHTLSDAIEGT

SEQ ID NO: 187458 - protein, 316 aa, Unknown
  Bacterial polypetide isolated from the Sargasso Sea
MSGGGKPPPLFFRPSDPIIFFRYVFSVTNSCLYAPLVRSCAVIRCLRFEEPTMSEAEARPTNFIRQIIDEDLATGKHTTVHTRFPPEPNGYLHIGHAKSICLNFGIAQDYQGQCNLRFDDTNPVKEDIEYVESIKNDVQWLGFHWSGDVCYSSDYFDQLHQYAVELINKGLAYVDELSADEIREYRGSLKAPGKNSPYRDRSVEENLALFEKMRAGGFEEGKACLRAKIDMASPFIVMRDPVLYRIKFADHHQTGSKWCIYPMYDFTHCISDALEGITHSLCTLEFQDNRRLYDWVLDNISIPVHPRQYEFSRLNL

SEQ ID NO: 187459 - protein, 233 aa, Unknown
  Bacterial polypetide isolated from the Sargasso Sea
MKSHIQSLLEQTIESFKQQGILPADFEARIQVDRTKDKSHGDLATNLAMMLTKAAGKNPRELAQLIIDNLPASAYVAKVEIAGPGFINFFIDDSALANQLQAAISDEHLGIKLPTPQTIVVDYSSPNLAKEMHVGHLRSTIIGDSVVRTLEFLGHKVIRQNHVGDWGTQFGMLLAYMEELRAQNGEQAQLELSDLETFYRAAKLRFDESAEFATRARQLVVELQSGDEYCNKL

SEQ ID NO: 187460 - protein, 305 aa, Unknown
  Bacterial polypetide isolated from the Sargasso Sea
IAANLNDKRIENIKIEGPGFINIFISAETKSELLKNIIIEGDKWGITKDYSGRILLEFVSSNPTGPLHVGHGRGAVLGMAIANLLENIGYEVTKEYYVNDAGRQISILTSSVLLNAYVETFETDGTYEGEYIKELAKTFKSNFGELDKKIDFGSLDDDKDIRLDEISKYFKSEFSGAWKEAKKFAVSEILNLIKEDLHNFNIIHDHWFSESSLGTVEDVESDLSKSLKTIKNQGYTYSKDGAEWFKTTEFGDDKDRVLLRENKEPTYYLTDVGYHKNKIDRNFDSYINIFGADHHGYIPRLTSCL

SEQ ID NO: 187461 - protein, 219 aa, Unknown
  Bacterial polypetide isolated from the Sargasso Sea
MLIIFRELTKQFEQSLLDSLEKNDKKGEFEILRKNLITQSSKEEFGDYQCNVCLSLSKTYKKNPRDISNDFINLLNKNKIIAKLCKSLEIAGPGFINIKLKDEVLINEIKSNIQCNRAGIPLIRKDLDSGLSNKVIVDFSSPNIAKEMHVGHLRSTIIGDSISRIFELRGYEVLRLNHVGDWGTQFGMLITQLKDLYSNDLEEIGKIKISDLVEFYKES

SEQ ID NO: 187462 - protein, 110 aa, Unknown
  Bacterial polypetide isolated from the Sargasso Sea
LAQLIIDNLPASAYVAKVEIAGPGFINFFIDDSALANQLQAAISDEHLGIKLPTPQTIVVDYSSPNLAKEMHVGHLRSTIIGDSVVRTLEFLGHKVIRQNHVGDWGTQFG

SEQ ID NO: 187463 - protein, 153 aa, Unknown
  Bacterial polypetide isolated from the Sargasso Sea
YDCRMAAIKYADLSQNRVSNYQFSFDKMLSLQGNTAPYLLYALVRIAGISRKGGDLNVLDQNIQFNEPQEWALIRKLLELDCIIAEVEKELLPNRLCGYLFELSQIFNRFYDQVPILKASEPLRTSRLALCSITADTLKLGMTLLGIPTLERM

SEQ ID NO: 187464 - protein, 279 aa, Unknown
  Bacterial polypetide isolated from the Sargasso Sea
MRIAVDYSSPNLAKEMHVGHLRGTIIGDAIVRVLEKLGHKVVRQNHVGDWGTQFGMLICYLQELQEKGIEAHPSALADLEKFYKAAKSRFDSDEEFAKRSRKAVVELQAGNAQSLVAWKQFIEESLNHCDEIYSKLNVTLNRTHLDAESKYNDDLSGVIQILEKKGLLSESEGAKCVFLPEFIGKDGNNLPVIVQKSDGGYLYSTTDLAAVIHKSKDLQVDRALYVVDARQSLHFQQVFAVAKEAEFAKEEISLEHISYGTMMDSSGKPFKTRSGDTVK

SEQ ID NO: 187465 - protein, 165 aa, Unknown
  Bacterial polypetide isolated from the Sargasso Sea
MDKNVLSTINEKYSTTISDDLKNGHLTSNVCMVAASILNLNPKDLAKELEEKLKKLNKFQEIKVAGPGFINISLNRKDFISILDEINNNKDKFGESNLGNGNKIQIEFVSANPTGPLHVGHGRGAAYGDALARILTKTGSIVEKEYYINDAGRQIDILTASVITK

SEQ ID NO: 187466 - protein, 309 aa, Unknown
  Bacterial polypetide isolated from the Sargasso Sea
RELHQSGKIDTTLKQLQNKDLIYVGVLEPPKGKTPEDWEPKPQTLFRSTNFGDDVDRALKKSDGSWTYFAPDIAYHLDKYQRGYTHLIDVWGADHGGYVKRMKSAVEAVTEGGADLDVKICQLVRLMRNGEPIKMSKRAGTFVTLRDVVEEVGRDAVRFMMLYRKNDAPLDFDFAKVTEQSKDNPVFYVQYAHARIHSVLRNAAMDEGLTGVDLTDSALATADLGSLSDEAELGLIKHMLQYPRMIEAAAEAHEPHRVAFYLFELASSFHALWNKGKDHPELRFIVPEQRDVTLARLALIRATGYVIAS

SEQ ID NO: 187467 - protein, 244 aa, Unknown
  Bacterial polypetide isolated from the Sargasso Sea
PEFGDFQINCALSLAKEIKQSPRDIAKQIADQLQKDNDFVKICNPPLIAGPGFINLSINSKTLISEIHFRLNDKRLGVPLKKFSSEKIEEGKKNTRVIIDFSSPNIAKEMHVGHLRSTIIGDSLARVLEFCGYEVIRLNHVGDWGTQFGMLITHLKEVVPEALYTKNVVEIRDLVNFYRQAKKRFDEDQIFQNKSRSEVVNLQAGDQESLIAWQLLCNQSRKEFQKIYDRLDIKLTERGESFYN

SEQ ID NO: 187468 - protein, 316 aa, Unknown
  Bacterial polypetide isolated from the Sargasso Sea
KSTQLRAKGFKPGDECWPTDSENPLAKNFYNGDYIADIAEAFKAKATVKADDREFTANGDVDDYDNIRQFAVAYLRNEQDKDLQAFNLQFDEYYLESSLYTSGRVEATVNKLIANGKTYEQDGALWLKSTDYGDDKDRVMRKQDGSYTYFVPDVAYHIAKWERGFTKVVNIQGTDHHGTIARVRAGLQAADVGIPKGYPDYVLHTMVRVVKGGEEVKISKRAGSYVTLRDLIEWTSKDAVRFFLLSRKPDTEYTFDVDLAVAQNNDNPVYYVQYAHARIQSVLRAWQEAGGGDVASLQDVDLSALEGPQAQALMLQ

SEQ ID NO: 187469 - protein, 190 aa, Unknown
  Bacterial polypetide isolated from the Sargasso Sea
MLRIAQALETQLRGAMQRAFPEAEAVLDPQLAPASKPEFGDFQANGALPLAKPLKQAPRQIATAIVEQLQADTAFTELCLEPQIAGPGFINLTIRPERLAAEVSVRLGDERLGVPAVTNKAPVVVDFSSPNIAKEMHVGHLRSTIIGDSLARVLEFRGHPVLRLNHVGDWGTQFGMLITHLKQVAPEALE

SEQ ID NO: 187470 - protein, 193 aa, Unknown
  Bacterial polypetide isolated from the Sargasso Sea
IRLKDLLNEAVRRAKEDLLKRLEDEDRYETEEFIANTSRIIGLGAVKYADLSQNRITNYQFSFDKMLSLNGNTAPYLLYTLVRILGIKRKNNFVYDSKDFQYVNYEHKSEWKLIRKLLKFDEVIISIEKDLMPNRLCNYLFELCQTFNRFYDQVPILKEEKDIKISRLNLCDLTAKTLKLSLELLGIETLERM

SEQ ID NO: 187471 - protein, 196 aa, Unknown
  Bacterial polypetide isolated from the Sargasso Sea
MGFGTMNGPDGRPFKTRDGGTVKLVQLLDEAEQRAYSLVKDKNPDLAEDELRQIARVVGIASVKYADLSKHRTSDYSFNFDLMLSFEGNTAPYLLYAYTRVAGVFRKLGKGVNEIGGQITLVAEQEQALAAKLAQFNELLGNVANKGTPHILCAYLYDLAGLFSSFYENCPILSAEEETTRDSRLRLTALTGRTPQ

SEQ ID NO: 187472 - protein, 307 aa, Unknown
  Bacterial polypetide isolated from the Sargasso Sea
PMPRGQRLVSAVEIAGPGFINLRLSAAARADVIAAVFAEGDRYGAANTHDGAPVLVEFVSANPTGPLHVGHGRQAALGDALASLLDWQGHKVHREFYYNDAGVQIHNLAVSVQARARGYKPGDANWPEAAYNGDYIADIAADYLAGKTVRASDGEPVTGERDVENLEAIRRFAVTYLRNEQDIDLQAFGVKFDRYYLESSLYTEGKVQQTVDALVAAGKTYEQEGALWLRTTDDGDDKDRVMRKSDGAYTYFVPDVAYHTTKWGRGFTQVINVQGSDHHGTIARVRAGLQGLNIGIPKGYPELRPAQ

SEQ ID NO: 187473 - protein, 272 aa, Unknown
  Bacterial polypetide isolated from the Sargasso Sea
QNHVGDWGTQFGMLLAYMEELRAQNGEQAQLELSDLETFYRAAKLRFDESAEFATRARQLVVELQSGDEYCNKLWREFNDISLSHCHEVYERLGVSLTRADVHGESAYNADLEQVVKDLDAQGLLTQSNGAKVVFQEEFRNKEGEALPVIIQKADGGYLYATTDLAAMRYRSSVLKADRVLYFVDLRQALHFQQVFSLAKLAKFVRNDMSLEHLGFGTMNGEDGRPFKTRTGGVVKLVDLLDEANTRALELVRSKNPDMDEATLAEIARVVG

SEQ ID NO: 187474 - protein, 202 aa, Unknown
  Bacterial polypetide isolated from the Sargasso Sea
MIADEIKNKILSHIEEHFSEEEVSIASSKFQIEIPDSPEKGDLTCNIALILGNITKSNPKEIGLEIGNILKELNLVSSIEVAGPGFINIFLNHSGTLKIIKDILNKNTIREEADSKKIQVEFVSANPTGPLHVGHGRGAIYGDVISKLLEKKGHEVQKEYYVNDAGRQIDILTASVYLRAINIEDNIFPESAYRGEYIKEMQ

SEQ ID NO: 187475 - protein, 317 aa, Unknown
  Bacterial polypetide isolated from the Sargasso Sea
NVEFVSANPTGPLHAGHARGACYGDAIANLLEYVGFSVHREFYMNDRGLQMTAFGRSLEARKNNESLPEDGYGGEYVIEWAKEMPAGLALEEVITWGCEFAKSDQQDTLSELGIYFDTWFSEKSMIDNGEIDRVLANLAEKGMAYEKDGATWLSSVEFGDDKDRVLIKSDGEYTYLTPDVAYHRNKFERSDWLINVWGADHHGYIARMKAAMHALGYDSDALTVQVTQLVKLLRAGEEVKLSKRQGDIIELRSIIEEIGADATRFMYLLQSVDSKQTFDLELAASQGMDNPVYYVQMAYARLCSIERNANEHGFDLK

SEQ ID NO: 187476 - protein, 264 aa, Unknown
  Bacterial polypetide isolated from the Sargasso Sea
MNYFKIVSEIVCLEIQSLVDEGKLVSDLNLEDVGLESTRDPAHGDLSSNAAMVLAKSAKTDPKELGQLIVDRLTKRSEFERVSLAGPGFINLKLVSKFWTKLLPRVLERGLKYGDCDLGGGKTINLEYVSANPTGPMHIGHARGAVIGDALGNLLSKAGYNVSREYYINDAGGQIDVLARSVHLRYLQALGKKIDKFPDGLYPGEYLVQTAKDLFERDGSKWSELKEEIWLPELKNFAIESMMALIRDDLMALGIIHDVFTSEA

SEQ ID NO: 187477 - protein, 48 aa, Unknown
  Bacterial polypetide isolated from the Sargasso Sea
MHVGHLRSTIIGDSVVRTLEFLGHKVIRQNHVGDWGTQFGMLLAYMEE

SEQ ID NO: 187478 - protein, 244 aa, Unknown
  Bacterial polypetide isolated from the Sargasso Sea
ESKYNDDLSGVIQILEKQGLLSESEGAKCVFLPEFIGKDGNNLPVIVQKSDGGYLYSTTDLAAVIHKSKDLQVDRALYVVDARQSLHFQQVFAVAKEAKFAAEEISLEHISYGTMMDSSGRPFKTRSGDTVKLIELLNESVSRAYTLVTGKNPDLTENERIEISQKVGIASVKYADLSKNRTSDYIFNWSSMLSFEGNTAPYLLYAYARIRSLLKKASSTQSSNISNLIAPVERALLTKLLQFP

SEQ ID NO: 187479 - protein, 227 aa, Unknown
  Bacterial polypetide isolated from the Sargasso Sea
MIIIFKELTKNFEQSLLDSLNKNNKKGEFENLRKNLVTQSSKEEFGDYQCNVCLSLSKIYQKNPRDISIDFMNLLNKNRNISKLCKSLEIAGPGFINIKLKDEVLINEIKSNIQCQRSGVPQIKKDLDSGLSKKVIVDFSSPNIAKEMHVGHLRSTIIGDSISRIFELRGYEVLRLNHVGDWGTQFGMLITQLKDLYSNDLEEIGKIKISDLVEFYKASKKKFDNES

SEQ ID NO: 187480 - protein, 201 aa, Unknown
  Bacterial polypetide isolated from the Sargasso Sea
KKLKTRSGETIRLVDLLDEAIQRAREDLKDRLKTESRSENESFIDKVSTTVGIAAIKYADLSQNRVSNYQFSFDKMLSLQGNTAPYLLYALVRIAGISRNGGDLNVSSQNIQFNEPQEWALIRKLLQLDCIIAEVEKELLPNRLCGYLFELSQIFNRFYDQVPILKASEPARTSRLALCSITADTLKLGMSLLGIPTLERM

SEQ ID NO: 187481 - protein, 184 aa, Unknown
  Bacterial polypetide isolated from the Sargasso Sea
MADHTNKEEINKIIEKYSISITETLKNGHITTNVCMVAASNLKLNPIELASKLVEKLNLLNLFETVETAGPGFINITLRREDFVSIINSINDNKEKYGESNIGNGKKIQIEFVSANPTGPLHVGHGRGAAYGDAIGRILKATGYDVQKEYYINDAGRQIDILTASVILKSISKEIGDYFPRKCI

SEQ ID NO: 187482 - protein, 202 aa, Unknown
  Bacterial polypetide isolated from the Sargasso Sea
MIADEIKNKILSHIEKHFSEEEVSIASSKFQIEIPDSPEKGDLTCNIALILGNVTKNNPKKIGLEIGNILKELNLVSTIEVAGPGFINIFLNHSGTLKIIKDILDKNTIRVEEDSKKIQVEFVSANPTGPLHVGHGRGAIYGDVISKLLEKKGHEVQKEYYVNDAGRQIDILTASVYLRVINIEDNIFPKSAYRGKYIKEIA

SEQ ID NO: 187483 - protein, 248 aa, Unknown
  Bacterial polypetide isolated from the Sargasso Sea
MNVIQKVLEIIQVEIKDLISEGIVSSSADLTRINLDRTKDPAHGDFSTNAAMILSKSSGIKPHDLGKIIAERLKEKNEFKTIEIAGPGFINIRLVREFWRSLIPTILKSGIGYGDSDIGKGQPVNIEYVSANPTGPMHIGHARGAVFGDALSSLLEKVGYKVTREYYINDWGSQIDVLARSTYLRYREALGEDIGKIPEGLYPGDYLKNLGEFIKRKDGDKWKNLSEDEWLDSFKELAIQEMMALIRE

SEQ ID NO: 187484 - protein, 283 aa, Unknown
  Bacterial polypetide isolated from the Sargasso Sea
ILVEDQGAKCVFLEGLTNKEGKPLPLIIQKKDGGFNYATTDLAAIRYRFNKAPNGDNASRIIYVTDQGQANHFAGVFQVAKKAKWIPDNCQVDHVPFGLVQGIDGKKLKTREGETIRLKDLLKEAVKRAKEDLLKRLEDEDRYENEEFIANTSRIIGLGAVKYADLSQNRITNYQFSFDKMLSLNGNTAPYLLYTLVRILGIKRKNNFVYDYKDFESINYEHNSEWKLIRKLLKFDEVIISIEKDLMPNRLCNYLFELCQTFNRFYDPVPILKEEKNKKFLDL

SEQ ID NO: 187485 - protein, 268 aa, Unknown
  Bacterial polypetide isolated from the Sargasso Sea
MKERLISLIESALDTLITDGTLPADAKRPVQIDRTRDKSHGDFATNIALMLAKPAGMKPRDLAEKLIAALPNDSAVAKVDIAGPGFINFFQADDWLTGLLDSALADDFLGISRPEQPQTVVVDYSSPNLAKEMHVGHLRSTIIGDAVVRTLEFLGHTVIRQNHVGDWGTQFGMLLAYLEEQKTEEGERELSRELANLETFYRAAKQRFDESDSFADRARALVVKLQSGDDYCLTLWAEFNQVSLSHCQAIYDRLGVSLTPADVHGESA

SEQ ID NO: 187486 - protein, 298 aa, Unknown
  Bacterial polypetide isolated from the Sargasso Sea
ARAELVKLQSGDEENLAIWQRMIALSQEQFDHVYGRLEVTFDETLGESFYNPQLPGLVEELQGKGIAELSEGAMVVRFPGDKQLADKPAIVRKRDGAANYTTTDLATLRYRMETWSPTDIVYVTDGRQQLHFQQLFNIFGRWQESVSAKLEHVWFGSILGPDGKPFKTRSGETVRLADLLDEAVERALAVVSEKNPDLPDAERREIARVVGLGALKYADLSNNRQSDYIFDWDKMLALQGNTAPYLQYAYTRVRSIFRKVDAPDFTKVELQLKAPEELALAKHLMNFGQTLEMVAQDY

SEQ ID NO: 187487 - protein, 288 aa, Unknown
  Bacterial polypetide isolated from the Sargasso Sea
PELAEKRATPAVYIVQKSGGGYLYATTDLAAMRYRSGKLNADRTLILTDARQALHFKQTEIVGRKAGFMKEAQTYEHCPFGMMLGSDGKPFKTRTGGTVKLVELLDEAVERAGKLIAERDNDLSTDELQEVARKVGIGAVKYADLSKNRTTDYMFNWDSMLSFEGNTAPYLQYAYTRVKSLFRKAGVEMANMPVDINIVEKQEHALAVLLMQFEEVIGMVSREATPHVLCTYLYDVASAFMTFYEACPMLKEGIEPEVRDSRLALSALVAKTLEKGLTLLGIETLEKM

SEQ ID NO: 187488 - protein, 321 aa, Unknown
  Bacterial polypetide isolated from the Sargasso Sea
MFNLLNKNKSISKLCKSLEIAGPGFINIKLKDEVLINEIKSNIECQRAGVPLTKKDLDSGLSNKVIVDFSSPNIAKEMHVGHLRSTIIGDSISRIFELRGYEVLRLNHVGDWGTQFGMLITQLKDLYLNDLEEIGKIKISDLVEFYKASKKRFDNESEFQKRSREEVVKLQSGDSKSIQAWKLLCDQSRKEFDEIYKNLKIKIKERGESFYNPFLKGVIEDLNLKKILVEDQGAKCVFLDGMTNKEGNPLPLIIQKKDGGFNYATTDLAAIRYRFNKAPNGDDASRIIYVTDHGQANHFAGVFQVAKKAKWIPDKCQVDPC

SEQ ID NO: 187489 - protein, 252 aa, Unknown
  Bacterial polypetide isolated from the Sargasso Sea
MPREESHGDISTNICLVLSKIVGLKPKELAILMKSNLEKLDCFNGISIEGPGFININLENSFWHEQILKILKLKSKFGRSEIFLNNNINVEFVSANPTGPLHVGHVRGAVIGDVLSNVLKMVGYNVTKEYYINDAGNQIDVLAASVFIRYEELITKNKAEIPEGYYPGEYLIELAKSLYDVHGYSLLNGDKLKSLELIKKFSIEYLLNQIKNDLKKLNIEMDEYSSEKKLVEDLSVEKTIQELDKKGLIYIG

SEQ ID NO: 187490 - protein, 215 aa, Unknown
  Bacterial polypetide isolated from the Sargasso Sea
MRIRSLLSQRMEAAFTALGLSGQALLQSASRPEFGDYQANGVMAAAKRAGQNPREVAQAIIDAIDLDGIASDLSVAGPGFINITLAPEFIANAVTSPQPSVDPQRVVVDYSGPNLAKEMHVGHLRGTIIGDCIARVLESLGHTVIRQNHVGDWGTQFGMLLTFMAEQEEASDSLADLENFYRQAKQRFDTDEDFQTRSRQAVVQLQSGDADMLDE

SEQ ID NO: 187491 - protein, 312 aa, Unknown
  Bacterial polypetide isolated from the Sargasso Sea
AVGKFIDVSIAHSEEVYDKLNVSLTRKDIMGESAYNDDLANVISDLKAKGLAVEDQGAQVVFIPELADKEGNPAVYIVQKSGGGYLYATTDLAAMRYRSGKLNADRTLILTDARQALHFKQTEIVGRKAGFMKEEQTYEHCPFGMMLGSDGKPFKTRTGGTVKLVELLDEAVERAGKLIAERDNDLSEDELKEVARKVGIGAVKYADLSKNRTTDYMFNWDSMLSFEGNTAPYLQYAYTRVKSLFRKAGVDMATMPVDINIAEKQEHALAVLLMQFEEVIGTVSREATPHVLCTYLYDVASAFMSFYEACPM

SEQ ID NO: 187492 - protein, 156 aa, Unknown
  Bacterial polypetide isolated from the Sargasso Sea
HVAGTVGLAAVKYADLSQNRITNYQFSFDRMLALQGNTAPYLLYAVVRVAGIARKGGDLDASTAQLHFSEPQEWALVRELLKFDAVIAEVEEELLPNRLCSYLFELSQVFNRFYDQVPVLKAEPEALPSRLALCRLTADTLRLGLGLLGISTLDRM

SEQ ID NO: 187493 - protein, 172 aa, Unknown
  Bacterial polypetide isolated from the Sargasso Sea
MNIKELLSSKTQAAMVALGLPADTNTAVTISTKVEFGDYQINGAMAAAKLLKTNPRALAQQLVQQLDLADMAEKVEIAGPGFINVTLRKDWLAAQLVGASQNPRLTLSANPAPQTVVVDYSAPNLAKEMHVGHLRSTIIGDAVVRCLEFWGDKVIRQNHMGDWGTQFGMLIA

SEQ ID NO: 187494 - protein, 232 aa, Unknown
  Bacterial polypetide isolated from the Sargasso Sea
CLIASNLAKKNPRDIASALISRLEIHSEIVKVELAGPGFINIFLTREAFLNQLDDAHKNQNSFINSSNTPKEKIQIEFVSANPTGPLHVGHGRGAAYGDAIGRILQQLGHKVSREYYVNDAGRQIDILACSIFLRKFECFDEDAFPKSAYKGSYILEIAKGADIEQALAELDKEKLIANLPDDEEEKIDELIERIKINHSNSWYLIRDFGLNFVIKSIKEDLTQFKVIFDNW

SEQ ID NO: 187495 - protein, 155 aa, Unknown
  Bacterial polypetide isolated from the Sargasso Sea
MLRIAETLEAQLRSAMQQAFPEADAELNPALSPASKPEFGDFQANGSLALAKPLKQAPRQIAGAIVEQLQNNPEFSALAEAPEIAGPGFINITLKPTVLAAEVRQRIGDPRLGVAAVQQAKAPVIVDFSSPNIAKEMHVGHLRSTIIGDCLARVL

SEQ ID NO: 187496 - protein, 274 aa, Unknown
  Bacterial polypetide isolated from the Sargasso Sea
SPNIAKEMHVGHLRSTIIGDSLARVLEFRDHPVLRLNHVGDWGTQFGMLITHLKQVAPDALETAYAVDLGDLVAFYREAKKRFDDDEAFQSTSREEVVKLQGGDPVSLKAWGLLCDQSRREFQKIYDRLDIRLNERGESFYNPFLPAVIDGLKDAELLVTDDGAQCVFLEGVQGKDGKPLPVIVQKSDGGFNYATTDLAAIRYRFGVAPDGDDARRVIYVTDAGQANHFSGVFQVAQRAGWIPDGARLEHVPFGLVQGEDGKKLKTRSGTRAVR

SEQ ID NO: 187497 - protein, 272 aa, Unknown
  Bacterial polypetide isolated from the Sargasso Sea
EISTRLEEALNRAFIKVFPEEDRSSKTSSILTASNLVPASKPEFGDFQINCALSLAKEIKQPPRDIAQQIADQLQKDSDFVKICNPPLIAGPGFINLSINSNTLISEIHCRLNDKRLGVPLKQFSSEKIEDGKSNNRVIIDFSSPNIAKEMHVGHLRSTIIGDSLARVLEFCGYEVLRLNHVGDWGTQFGMLITHLKEVVPEALHTKDVVEISDLVNFYRQAKKRFDEDQIFQNKSRSEVVNLQAGDPESLIAWQLLCTSSRKEFQKIYDRL

SEQ ID NO: 187498 - protein, 193 aa, Unknown
  Bacterial polypetide isolated from the Sargasso Sea
IRLKDLLKEAVRRAKEDLLKRLEDENRYETEEFIANTSRIIGLGAVKYADLSQNRITNYQFSFDKMLSLNGNTAPYLLYTFVRISGIKRKNDFVYDSKDCQFINYEHKSEWKLIRKLLKFDEVIISIEKDLMPNRLCNYLFELCQTFNRFYDQVPILKEEKNIKISRLNLCDLTAKTLKLSLELLGIETLERM

SEQ ID NO: 187499 - protein, 174 aa, Unknown
  Bacterial polypetide isolated from the Sargasso Sea
KRLEDEDRYETEEFIANTSSIIGLGAVKYADLSQNRITNYQFSFDKMLSLNGNTAPYLLYTLVRILGIKRKNNFVYDSKDFQYINYEHKSEWKLIRKLLKFDEVIISIEKDLMPNRLCNYLFELCQTFNRFYDQVPILKEEKNIKISRLNLCDLTAKTLKLSLELLGIETLERM

SEQ ID NO: 187500 - protein, 279 aa, Unknown
  Bacterial polypetide isolated from the Sargasso Sea
LLCDQSRREFQKIYDRLDIRLSERGESFYNPFLPAVVDGLKDAELLVTDDGAQCVFLEGVQGKDGQPLPVIVRKSDGGFNYATTDLAAIRYRFGDGPEGDGARRVIYVTDAGQANHFAGVFQVAERAGWIPDGACLEHVPFGLVQGEDGKKLKTRSGDTVRLRDLLDEAVERAEADLRSRLKQEERSESEEFIQHVAGTVGLAAVKYADLSQNRITNYQFSFDRMLALQGNTAPYLLYAVVRIAGIARKGGDLDASTAQLAFTELQEWALVRELLKFDA

SEQ ID NO: 187501 - protein, 275 aa, Unknown
  Bacterial polypetide isolated from the Sargasso Sea
IKMNLYKKYLNEIKKNLSKNKSKINLKTQYSLDNIVLESPPEKFNFDFSCNAAMALSKSLNKNSRDLAEIIRDILKKGVVDFEKIEIAGPGFINITLNNKAWLKIINDILKNKAKYGSNKYNKKYNVEFVSANPTGPLHVGHCRGAIFGDVLSNLLKFNGNKVIKEFYINDYGNQINDFTRSVYFRLREIKLKENFPNENNLYPGAYVIDIAKNILKKNPKIKLNEYKKMYSSLKDKALKESMNLIKNDLRLLGIYHDYFFSESKLVNDNLVIKS

SEQ ID NO: 187502 - protein, 324 aa, Unknown
  Bacterial polypetide isolated from the Sargasso Sea
IKERGESFYNPFLKSVIEDLKFKKILIEDQGAKCVFLDGMTNKEGKPLPLIVQKKDGGFNYATTDLAAIRYRFNKPPNGDDASRIIYVTDHGQANHFAGVFQVAKKAKWIPDKCQVDHVPFGLVQGIDGKKLKTREGETIRLKDLLNEAVRRAKEDLLKRLKDEDRYETEEFIANTSRIIGLGAVKYADLSQNRITNYQFSFDKMLSLNGNTAPYLLYTLVRISGIKRKNDFVYEYKDLQYINYEHKSEWKLIRKLLNFDEVIIAIEKDLMPNRLCNYLFELCQTFNRFYDQVPILKEEKNIKISRLNLCDLTAKTLKLSLGLL

SEQ ID NO: 187503 - protein, 475 aa, Unknown
  Bacterial polypetide isolated from the Sargasso Sea
MILGNITKNNPKEIGLEIGNILKGLSLVSSIEVAGPGFINIFLNHSGTLKIIKDILDKNTIKKEEDSKKIQVEFVSANPTGPLHVGHGRGAIYGDVISKLLEKKGHEVQKEYYVNDAGRQIDILTASVYLRAINIEDNIFPESAYRGKYIKEIAKNTNLHEAVNIDDLFKNLPEDDEEKIDKIISHLKSASEKDWQSVKEVSLENVLSTIQKDLEDFGVTFDNWFLESSLLGADSKIDEAVQQLNTNNLIDNRDGNIWFKSSDFGDDKDRVLIREDGRQTYFASDVAYHKDKLDRGFDEIINIWGSDHHGYIKRVEASLEGLGYDKNKLSVKLVQFANLIKSGSPVKMSTRSGEFYSLEDLLSDVGSDVARFYYLSKQTDQHLDFDLDLAVSSKKENMYYYIQYAHARICSLEKKAGLKTFLVENISEDHVEICSNLIHEISKYPNVLEKTCNNLSPHLLIFYLKDLSSIFHNFY

SEQ ID NO: 187504 - protein, 543 aa, Unknown
  Bacterial polypetide isolated from the Sargasso Sea
MTLSDSLKKGHWTSNLCLIASNLAKKNPQDIASALIPLLESKSEIAKVELAGPGFINIFLTREAFLNQLDNAHNDPNYFLNSSNTSKEKIQIEFVSANPTGPLHVGHGRGAAYGDAIGRILERLGHEVSREYYVNDAGRQIDILACSIFLRKFECFKNEFPESAYKGSYILEIADAIELDIGITKSEKESLIDNLPNDNEERIDALIERIKINYPEAWSTIRDFGLSYVIESIREDLTKFKVIFNNWFFESSLGELTDKKSEISKALAKVQKDHAYEKNGAIWLESTKFGDDKDRVIIREDGRGTYLSADLAYHRNKLDRGFDTIINVWGADHHGYIKRIEATIEAMGYSKKQMQVQLVQFANLFENGSKVKMSTRSGNFYTLKQLIDDIGPDASRFYYLSKQADQHLDFDIGIARSNSKDNLYYYIQYAHARISSVEKKFLELSRPLPKKFNNVDFDDCDELLQMALSAQFVIKSSGESLQPHLIIYYLRDIAQNFHQFYNNVNILNADEKHKNNIMRTLMIVKSVIASSLHLLGIEPLENM

SEQ ID NO: 187505 - protein, 559 aa, Unknown
  Bacterial polypetide isolated from the Sargasso Sea
MGVENAPVPVSRSARPEFGEYQFNGAMALAKQLKQKPRDIAEKIVETVKLDDIASKLEVAGPGFINVHLNDEWLSNQCELSLTDPRLGIAKSKEQNIVVDYSSPNLAKEMHVGHLRTTIIGDAVVKVLEFLGHNVIRQNHMGDWGTQFGMLLAHLSDKLQDEVAETALSDLEDFYREAKVRFDEEEGFADRAREYVVKLQGGDAQCLALWEKFIDVSIAHSEEVYDKLNVSLTRKDIMGESAYNDDLANVISDLKAKGLAVEDQGAQVVFIPELADKEGNPAVYIVQKSGGGYLYATTDLAAMRYRSGKLNADRTLILTDARQALHFKQTEIVGRKAGFMKEEQTYEHCPFGMMLGSDGKPFKTRTGGTVKLVELLDEAVERAGKLIAERDNDLSEDELKEVAHKVGIGAVKYADLSKNRTTDYMFNWDSMLSFEGNTAPYLQYAYTRVKSLFRKAGVDMATMPVDINIAEKQEHALAVLLMQFEEVIGTVSREATPHVLCTYLYDVASAFMSFYEACPMLKDGIEPAVRDSRLALSALVAKTLEQGLTLLGIETLEKM

SEQ ID NO: 187506 - protein, 167 aa, Unknown
  Bacterial polypetide isolated from the Sargasso Sea
MLIIFKELTKQFEQSLLDSLEKNDKKGEFEILRKNLITQSSKEEFGDYQCNVCLSLSKIYKKNPRDISNDFINLLNKNISISKLCKSLEIAGPGFINIKLKDEVLINEIKSNIQCNRAGIPLIRKDLDSGLSNKVIVDFSSPNIAKEMHVGHLRSTIIGDSISRISS

SEQ ID NO: 187507 - protein, 581 aa, Unknown
  Bacterial polypetide isolated from the Sargasso Sea
MKSHIQSLLEQTIESFKQQGILPADFEARIQVDRTKDKSHGDLATNLAMMLTKAAGKNPRELAQLIIDNLPASAYVAKVEIAGPGFINFFIDDSALANQLQAAISDEHLGIKLPTPQTIVVDYSSPNLAKEMHVGHLRSTIIGDSVVRTLEFLGHKVIRQNHVGDWGTQFGMLLAYMEELRAQNGEQAQLELSDLETFYRAAKLRFDESAEFATRARQLVVELQSGDEYCNKLWREFNDISLSHCHEVYERLGVSLTRADVHGESAYNADLEQVVKDLDAQGLLTQSNGAKVVFQEEFRNKEGEALPVIIQKADGGYLYATTDLAAMRYRSSVLKADRVLYFVDLRQALHFQQVFSLAKLAKFVRNDMSLEHLGFGTMNGEDGRPFKTRTGGVVKLVDLLDEANTRALELVRSKNPDMDEATLAEIARVVGISAVKYADLSKNRTSDYIFSFEQMLSFEGNTAPYLLYAYTRVAGIFKRATDIDLSQAKIVLEHEKEKDLGNKLAQFGEILSRVVDKGQPHVLCGYLYELAGAFSSFYEACPVLAADNDEQKHSRLLLSQLTANTLQKGLNLLGIETLERM

SEQ ID NO: 187508 - protein, 572 aa, Unknown
  Bacterial polypetide isolated from the Sargasso Sea
MADHTNKEEINKIIEKYSISITESLKNGHITTNVCMVAASNLKLNPIDLASKLVEKLNLLNLFETVETAGPGFINITLHREDFVSIINSINDNKEKYGESNIGNGKKIQIEFVSANPTGPLHVGHGRGAAYGDAIGRILKATGYDVQKEYYINDAGRQIDILTASVILKSISKEIGDYFPENAYKGEYINEISKNFEEKAKVTYQNLDSVLNVQKSFLDSKVDDEKEIDAVILSLKNLNIDFWDSVKELSVNEIVNSIENDLKKFNVSFNNWFRESSLGNINENSSIISSSINKLKKDGHAYEKDDAIWLNTESSGDDKHRVLVRDDGRPTYFASDVAYHKDKIDRGFDKLINVWGADHHGYIKRIEASIEALGSKKEKMIVKLVQFANLYKNGKKVKMSTRSGDFFTLENLIDEIGSDASRFYYLSKQADQHLDFDLDLAQSDNKENIFYYIQYAHARICSLLDKYNKNAGIRNLNLSSIEKNSYNKCDELIHEISKYPDVVTKASNTLQPHLIIFYLRDLSQLFHSYYNDNHVLSESNDNIEAIISCLSSVGIVISNGLNLLGIMPIKKM

SEQ ID NO: 187509 - protein, 598 aa, Unknown
  Bacterial polypetide isolated from the Sargasso Sea
MLPAHKQTLEALLADSVKQVAHALKGADAANADVTFVAPAITLERPKVAAHGDVACNVAMQLAKPLGTNPRQLAEQIVAALTAQPGAQGLVEAAEIAGPGFINLRLSAAAKQAVIAAVFDQGRAFGTSDREKGKQVLLEFVSANPTGPLHVGHGRQAALGDVLANVIASQGYAVHREFYYNDAGVQIGNLAISTQARARGLKPGDAGWPEAAYNGEYIADIARDFLNGETVAASDGEPVKGTGDVEDLDAIRKFAVTYLRREQDMDLQAFGVKFDQYYLESSLYSEGRVEKTVDALIKAGMTYEQDGALWLRTTDEGDDKDRVMRKSDGTYTYFVPDVAYHVTKWERGFTKVINIQGSDHHGTIARVRAGLQGLHIGIPKGYPDYVLHKMVTVMRDGQEVKISKRAGSYVTVRDLIEWSGGAAAGQEAAPDLIDEATITRGRDAVRFFLISRKADTEFVFDIDLALKQNDENPVYYVQYAHARICSVLNELKARYNVDVAQLPGADLSQLTSAQAASLMQKLAEYPDMLTHAANELAPHAVAFYLRDLAGEFHSFYNAERVLVDDEAPRNARAALLAATRQVLENGLAVLGVSAPAKM

SEQ ID NO: 187510 - protein, 414 aa, Unknown
  Bacterial polypetide isolated from the Sargasso Sea
MIADEIKNKILAHIEERFSEEEVSIASSKFQIEIPDSPEKGNLTCNVALILGNITKNNPKEIGLEIGNILKELNLVSSIEVAGPGFINIFLNHSGTLKIIKDILDKNTIKEEEDSKKIQVEFVSANPTGPLHVGHGRGAIYGDVISKLLEKKGHKVQKEYYVNDAGRQIDILTASVYLRAINIEDNIFPESAYRGEYIKEIAKNANLQEVVNIDDLFKNLPKDEEEKIDEIISHLKSACEKDWQSIKKISLENVLSTIEKDLEDFGVTFDNWFLESSLLGADSKIDAAVQQLNTNNLIDNRDGNIWFKSSDFGDDKDRVLIRTDGRQTYFASDVAYHKDKLDRGFDEIINIWGSDHHGYIKRVEASLEGLGYDKNKLSVKLVQFANLIKGGSPVKMSTRSGEFYSLEDLLSDVG

SEQ ID NO: 187511 - protein, 565 aa, Unknown
  Bacterial polypetide isolated from the Sargasso Sea
MIADEIKNKILSHIEKHFSEEEVSIASSKFQIEIPDNPEKGDLTCNIALILGNITKNNPKEIGLEIGNILKELSLVSSVEVAGPGFINIFLNHSGTLKIIKDILDKKTIKEVENPKKIQVEFVSANPTGPLHVGHGRGAIYGDVISKLLEKKGHEVQKEYYVNDAGRQIDILTASVYLRAIDIEDNIFPESAYKGKYIEEIAKNANLQKTVNIDDLFKSLPEDDEEKIDKIISHLKSASEKDWQSIKKVSLENVLSTIEKDLEDFGVTFDNWFLESSLLGADSKIDAAVQQLNTNNLIDNRDGNIWFKSSDFGDDKDRVLIRADGRQTYFASDVAYHKDKLDRGFDEIINIWGSDHHGYIKRIEASLEGLGYDKNKLSVKLVQFANLIKGGSPVKMSTRSGEFYSLEDLLSDVGSDVARFYYLSRQTDQHLDFDLDLAVSSKKENMYYYIQYAHARICSLEKKAGLKDFLAEDISEDHVNICSNLIHEISKYPNVLEKTCNNLSPHLLIFYLKDLVSTFHNFYNDNKILDRSESEKLTILIVTHAVKEVIADSLNLLGVKALEEM

SEQ ID NO: 187512 - protein, 532 aa, Unknown
  Bacterial polypetide isolated from the Sargasso Sea
MSAISFEFPRDITHGDFSTNAALILSKKLKINPNEVYTNIEKFFEAGQDFKSIELTKSGFINFFIKDNILHDFIHEVLNDKNNFGKKNIGRGEKINIEYVSANPTGPLHVGHTRGAVFGDTLANILEFVGFDVCREYYINDSGEQIKNLAHSVYLRYLQIFSDKKIEIPSDLYPGEYLIPIAQKISEDHGQKFINEEESQWIDYFKEESVSNVMDIIKRDLSSLEIKHDIFISEKLLLEDGQVEKTYKALEKQQLLYEGSTKPPKGAKKDEWIEKKHILFKSKNFGDDEDRVVKKHDGQWTYFMPDIAYHLNKFERGFIKMINIFGADHSGYIARMKAAVKAVTNGEANLDIKTCQLVSLSRAGKPVKMSKRSGSFVTLKEIVDEVGKDAVRFMMVSRKNDAQLDFDFEIFKNENNDNPIFYIQYANARISSLLRNSKEKLGINIKDEDLKNADFTLLENENEKRIIFQIANFPKVIEQSAIFMEPHRLSYYLRDLASSFHQYWNLKIDSKRIHILDKSQIELSIARLALLI

SEQ ID NO: 187513 - protein, 596 aa, Unknown
  Bacterial polypetide isolated from the Sargasso Sea
MLPAHKRTLETLLADTVKQVAEATQGATEAAFVSPTITLERPKVAAHGDVACNVAMQLAKPLRANPRQLAQQIVDALLAQPQAKGLVDAAEVAGPGFINLRLAAAAKQAVIAAVFAEKEAFGRSQRDAGKHVLIEFVSANPTGPLHVGHGRQAALGDALSNVLASQGYDVHREFYYNDAGVQIHTLAVSTQARARGLAPGDEGWPASAYNGEYIAEIAKDYLNGVTVAASDGEPVTGAGDIENLDAIRRFAVAYLRREQDMDLQAFGVKFDQYYLESSLYKEGRVEKTVDALIAAGKTYEQEGALWLRTTDDGDDKDRVMRKTDGTYTYFVPDVAYHVAKWERGFTKVINIQGSDHHGTIARVRAGLQGLGIGIPKGYPDYILHKMVTVMRNGEEVKISKRAGSYVTVRDLIEWSGGATPGSEAAIDLIDEETIRRGRDAVRFFLISRKADTEFVFDIDLALKQNDENPVHYVQYAHARICSVIAECKARYNTDESTLAQLDVSPLTSERAMALLNKLAEFPDMLEHAADELAPHAVAFYLRDLAGEFHSFYNDKAERVLVDDAAERNARVALLAATRQVLANGLATIGVSAPVKM

SEQ ID NO: 187514 - protein, 579 aa, Unknown
  Bacterial polypetide isolated from the Sargasso Sea
MRNINGYLKNIIGAEFSKIFNVSNETVEKSSFVVEYPKNKSDGELSTNICMVLAKEISANPVEAAKTLIKSLEKIEDFEMLEVAGPGFLNFNISKDTWFKFLSQLLETNLLFNEEIGLNKNINVEYVSANPTGPLHIGHCRGAVFGDVLSNLLKVTGHNVTKEYYINDAGTQIDTLANSTIIRIKEIINSKSEENYPDEFYPGEYLIDVAKKIIDKHGTSILKNDNHFSTIKGECVNLLLENIKEDLSKLSINQDIFVSEKELITQGKIDKTIDELKNMNLIYEGILDKPKGKQIEDWEPRKQLLFKSSEYGDEIDRPLQKSDGEWTYFANDIAYHYDKYLRGSTHLIDILGADHGGYIKRMSASIQALTNNKARFTAKLCQMVKLISDGKELKMSKRSGDFITLSDLVKEVGSDSIRFMMMYRKNEAPLEFDFKKVTEQSKENPVFYVQYAHARISSVLNNLHSQNIKLNLENFSECNFSELNDLSEISLLKKILDYSNIINTSVSLFEPHRIAYYLYELASEFHSLWSQGKVDNSKKFIDADNIPRTYARMALLIATQRTIKSGLDILGVSSPDEMK

SEQ ID NO: 187515 - protein, 581 aa, Unknown
  Bacterial polypetide isolated from the Sargasso Sea
MKEHIHHLLEQTVANLKSAGVLPADLEARVQVDRCKEKAHGDLATNLAMLLAKPARKNPRELAAAIIEHLPASDLIAKVEIAGPGFINFFFDQRWLAGQVEAMVTSANANVKLPTPQTVVVDYSAPNVAKEMAVHHIRSTVLGDVAARALEFLGHKVIRANHIGDWGTQFGMLIAYLEKMSNEHASDMALKDLEAFYTQAKRCYDEDEAFAERARNYVVKLQGGDEYCRTMWKKLVDMTMEQNQINYDRLNVSLTNKDIMGESMYNDMLPEIVADLKAKGLAVESEGATVVFLDEFKNKDGEAMGVIIQKSDGGFLYTTTDIACAKYRYETLGADRVMYFIDSRQHQHLMQAWTITRKAGYVPESVPLEHHAFGMMLGKDGRPYKTRSGGTVKLVDLLNEAEERAAALLESRNSDLSAEEKANVVNAIAMGAVKYADLSKNRTTDYIFDWDMMLSFEGNTAPYLQYAYTRIQSIFRKANIDAEALTGNVTLNEEAEEVLAQKLIQFSDAVNGVADKGMPHLLCTYLYELSGNFMTFYEACPINKDGVDEATRQSRLLLCAATAKVLKLGLGVLGIHTLERM

SEQ ID NO: 187516 - protein, 565 aa, Unknown
  Bacterial polypetide isolated from the Sargasso Sea
MIADEIKNKILSHIEKHFSEEEVSIASAKFQIEIPDSPEKGDLTCNIALILGNITKNNPKEIGLEIGNILKELNLVSSIEVAGPGFINIFLNHSGTLKIIKDIFDKNTIREEEDSKKIQVEFVSANPTGPLHVGHGRGAIYGDVISKLLEKKGHEVQKEYYVNDAGRQIDILTASVYLRAINVEDNIFPESAYRGKYIKEIAKNANLQEAVNIDDLFKSLPEDEEEKIDEIISRLKSASEKEWQSIKKVSLENVLSTIEKDLEDFGVTFDNWFLESSLLGGDSKIDQAVQQLNTNNLTDNRDGNIWFKSSDFGDDKDRVLIRADGRQTYFASDVAYHKDKLDRGFDEIINIWGSDHHGYIKRVEASLEGLGYDKNKLSVKLVQFANLIKSGSPVKMSTRSGEFYSLEDLLSDVGSDVARFYYLSKQTDQHLDFDLDLAVSSKKENMYYYIQYAHARICSLEKKAGLKTFLAENISEDHVDICSNLIHEISKYPNVLEKTCNNLSPHLLIFYLKDLASIFHNFYNDNKILDKSESEKLTILAVTHAVKEVIADSLNLLGVKALEEM

SEQ ID NO: 187517 - protein, 515 aa, Unknown
  Bacterial polypetide isolated from the Sargasso Sea
MIADEIKNKILSHIEEHFSEEEVSIASSKFQIEIPDSPEKGDLTCNIALILGNITKSNPKEIGLEIGNILKELNLVSSIEVAGPGFINIFLNHSGTLKIIKDILNKNTIREEADSKKIQVEFVSANPTGPLHVGHGRGAIYGDVISKLLEKKGHEVQKEYYVNDAGRQIDILTASVYLRAIEIEDNIFPESAYRGEYIKEIAKNANLQDAVNIDDLFKSLPEDDEEKIDKIISHLKSASEKDWKSIKKVSLESVLSTIEKDLKDFGVTFDNWFLESSLLGADSKIDAAVQQLNTNNLIDNRDGNIWFKSSDFGDDKDRVLIRADGRQTYFASDVAYHKDKLDRGFDEIINIWGSDHHGYIKRVEASLEGLGYDKNKLSVKLVQFANLIKGGSPVKMSTRSGEFYSLEDLLSDVGSDVARFYYLSKQTDQHLDFDLDLAVSSKKENMYYYIQYAHARICSLEKKAGLKDFLAEDISEDHVDICSNLIHEISKYPNVLEKACNNLSPHLLIFYLKDL

SEQ ID NO: 187518 - protein, 580 aa, Unknown
  Bacterial polypetide isolated from the Sargasso Sea
MIETINKRIDLFISSIDGISNNSVQIILNKFSTSISEDLDKGHLTTNVCMIAASVLKLNPKELAKELKDNLDDLDIFKDVQIAGPGFVNITLHKKEFVSVLNKIIKENKSFGESNIGAGRKVQIEFVSANPTGPLHVGHGRGAAYGDAIGRILKATGSIVEKEYYINDAGRQIDILTASVILRVIQNKINNFFPQKAYKGDYIDSIGREFVSKNKIEYGDIDFIDKDLSSDPEEEMDQIILKLKELDESIWSSVKTFSLNSIIESIKNDLEDFNVCFDNWFYESSLGDLKNESSEISKSITKLTKEGKTYKKDGAIWLDTESAGDDKHRVLVREDGRATYFASDVAYHKNKIDRGYDDLINVWGADHHGYIKRIEASIDAIGSKKEKLIVKLVQFANLFKNGKSVKMSTRSGEFFTLRELLEDIGSDAARFYYLSKQADQHLDFDLDLAKSDSKENIFYYIQYAHARIFSLEQKYKEMYPKLDTNIEAIEKDLYKKCDSLIHEISKYPHIINKSARTLQPHIIIFYLRDLSQLLHSYYNDNHVLSESKENMQSIILCLSALRQVISNGLGILGISPMQKM

SEQ ID NO: 187519 - protein, 604 aa, Unknown
  Bacterial polypetide isolated from the Sargasso Sea
MLIIFKELTKQFEQSLLDSLEKNDKKGEFEILRKNLITQSSKEEFGDYQCNVCLSLSKIYKKNPRDISNDFINLLNKNISISKLCKSLEIAGPGFINIKLKDEVLINEIKSNIQCNRAGIPLIRKDLDSGLSNKVIVDFSSPNIAKEMHVGHLRSTIIGDSISRIFELRGYEVLRLNHVGDWGTQFGMLITQLKDLYSNDLEEIGKIKISDLVEFYKESKKRFDNESEFQKRSREEVVKLQSGDIKSIKAWKLLCDQSRKEFDEIYKNLKIKIEERGESFYNPFLKSVIDDLNLEKILVEDQGAKCVFLDGMTNKEGKPLPLIIQKKDGGFNYATTDLAAIRYRFNKPPNGDDASRIIYVTDHGQANHFAGVFQVAKKAKWIPENCQVDHVPFGLVQGIDGKKLKTREGETIRLKDLLNEAVRRAKEDLLKRLEDEDRYETEEFIANTSRIIGLGAVKYADLSQNRITNYQFSFDKMLSLNGNTAPYLLYTLVRILGIKRKNDFVYDSKDFQYVNYEHKSEWKLIRKLLRFDEVIISIEKDLMPNRLCNYLFELCQTFNRFYDQVPILKEEKNIKISRLNLCDLTAKTLKLSLELLGIETLERM

SEQ ID NO: 187520 - protein, 446 aa, Unknown
  Bacterial polypetide isolated from the Sargasso Sea
SANPTGPLHVGHCRGAIFGDVLSNLLIFNGNKVTKEYYINDYGNQIKNFVESVYLRIREIKFNEKFPSKENLYPGDYIKEIALNILENHKEVKFDNFKDCFEELKKRSLEGSMSLIKKDLKHLGISHDIFFSETELLKKDLINKTVKILQSKNYVKEGYLDPPKGEPSKNWKKVKRLIFKSTEFGDDLDRALQKNDGSWTYFANDVAYHSHKINRKFDNLINILGADHTGYIKRISAAVSALSDKKIKFNCKVCQLVKLYKNGKPFKMSKRAGDFITVEDLLNEVNKDAIRFMMLNRSNDAELDFDFEKVKEKTKDNPVYYVQYAYARINSITRTLKKKLSDKILIENKSFNPNEYEKKILRKIFEWPKIIESASYKLEPHKIPFYLYELSTLFHSYWSKGNEDKNYRFLENDKVKRLETLAFIYLTAIVIKNGMNILGVSLPEKM

SEQ ID NO: 187521 - protein, 565 aa, Unknown
  Bacterial polypetide isolated from the Sargasso Sea
MIVDEIKSKILSYIEEHFSEGEISIASSKFQIEIPDSPEKGDLTCNIALILGNITKNNPKEIALEIGNILKGLNLVNSIEVAGPGFINIFLNHSGTLKIIKDILDKNTIREEEDSKKIQIEFVSANPTGPLHVGHGRGAIYGDVISKLLERKGHEVQKEYYVNDAGRQIDILTASVYLRAIDIKDNIFPESAYRGKYIKEIAKSANLQKAVNIDDLFKSLPEDDEEKIDKIITYLKSASEKDWQSIKKASLENVLSTIEKDLEDFGVTFDNWFLESSLLGSDSKIDAAVQQLDTNNLIDNRDGNIWFKSSDFGDDKDRVLIRADGRQTYFASDVAYHKDKLDRGFDEIINIWGSDHHGYIKRVEASLEGLGYDKNKLSVKLVQFANLIKSGSPVKMSTRSGEFYSLEDLLSDVGSDVARFYYLSKQTDQHLDFDLDLAVSSKKENMYYYIQYAHARICSLEKKAGLKDFLAENISEDHVGICSNLIHEISKYPNVLEKTCNKLSPHLLIFYLKDLASAFHNFYNDNKILDKSESEKLTILAVTHTVKEVIADSLDLLGVKALEEM

SEQ ID NO: 187522 - protein, 574 aa, Unknown
  Bacterial polypetide isolated from the Sargasso Sea
MSLVDRTNKEKINTIIEKYSISITETLDNGHITTNVCMVAASILKLKPIELASKLVERLSLLGLFEIVEAAGPGFINITLHRKDFVSIINSINGNKERYGESNIGNGKKIQIEFVSANPTGPLHVGHGRGAAYGDAVGRILKATGFNVQKEYYINDAGRQIDILTASVILKIISKEIDEYFPQNAYKGEYINEIGENFIKKTKVSYQNLESVLGVQKLFLDSKNDDEKEIDAVILSLKNLNIDLWDSVKKFSVKEIVDSIENDLKKFNVSFNNWFRESSLGNINDNSSTIASSINKLKKDGHAYEKDNAIWLNTEASGDDKHRVLVRDDGRPTYFASDVAYHKDKIDRGFDKLINVWGADHHGYIKRIEASIEALGSKKEKMIVKLVQFANLYKNGKKVKMSTRSGDFFTLENLIDEIGSDASRFYYLSKQADQHLDFDLDLAQSDSKENIFYYIQYAHARICSLIYKYDNNANIKNLNLSSIEKNSYNQCDELIHEISKYPDVVTKASNTLQPHLIIFYLRDLSQLFHSYYNDNHVLSESNENIEAIISCLSSVGVVISNGLNLLGITPIKKM

SEQ ID NO: 187523 - protein, 578 aa, Unknown
  Bacterial polypetide isolated from the Sargasso Sea
MIDIINKEIKEFLLSVDNDKKNIQAILEKSTTSITDDLNKGHLTTNVCMVAASTLKSKPNELANNLKEKLIKLDFFQDVQSAGPGFINIFLKRNDFVSTINVINKMRDSFGKSKVGDGKKVQIEFVSANPTGPLHVGHGRGAAFGDAIGRILEATGSLVEKEYYINDAGRQIDILTTSVLLRMIKEDINNYFPQNAYKGKYIEDIANKLKKDINLNCDYESLTKDMPTDPEKEIDQIIENIKDQDESSWNQAKEFSLAEMVKSIKNDLKTFNVDFDHWFNESSLGDVSDSSSEISTSINKLKSDGNAYEKDGAIWLNTDISGDDKHRVLIREDGRSTYFASDVAYHKNKIDRGFDKLINIWGADHHGYIKRIEASIETLGSSKEKLIVKLVQFANLFKEGKKVKMSTRSGEFFTLKDLIDDIGTDAARFYYLSKQADQHLDFDIDLAKSDSKENIFYYIQYAHARIVSLEEKALKKNSKIKTNINNIENNSYKECDKLIHEISKYPGVVNKAANALQPHLVIYYLRDLAQLFHSYYNDNHVLSETDQNIESILACLLSVKQVISNGLDLLGISPIEKM

SEQ ID NO: 187524 - protein, 573 aa, Unknown
  Bacterial polypetide isolated from the Sargasso Sea
MHAGIKKLPKINKAYDPSFFSETVERTRDSSHGDFTSNIALRLAKSLKKNPRELANEIIKYIPKNNSIKKIQVAGPGFMNFYLDDSAYHIEIEKILSNKNLIEKNKDFKKHKLLLEFVSANPTGPLHVGHGRHAAFGASLRNILEAVGYDVKSEYYVNDSGRQMDILCISVIIHLLRRENQKISMPLAGYQGQYIKTISLAIDQKFNEDEIKLKELIPKIDDRNDQDQYIDCLIENTKRLIGTKKFNQIKKQSLDLIKKDIKDDLSEFGVLFDSWFSEESLHRNGEIDKALQSLKKKNYLYEQDGATWFRATDLGDEKDRVVIRKNQNKTYFTSDIVYHHNKKERGFDTLIDILGSDHHGYIARVKAGLEAMGHNSDDLDVQLVQFVSLYENGVKQAMSTRSGEFITLRQLREEVGNDAARFFYIMRSNEQHLDFDLALAKSKTSENPVYYIQYAHARIASVINQLNEKSLKYDQKNGISNLKLLTTEKERQLMVSISRFSEILFLSAKNKAPHSLAQYLRDLANDFHSYYNESIILIDDHALRDARVSLSISTKKVISMGLSLLGVSSPSTM

SEQ ID NO: 187525 - protein, 566 aa, Unknown
  Bacterial polypetide isolated from the Sargasso Sea
MYGSSEFIHDEFEISIQDNKEKEYGDLASNVALVLAKPLKRNPREIAEEIKVKFITDKEIVKVDVAGPGFINFFLSKESHGAILKDISIQKNNFGKFESKNQKVLIEYVSSNPTGPLHVGHGRGAVFGSVLSRLLKEAGFQVDEEYYVNDFGRQMNILSASLWIRYAQIFDKNIKMLNNGYQGEYLIAIAQNLKKFRSDELYEDDEEIKSLLENENEEAEKHTDEVIESIKSKLSNEFSYVRDFALREILELIKEDLLEFGVDHNRWFSESTLYKSEPHDLSKVDQSIEELSSKGFVYEKEGAIWFKSSALGDDKDRVLKRSNGEFTYFASDVAYHLDKYDRGYDRIINIWGSDHHGYLPRVKAAMEASKKNVEKLEVVFIQFANLIKAGKKVTMSTRSGEFITLKELIEEVTSEAARFFYINRKADQHLDFDLDLAKEQSKDNPLYYIQYAHARICSVLLKSKAREEELNASELGLLDSNKEIEIQKILKQYPPLIERAALASEPHLICYYLKDLASIFHSYYNTEKFIIEDQKLMNSRLFLLSGVKQVIHNGLAVLGINAPHEM

SEQ ID NO: 187526 - protein, 468 aa, Unknown
  Bacterial polypetide isolated from the Sargasso Sea
MSLVDRKNKEKINTIIEKYSISITETLDNGHITTNVCMVAASILKLKPIELASKLVERLSLLGLFEIVEAAGPGFINITLHRKDFVSIINSINSNKERYGESNIGNGKKIQIEFVSANPTGPLHVGHGRGAAYGDAIGRILKATGFNVQKEYYINDAGRQIDILTASVILKIISKEVNEYFPQNAYKGEYINEIGKNFIKKTKVSYQNLESVLGVQKLFLDLKNDDEKEIDAVILSLKNLNIDLWDSVKKFSVKEIVDSIENDLKKFNVSFNNWFRESSLGNINDNSSTIASSINKLKKDGHAYEKDNAIWLNTEASGDDKHRVLVRDDGRPTYFASDVAYHKDKIDRGFDKLINVWGADHHGYIKRIEASIEALGSKKEKMIVKLVQFANLYKNGKKVKMSTRSGDFFTLENLIDEIGSDASRFYYLSKQADQHLDFDLDLAQSDSKENIFYYIQYAHARICSLIYK

SEQ ID NO: 187527 - protein, 555 aa, Unknown
  Bacterial polypetide isolated from the Sargasso Sea
MNKIRNRYASSITEDLKNGHYTSNICMVLASNLKLNPKELSTTLVEKLNNLNIFEKVESAGPGFINITLKREDFLSTIKNINSVGEKYGRSLIGEGKKVQIEFVSANPTGPLHVGHGRGAAYGDAIARILTATGSEVEKEYYINDAGRQIDILTVSVIMKMAKFEGSFFPSNAYKGQYIEDIGSYIEENEKVKFNIDESIFKGLPTDPEKEIDSLIETIKQKYPSEWNLIKSCSLKNILEGINQDLKNFNVDFDVWFKESSLGDLSDDKSQLTKSINKLQEGGKTYEKDGAIWLNTEVSGDDKHRVLIRDNGKATYFATDVAYHKNKVDRGFDKLINIWGADHHGYIKRIEASIEALGSNKDKLDVRLVQFANLFKDGAKVKMSTRSGDFYSLGDLIKEIGSDAARFFYLSKQSDQHLDFDIDLAKSDNKENIFYYIQYAYARIFSLEEKYYESNKTKDANKFDLDNSYTKCDKLIHEISKYPQVVEKSAKTLQPHLIIFYLKDLAQLFHSYYNDNHVLTEDPKNQQLIISSLSAVKQVIANGLNLIGISPMQKM

SEQ ID NO: 187528 - protein, 394 aa, Unknown
  Bacterial polypetide isolated from the Sargasso Sea
GRDFGSSCAPEKMRVLLEFVSANPTGPLHVGHGRHAAFGDSLARLLKKAGHEVFTEYYLNDAGRQIDILCLSVILEMLRAEGLELMNINGLYKGMYIKEISQALIKEGFEINKKVLIPKLDGSADEIVDALILEIKNVTGSELFQKISDKTVSRMTKLLKDDLSDFRVKQDGFYSEKSLFSKGKIEEACEIIKKNGNAFEKDGALWLESSKYGDDKDRVVIREDGRSTYFASDIAYHHDKKMRGFDLLINVLGSDHHGYISRLEAGLASTGNKASDLDVILMQFVTLYRGKKKIQMSTRSGNFVPMRDLYSEVGVDAARFFYVSRSHDQHLDFDLDLATEQNNNNPVYYIQYANARIKSVLNENEKRGYVFDEGIGKANLVKLDLTIEEEIISL

SEQ ID NO: 187529 - protein, 604 aa, Unknown
  Bacterial polypetide isolated from the Sargasso Sea
MLIIFKELTKQFEQSLLDSLEKNDKKGEFEILRKNLITQSSKEEFGDYQCNVCLSLSKIYKKNPRDISNDFINLLNKNKSIAKLCKSLEIAGPGFINIKLKDEVLINEIKSNIQCQRGGVPQIKKDLDSGLSNKVIVDFSSPNIAKEMHVGHLRSTIIGDSISRIFELRGYQVLRLNHVGDWGTQFGMLITQLKDLYSNDLEEIGKIKISDLVEFYKESKKRFDNESEFQKRSREEVVKLQSGDIKSIKAWKLLCDQSRKEFDEIYKNLKIKIEERGESFYNPFLKSVIEDLNLKKILVEDQGAKCVFLDGMTNKEGKPLPLIIQKKDGGFNYATTDLAAIRYRFNKPPNGDDASRIIYVTDHGQANHFAGVFQVAKKAKWIPDNCQVDHVPFGLVQGIDGKKLKTREGETIRLKDLLKEAVRRAKEDLLKRLEDENRYETEDFIANTSRIIGLGAVKYADLSQNRITNYQFSFDKMLSLNGNTAPYLLYTLVRIAGIKRKNDFVYDSKDFQYTNYEHKSEWKLIRKLLKFDEVIISIEKDLMPNRLCNYLFELCQTFNRFYDQVPILKEEKYIKISRLNLCDLTAKTLKLSLELLGIETLERM

SEQ ID NO: 187530 - protein, 568 aa, Unknown
  Bacterial polypetide isolated from the Sargasso Sea
MIKESGIDDLDYQIKLQENKGKEHGDYASNIAMILAKSLGRNPKDLAENISKNFKLDDQILKIEVAGPGFINFFVSELTHSEILRTIDSEKDKYGHNKSKLGKVLIEYVSSNPTGPLHVGHGRGAVFGSVLAKLLTAAGHEVDEEYYVNDYGRQMSILTVSVWLRYMQNSKQDITMTALGYQGDYIKLIADELTKESKEKYMLSGRNYQEVLSLLKVQEDEKDIDSLIMFMQKALAGGFAEIRSFALDNMLNIIKRDLMRFGVNHNLWFFESSLYSEKQEEDSKAKKAISELNEKNYVYEKDGALWFKSSEFKDDKDRVLQRSNNDHTYFSSDIAYHLDKYIRSYDRIINIWGSDHHGYLPRVKAAMKALGLDTNKLEVVFIQFANLVRSGEKISMSTRSGEFITLRELLDEVTPEAARFFYINRKADQHLEFDLELAKEQSKDNPLYYIQYAHARICSVFNKAEYKHEENTKNLDLSLLVAAKEVEILKQLAIFPSLILKSAESNDTHLICYYLKDLASLFHSYYNNEKFIIEDKELMLSRLFLLKGVKQVIFNGLEILGVSSPEKM

SEQ ID NO: 187531 - protein, 388 aa, Unknown
  Bacterial polypetide isolated from the Sargasso Sea
MTDVSIAETSKPLFGDYQYSGCMQLFAKLTDTHEFKSSRDLAVVISNMLERGDMFDKIEVAGPGFINFHISDTFISEQALKLAQNIDSSSKQTFGRHVIVDFSSPNIAKEMHVGHLRSTIIGDSLCRALEYRGFNVSRLNHVGDWGTQFGMLIAYMRENVSSFTENISDLQMFYKKAKVKFDTDDDFKRRAQIVVTQLQAYDEETYNMWKQICQASRKEFEEVYEELDIQIEERGESFYNKLIPEVLQHLVDKEIAVTDEGALCIFSHDSEVPLICRKSDGGFNYASTDLAALYYRTQIEQADWIIYVTDVSQSQHFNAVFDAGRRAGWLDGRKVTVVDHVGFGLVTGEDGKRLRTRSGETVKLKDLLAEAKKQCFDQFQARGADSRK

SEQ ID NO: 187532 - protein, 568 aa, Unknown
  Bacterial polypetide isolated from the Sargasso Sea
MDIPDSTWLPLLGKATVEDHGDVALPCHSLAGILKKAPQEIAKQISELVASDLQSFAIVSSMSGFVNITAKPEWLSKRLSILLADPRLGVSVDEKKTFAVDYSAPNVAKEMHVGHLRSTVIGDTIVRMLEFKGHTVIRENHVGDWGTPFGMLIEHLLDLGEDRAANELGVGDLDSFYKQARSKFVSDEEFANRSRSRVVLLQGGDAETLRLWRILVDESMRYFNEVYSMLGVMLTDDDIRGESSYQELLPEVVERLRESGDLEESDGADVVFPGGWVNRDGEPLPMIIRKADGGYNYSTSDLACIIDRVERLGCDGFLYVVGTPQKQHFEMVFQVAKKAGFMSHNHQAVHVNFGSVLDTDGKVLKSREGEVIKLHDLLEEAIRRAEQSIDDKNPDLLGKEREEVARAVGIGAVKYADLSTERTKDYVFDWEKMLSFEGNTAPYLQYAYARISSIFRKWGGDRESLTTNFESLMESELSTLRGEEILLSRRLVEFPSILDDSVSTFSPHKLCKHLHSIASSFASFYENCAILKEDNEIISQRRLALCEVTSRELKLGLEMMGINVPERM

SEQ ID NO: 187533 - protein, 577 aa, Unknown
  Bacterial polypetide isolated from the Sargasso Sea
MIGEINKEIEKFLSSIVNNKKNINSITKKCSTSISDDLKKGHITSNVCMVAASILKQNPKNLAEDLKTKLEKIDKFDNVEVAGPGFINISLNRKDFVSTIEFINKNKDSFGSSAIGKKNKVQIEFVSANPTGPLHVGHGRGAAYGDAIGRILESTGSIVEKEYYVNDAGRQIDILTASVILRLIKNDISNYFPANGYKGEYIDEIGKKLDKKVKIQDFKSLSIKSSEDPEEEIDNIIHELEKLNNNSWNLIKKFSLKEIVKSIEDDLKAFNVNFDKWFYESSLGKIGDDSSDIALSVNKLIKDGHAYEKDKAIWLNTDISGDDKHRVLVRDNGKATYFASDVAYHKNKIDRGFDKLINVWGADHHGYIKRIEASIENLGSNKNKLAVKLVQFANLFKDGKKVKMSTRSGEFFTLKNLIEDIGSDAARFYYLSKQADQHLDFDLDLAKSDSKENIFYYIQYAHARIVSLEEKALDKFSEIKRNIKNISSGDYKECDNLIHEISKFPDIVNKSANTLQPHVIIYYLKDLSQLFHSFYNDNHVLSESEENMQSILECLIAVKQVISNGLNLLGITPMQKM

SEQ ID NO: 187534 - protein, 500 aa, Unknown
  Bacterial polypetide isolated from the Sargasso Sea
EVIEAVKLEDIALEVSFAKPGFINIKLAPDFLKHLAPDKITQDDQALNIVVDYSAPNLAKEMHVGHLRSTIIGDSMANILESKGHNVIRQNHVGDWGTQFGMLLTYMHEQGHASHLLADLEGFYRSAKKQFDSDEDFSNRSREAVVNLQSGKAFESEHWKTFIETSMSHCEEIYEKLRVGLNSSHVRGESSYNAALPEVINIFKESNLLEESEGAQCIFFEGQKSPLIVQKADGGFLYATTDLAAIRYRVNELEANRIIYFVDSRQSLHFRQIFAAIELADLNPKAASLEHMAFGTMLNEEGKPFKTREGGLIKLKPLIEEAISRATRTVMEKNPEISEHKAQEIGEIIGVAAIKYADLSKNRTNDYIFDWDQMLSLEGNTAPYLLYAYTRIQSLITRSGRSERDLVEMVAPEDESERLLCVELIKLDDVVDQVAKDGYPHLLCNHLYSVATTFNQFYEQSAILNQPEETMLRRLSLTHATGRTLQKGLSLLGIDVVDKM

SEQ ID NO: 187535 - protein, 455 aa, Unknown
  Bacterial polypetide isolated from the Sargasso Sea
MGDISTNIALLSSKALNRNPRELAENIGILLKKNNYIDEVKIAGPGFINLFLNKSIFYECCKSVLDLKNHYGKSDYGKSAMVNIEYVSANPTGPMHIGHARGAVFGDSLANLLEYSGYNVTREYYINDAGQQIINLARSVYIRYIEILKDKEPIFGDDLYPGEYLIPVAKSIIDKFGDKFISLKELDWIEVFKEYSINAMMHLIRNDLSLINIHHDNFVSEKSLKSNGLIDNVVELLSKKNSIYEGVLEAPKGQKNDDWESRPQLLFKSTLYGDDLDRPLKKADNTWTYFAADAAYHYDKYKRNYTSIINVWGADHGGYIKRIEGIIKTVSDSKINFDVKLCQLVNLSKGGKPVKMSKRAGNFVTMKNVIDTVGPDVLRFIMLTRKNDAPLDFDLVKVKEQSKDNPVYYVQYANIRINSLYEKAKTHGINLSDDLNNINFKLLKNISEINLIKLI

SEQ ID NO: 187536 - protein, 469 aa, Unknown
  Bacterial polypetide isolated from the Sargasso Sea
DLGLEDQSTNQIIKNSKLSFSDNLDKGHLTTNIAMVGAGVAKKNPKEIAEFIKKSLLEDQSINKIEIAGPGFINIFLEQRIFLDLLCECVQFSNQVPKKEKQKIQVEFVSANPTGPLHVGHGRGAAYGDAIIRLLNFKGHDATGEYYVNDAGRQIDILTCSIILRGKNLFNDDDFPESAYKAEYIIDIAAKINPEFFENFSIDELEQSQNDPEKQIDDLIAVFKKESPDLWAESRKIGLAYVIELIKDDLQKFNVIHEHWFYESSLGSIEDKESLLGKAIETVKENNGYEKDGALWLQSTNHGDDKDRVLVREDGRGTYLASDVAYHKNKLDRNFDVIVNVWGSDHHGYIKRIESSIESMGYSKERLRVQLVQFANLFENGKKVKMSTRSGEFYKLSDLIEKLGTDVSRFYYLSKQADQHLDFDLSLATEENKENIYFYIQYAHARISSLEQKYLLNNDGLPSELISSE

SEQ ID NO: 187537 - protein, 568 aa, Unknown
  Bacterial polypetide isolated from the Sargasso Sea
MSSISGIKNSSLSIINDKFSTTITENLKNGHLTTNVCMVAASILNLNPKELAKGLEKKLNELNKFKKVEIAGPGFINISLDRKDFVSILDSINKHKEKFGESSLSNGNKVQIEFVSANPTGPLHVGHGRGAAYGDALARILTATGSIVEKEYYINDAGRQIDILTASVIIKIIQKDLDSFSPINTYKGKYIEDIGNALNSIEVVSYQDVKSIIADLPEDAEQEIDQIISNLKEIDIVLWNRVKDFSLENILGLIEKDLESFNVNFDNWFKESSLGNLKDSDSEISTLINKLKEDDKAYKKDGALWLNTDISGDDKHRVLIRDDGRATYFASDVAYHKNKVDRKFDTLINIWGADHHGYIKRIEASIEALGSKKEKLVVRLVQFANLFKDGKKIKMSTRSGEFFTLKDLIQDIGKDAARFYYLSKQADQHLDFDIDLAKSDSKENIFYYIQYAHARIFSLEKKFNESHKGKAVNSKDIENNSYDKFDKLIHEVSKYPNIVKKAAQTLQPHLIIFYLKDLSQLFHSYYNDNHVLSESDDNMRAIIFCLSAVRQTIANGLNVIGITPMQKM

SEQ ID NO: 187538 - protein, 160 aa, Unknown
  Bacterial polypetide isolated from the Sargasso Sea
MFISSIDGINKDSAQIILKKFSTSISEDLDKGHITTNVCMIAASVLKLNPKDLAKELKNNLDDLDIFKDIQTAGPGFINITLHKKEFVSVLHEIIKENKSFGESNIGAGRKVQIEFVSANPTGPLHVGHGRGAAYGDAIGRILKATGSIVEKEYYINDAG

SEQ ID NO: 187539 - protein, 144 aa, Unknown
  Bacterial polypetide isolated from the Sargasso Sea
MIADEIKNKILNHIEKHFSEEEVSIASAKFQIEIPDSPEKGDLTCNIALILGNITKNNPKEIGLEIGNILKELNLVSSIEVAGPGFINIFLNHSGTLKIIKDIFDKNTIREEEDSKKIQVEFVSANPTGPLHVGHGRGAIYGDV

SEQ ID NO: 187540 - protein, 515 aa, Unknown
  Bacterial polypetide isolated from the Sargasso Sea
MRNINGYLKNIIGAEFSKIFNVSNETIEKSSFVVEYPKNKSDGELSTNICMVLAKEISANPVEAAKTLINSLEKIEDFEMLEVAGPGFLNFNISKDTWFKFLSQLLETNLLFNEEIGLNKNINVEYVSANPTGPLHIGHCRGAVFGDVLSNLLKVTGHNVTKEYYINDAGTQIDTLANSTIIRIKEIINSKSEENYPDDFYPGEYLINIAKKIIDKYGTSILESDNHFSTIKSECVNLLLENIKEDLSKLSINQDIFVSEKELITQGKIDKTIDELKNMNLIYEGILDKPKGKQIEDWEPRKQLLFKSSEYGDEIDRPLQKSDGEWTYFANDIAYHYDKYLRGSTHLIDILGADHGGYIKRMSASIQALTNNKARFTAKLCQMVKLISDGKELKMSKRSGDFITLSDLVKEVGSDSIRFMMMYRKNEAPLEFDFKKVTEQSKENPVFYVQYAHARISSVLNNLHSQNIKLNLENFSECNFSELNDLSEISLLKKSWITVMSLIRQFLYLSHIELH

SEQ ID NO: 187541 - protein, 581 aa, Unknown
  Bacterial polypetide isolated from the Sargasso Sea
MKSHIQSLLEQTIESFKQQGILPADFEARIQVDRTKDKSHGDLATNVAMMLTKATGKNPRELAQLIIDNLPASAYVAKVEIAGPGFINFFIDDSALANQLQAAIGDAHLGIKLPAPQTIVVDYSSPNLAKEMHVGHLRSTIIGDSVVRTLEFLGHKVIRQNHVGDWGTQFGMLLAYMEELRAANGEQAQLELSDLETFYRAAKLRFDESAEFATRARQLVVALQSGDEYCNKLWREFNDISLSHCHEVYERLGVSLTRADVHGESAYNADLEQVVKDLDAQGLLTESNGAKVVFQEAFRTKEGEPLPVIIQKADGGYLYATTDLAAMRYRSSVLKADRVLYFVDLRQALHFQQVFSLAKLAKFVREDMSLEHLGFGTMNGEDGRPFKTRTGGVVKLVDLLDEANSRALELVRSKNPDMDEATLAEIARVVGISAVKYADLSKNRTSDYIFSFEQMLSFEGNTAPYLLYAYTRVAGIFKRATDVDLSQAKIVLDHEKEKDLGNKLAQFGEILSRVIDKGQPHVLCGYLYELAGAFSSFYEACPVLAADNDEQKHSRLLLSQLTASTLQKGLNLLGIETLERM

SEQ ID NO: 187542 - protein, 530 aa, Unknown
  Bacterial polypetide isolated from the Sargasso Sea
MKETITEKLTDIVINKFGKKYASFIEVSRVTKSHIDADFYSNIAMKLAKFLKQNPASIARDITEAIAELDGISVSVAKPGYINFQINKNLKNNLVYEIVMTDDLLASFKVENPKKIHLEFLSANPTGPLHVGHGRGAIFGNVLKKFLKVQGHDVHSEYYVNNVGNQMRNLWESVKRKHSGDEVDSDENDLYVGDYINDVHAAMSKSIKDDFENCNEREAINILCDIMISKFIKPDLDYLDITFDEWYKESNLVEDNSVKNMIEKLKNSKDAVEIDGALMLKADELRAMIKSNGDLTYFASDLAYHDKKLNNYELVIDIWGADHHGYVPRIREGLKKLGHDDSKLLVKLIQFANLYKNKEKISMSTRKGTFVTLKKLADEIGIDAIYFFYLTKNSNQHLDFDLDVAVSQDKNNPVYYIQYAHARIEKILNQVGSIENIQFNPELITSRDDVGLINKLNQYKDIFEKSLLNLEPHLLANYLYDLASEFHSYYSKIRIITEDINYSRVYLINSVQKVLKNGLDLLNVSAPTKM

SEQ ID NO: 187543 - protein, 451 aa, Unknown
  Bacterial polypetide isolated from the Sargasso Sea
ENKEKEHGDLASNIALVLAKPLGKNPKEIADQIKANFFTDEDITKVEVAGPGFINFFLSKKSHGSVLKEISVKKDNYGSSKSNNKKVLIEYVSSNPTGPLHVGHGRGAVFGSVLARLLSEAGFKVDEEYYVNDFGRQMNILAASLWIRYAQIFNSELKMFKNGYQGEYLKSIAQQLKEQKKDGLFLSDLELNDLDRDKQDDESFTDSVIEAIRSMLGDEFIFIRDFALQKILDLIQVDLSEFGVKHNKWFSESSLYKSKPGSESIVDKAINELESKGFIYELEGATWFKSSALGDDKDRVLKRGNGEYTYFASDVAYHLNKYDRGYDRIINIWGSDHHGYIPRVRAAMEASERNIEKLEVVFIQFANLIRSGKKVPMSTRSGEFITLKELIDEVTTEAARFFYINRKSDQHLDFDLDLAKEQSKDNPLYYIQYAHARICSVLNKSDIDTDK

SEQ ID NO: 187544 - protein, 341 aa, Unknown
  Bacterial polypetide isolated from the Sargasso Sea
LAGPGFINIHLKNTELVKRANAIINDELPLIPETEKLLRIAVDYSSPNLAKEMHVGHLRGTIIGDAIVRVLEKLGHEVVRQNHVGDWGTQFGMLICYLQELQEEGIEAQPSALADLEKFYKAAKSRFDSDEEFAKRSRKAVVELQAGNSQSLAAWKQFIEESLNHCDEIYCKLNVTLNRAHLDAESKYNDDLPGVIQILEKKGLLSESEGAKCVFLPEFIGKDGNNLPVIVQKSDGGYLYSTTDLAAVIYKSDDLQVDRALYVVDARQSLHFQQVFAVAKEAEFAKEEISLEHISYGTMMDSSGRPFKTRSGDTVKLIELLNESVSRAYTLVTEKNPDLTE

SEQ ID NO: 187545 - protein, 414 aa, Unknown
  Bacterial polypetide isolated from the Sargasso Sea
VEFVSANPTGPLHVGHGRGAIYGDVISKLLEKKGHEVQKEYYVNDAGRQIDILTASVYLRAIEIEDNLFPESAYRGEYIKEIAKNADLQEAVNIDDLFKSLPEDDEEKIDKIISRLKSASEKDWQSIKKVSLESVLSTIEKDLEDFGVTFDKWFLESSLLGADSKIDAAVQQLNTNNLIDNRDGNIWFKSSYFGDDKDRVLIRADGRQTYFASDVAYHKDKLDRGFDEIINIWGSDHHGYIKRVEASLEGLGYDKNKLSVKLVQFANLIKGGSPVKMSTRSGEFYSLEDLLSDVGSDVARFYYLSKQTDQHLDFDLDLAVSSKKENMYYYIQYAHARICSLEKKAGLKDFLAEDISEDHVDICSNLIHEISKYPNVLEKTCNNLSPHLLIFYLKDLASIFHNFYNDNKILDKSG

SEQ ID NO: 187546 - protein, 137 aa, Unknown
  Bacterial polypetide isolated from the Sargasso Sea
MTKNRILSGVQPSGDLHLGNYLGAIKNFVSLQKDYECFFCVVDLHAITVWQDPKELAQKTREVTAAFIASGIDPNENILFAQSQVPQHSQLAWIFNCVARMGWLNRMTQFKDKAGKDRENVSVGLFSYPKFNGSRIY

SEQ ID NO: 187547 - protein, 294 aa, Unknown
  Bacterial polypetide isolated from the Sargasso Sea
MSNKPVVLSGCQPSGQLTLGNYMGALKQWVSMQDDHDCLYMIVDLHAITVRQDPKLLAEACLDGLSLYLACGIDPQKSTLFLQSHVPEHAQLSWVLNCYAQMGELNRMTQFKDKSAKNENNINVGLYSYPVLQAADILLYQADKVPVGEDQKQHLELTRDIATRVNNLYGDVFRLPDPYIPDFGARIMSLQEPEKKMSKSDNNPNNFIGLLEDPKKLAKKIKRAVTDSDEQANIYFNPTEKPGVSNLLTLLSLATGKSIKELEPEYTDKMYGHLKGDVADAVGALLEPHSGPLC

SEQ ID NO: 187548 - protein, 222 aa, Unknown
  Bacterial polypetide isolated from the Sargasso Sea
MANKKRILSGVQPTGDLHIGNWLGAINNWVNLQEQYETFLCVVDLHAITASYNPKELSQNTISTAALYVACGIDPNICSIFVQSQISAHSELCWILNCMTPINWMERMIQFKEKSIQQGNNVSIGLFDYPILMAADILLYDADFVPVGEDQKQHLELARDIAQQRINARFSKDKNILKIPQPIIMKNGSKIMSLIDGSKKMSKSDPNEGSRINLLDPPEIIT

SEQ ID NO: 187549 - protein, 293 aa, Unknown
  Bacterial polypetide isolated from the Sargasso Sea
CVVDLHAITVSQNPKDLKSNIHETVATFVASGIDPKKSIIFNQSRVSAHSQSAWILSCVARMGWLNRMTQFKEKAGKDKEKASIGLYSYPVLMAADILLYDSTHVPVGDDQKQHLELCRDIAQKFNNDYKIENFFVVPEPLIKKEFSRIMSLKDGLKKMSKSEVSDLSRINLTDDKDQIINKIKKAKTDTLPLPYTIEELEKRPEAKNLIGIYSSLMNNSLQKSIDEFAGKNFSEFKEKLSDVVVKEINPISLKIKELLDDKVFLEKILKGGYEKANEIASKKIKKIHEIVGF

SEQ ID NO: 187550 - protein, 284 aa, Unknown
  Bacterial polypetide isolated from the Sargasso Sea
FSNPKELKNNVLETVASFLATGLNPEKSVIFNQSSVSGHAELAWIFNCVSRIGWLNRMTQFKDKAGSDKEKASVGLYIYPNLMASDILLYKATHVPVGADQKQHLELSRDIAQKFNNDFNCKDFFPLPEPLIPKNVSRIMSLRDGTKKMSKSEESDYSRINLKDNADEISKKIKKAKSDTEQIPDNLKLLENKPEALNLINIYSEISKTSIEKVLNEMSGKEYSFLKTKLTELLISEITPVGKEITKLLGDKPHLLKILVKGREKANIIAEENLKNIREKVGLI

SEQ ID NO: 187551 - protein, 185 aa, Unknown
  Bacterial polypetide isolated from the Sargasso Sea
MANKKRILSGVQPTGDLHIGNWLGAINNWVTLQEQYETFLCVVDLHAITASYNPKELSKNTISTAALYVACGIDPNIASIFVQSQISAHSELCWILNCMTPINWMERMIQFKEKSIQQGNNVSIGLFDYPILMAADILLYDADFVPVGEDQKQHLELARDIAQQRINARFSKDKNILKIPQPIIM

SEQ ID NO: 187552 - protein, 122 aa, Unknown
  Bacterial polypetide isolated from the Sargasso Sea
MNEIKKNTVLSGVQPSGNLHIGNYLGAIKNFVSMQSDYNCFFCIVDLHAITVKQDPKILKRNTLEVAASYIASGIDPKKSVVFNQSSVSAHSELAWIFNCVTRMGWLNRMTQFKDKAGKDKE

SEQ ID NO: 187553 - protein, 272 aa, Unknown
  Bacterial polypetide isolated from the Sargasso Sea
MGKKIFSGVQPTGNLHLGNYLGAIKNFVDLNNDAENDCIFCVVDLHAITVKQDPKVLKNNIRETVATFIASGINPKKSIIFNQSGVAAHSEGAWILSCVARMGWLNRMTQFKEKAGKDKEKASVGLYSYPVLMAADILLYDATHVPVGDDQKQHLELCRDIAQKFNNDFDQNNFLKVPEPLIQKEFSRIMSLKDGSKKMSKSELSDFSRINLTDDKDSIVNKIKKAKTDPLPMPSSVEELNERLEARNLLGIYSSLNNSSLKKTVETFSGKN

SEQ ID NO: 187554 - protein, 289 aa, Unknown
  Bacterial polypetide isolated from the Sargasso Sea
AITVRQDAQQLRKATLDTLALYLACGIDPEKSTIFVQSHVPEHAQLGWALNCYTYFGELSRMTQFKDKSARYAENINAGLFDYPVLMAADILLYQTNQVPVGEDQKQHLELSRDIAQRFNALYGEIFKVPEPFIPKSGARVMSLLEPTKKMSKSDDNRNNVIGLLEDPKSVVKKIKRAMTDSEEPPVVRYDVQNKAGVSNLLDILSAVTGQSIPELEQHFEGKMYGHLKGEVAEAVSGMLTELQERYHRFRNDEAFLQKVMKDGAEKASARASVTLKAVYEAIGFVAKP

SEQ ID NO: 187555 - protein, 230 aa, Unknown
  Bacterial polypetide isolated from the Sargasso Sea
MSTNSKQTVFSGVQPTGNLHLGNYLGAIKNFVELQKKMECIYCVVDLHAITVFQDPKQLKKSMLDTTATFIACGLDFKKSIIFNQSSVSEHAELAWVLNCVSRIGWMNRMTQFKEKAGKNRENASVGLYVYPNLMAADILLYKATHVPVGDDQKQHLELVRDIAQKFNNDFKSNNFFPIPEPLIQKKLSRVMSLRDGKNKMSKSDESEYSRINLQDTEDEISKKIKKAKT

SEQ ID NO: 187556 - protein, 280 aa, Unknown
  Bacterial polypetide isolated from the Sargasso Sea
MPKKIFSGVQPTGNLHLGNYLGAIKNFVDLNNDDQNECIFCVVDLHAITIKQDKDELKNNIRETAATFIASGIDPSKSVIFNQSKVHAHAEGSWMLSCMAPMGWLNRMTQFKEKAGKDKEKASVGLYIYPILMASDILLYDATHVPVGEDQKQHLELTRDIAQKFNKDFDCDDFLKVPQPLIKKNFSRIMSLKDGLKKMSKSDPSDLSRINLTDNKDQIINKIKKAKTDSFPIPNEEKKLKDRPEAENLLGIYSSTLDQTLDKTLEEFGGKNFSDLKSQL

SEQ ID NO: 187557 - protein, 292 aa, Unknown
  Bacterial polypetide isolated from the Sargasso Sea
HYLGAIKNFVELQNEKNTECIYCIVDLHAITVKQDPKELRKNIRETLATFIASGLNEKKSVIFNQSSVSAHSEGAWILSCVARMGWLNRMTQFKEKAGKDKEKASVGLYAYPILMAADILLYDTTHVPVGDDQKQHLELCRDIAQRFNNDFQAPNFLKVPEPLIQKYFSRIMSLKDGKKKMSKSDPSDLSRINLTDDKDKIINKIKKSKTDTMPMPSEEENLKNRPEVLNLLEIYSSLSDESVEKSKKEFSGKNFSVFKEKLSNLLVEKIEPISKEIKRLLSDEKNLDEILL

SEQ ID NO: 187558 - protein, 287 aa, Unknown
  Bacterial polypetide isolated from the Sargasso Sea
VDLHAITVWQDPTLLAQKTREVTAAFIAAGIDPKKNVLFVQSQVPQHAQLAWIFNCVARMGWVNRMTQFKDKAGKDRENVSVGLFSYPTLMAADILIYLATHVPVGDDQKQHLELTRDIAQKFNADFETDFFPIPEPLIFGEATRVMSLRDGTKKMSKSDPSDYSRIMLNDDEDSIVQKIRKAKTDPNPLPDNLTDAQKRPEAINLLSIFAALSEKDTEEIISIYAGKEFSIFKNDLSDLTSSILSPISKEMKKLLADKQYLDSIIIEGRDKAISVQNQFCRKYTKL

SEQ ID NO: 187559 - protein, 288 aa, Unknown
  Bacterial polypetide isolated from the Sargasso Sea
HAITVKQDKNELKNNIRETAATFIASGIDPSKSIIFNQSKVHAHAEGSWMLSCMAPMGWLNRMTQFKEKAGKDKEKASVGLYIYPILMASDILLYDATHVPVGEDQKQHLELTRDIAQKFNKDFDCDDFLKAPQPLIKKNFSRIMSLKDGLKKMSKSDPSDLSRINLTDTKDEIINKIKKAKTDSFPIPNEDNKLKERPEAENLLGIYSSILDQTFDKTLEEFGGKNFSDLKIKLAEVLSSKISPISDEIKKLINDYQYLDKILAEGAGKAEEIAGKKIVEMKKIIGF

SEQ ID NO: 187560 - protein, 292 aa, Unknown
  Bacterial polypetide isolated from the Sargasso Sea
FVQMQNDEYETIYCVVDLHAITVWQNPKMLRQNIRELAASFIASGLDPDKSVLFNQSAVPEHAQLGWVFNCVARMGWMQRMTQFKDKAGKNAQNASLGLFGYPALMAADILAYHATHVPVGDDQKQHLELTRDIAIKFNHDYEIDFFPVTEPVIGGPAARVMSLRDGTKKMSKSDPSDLSRINMTDNSDMIANKIRKAKTDQYGLPSEPKGLEGRAEAQNLVSIYAALADQSVESVLSEIGGKQFSDFKPMLIERATEVLSPISNEMGRIMQDIPQLDKVLNDGALKAKSIA

SEQ ID NO: 187561 - protein, 283 aa, Unknown
  Bacterial polypetide isolated from the Sargasso Sea
MSKKIFSGVQPTGNLHLGNYIGAIKNFVDLQNDPNNFCIYCVVDLHAITVKQNPEELKKNIRETTAAFIASGLDYKKSIIFNQSLVPAHSEGSWILSCIARMGWLNRMTQFKEKAGKDKEKASVGLYIYPILMAADILLYDATHVPVGGDQKQHLELSRDIANKFNLDFNSPDFLIAPEPLIQKNFARIMSLKDGNKKMSKSDPSELSRINLNDSTDEIFNKIKKAKTDTQPLPENENDLATRPEAENLLGIYSSLNDQSIKNTINEFSGKNFSEFKEKLASL

SEQ ID NO: 187562 - protein, 172 aa, Unknown
  Bacterial polypetide isolated from the Sargasso Sea
MKKELVFSGVQPTGNLHLGNYLGALKNFVSLQNSMNCLYCVVDLHAITTFQNPNELKSNILETTAGFLASGLDSNKSIIFNQSSVSGHAELAWILNCVCRLGWLNRMTQFKDKAGKDKEKASVGLYIYPNLMAADILLYKATHVPVGADQKQHLELSRDIAQKFNNDFKIKD

SEQ ID NO: 187563 - protein, 119 aa, Unknown
  Bacterial polypetide isolated from the Sargasso Sea
MGKKIFSGVQPTGNLHLGNYLGAIKNFVNLNNDNENKCIFCVVDLHAITIRQNPKELKNNINETVATFIASGIDHKKSIIFNQSKVPAHAEGAWILGCVCSMGWLNRMTQFKEKAGKDK

SEQ ID NO: 187564 - protein, 218 aa, Unknown
  Bacterial polypetide isolated from the Sargasso Sea
MANKKRILSGVQPTGDLHIGNWLGAINNWVTLQEQYETFLCVVDLHAITASYNPKELSNNTISTAALYVACGIDPNICSIFVQSQISAHSELCWILNCMTPINWMERMIQFKEKSIQQGNNVSIGLFDYPILMAADILLYDADFVPVGEDQKQHLELARDIAQQRINARFSKDKNILKIPQPIIMKNGSKIMSLIDGSKKMSKSDPNEGSRINLLDPP

SEQ ID NO: 187565 - protein, 196 aa, Unknown
  Bacterial polypetide isolated from the Sargasso Sea
TLRRNTWFQWGEDQKQHLELSRDIAQKFNSDYSCHNFLKVPEPLIQKSFSRIMSLKDGKKKMSKSDPSDLSRINLTDNKDEIINKIKKAKTDNFSMPDKSNGLDKRPEVENLLGIYASLNNQSLENSIKEFSGNNFSDFKNKLAELVAEKISPISKEINKLLKETTLIDKILLEGSEKAQDIASKKVKEMKKIIGF

SEQ ID NO: 187566 - protein, 284 aa, Unknown
  Bacterial polypetide isolated from the Sargasso Sea
PKQDPKELKNNIRETVATFVASGIDPKRSIIFNQSQVKAHSETAWILSCVARMGWLNRMTQFKEKAGKDKEKASVGLYSYPVLMAADILLYDTSHVPVGEDQKQHLELCRDIAQKFNNDFEVIDFFKIPEPLIQKEFSRIMSLKDGSRKMSKSEPSDLSRINLTDDKDQIINKIKKAKTDTLPLPSNEEELKDRPEAKNLLGIYSSLTNTSLEKNINNFSGKNFSEFKEDLSQALVDKILPISREIKKLLKEKKYLDEILLNGYEKANEIASKKVNKIHEIVGF

SEQ ID NO: 187567 - protein, 280 aa, Unknown
  Bacterial polypetide isolated from the Sargasso Sea
MKKKKIVFSGVQPSGNLHLGNYIGAIKNFVSLQNENKCIYCVVDLHAITVFQNPEKLKNNTLETTAAFLASGLDENNCIIFNQSSVKGHTELAWIMSCVSRIGWLNRMTQFKDKAGKDKEKASVGLYIYPNLMAADILLYKATHVPVGADQKQHLELSRDIAQKFNNDFKVPDFFPIPEPLIQKKVSKVMSLRDGKKKMSKSETSDYSRINLTDNADEIKLKIKKAKTDSGVMPNNVDDLNKRPEALNLITIFSDLNGNTIDKTLSQFRGKEFSHFKNNL

SEQ ID NO: 187568 - protein, 281 aa, Unknown
  Bacterial polypetide isolated from the Sargasso Sea
IPKDLKSNIHETVATFVASGIDPKKSIIFNQSQVSAHSEAAWILSCVARMGWLNRMTQFKEKAGKDKEKASIGLYSYPVLMAADILLYDSTHVPVGDDQKQHLELCRDIAQKFNNDYEIENFFIVPEPLIKKEFSRIMSLKDGLKKMSKSEISDLSRINLTDDKDQIINKIKKAKTDTLPLPSTIDELEKRPEAKNLIGIYSSLMNNTFQKTIDEFAGKNFSEFKKKLSDIVVNEISPISLRIKELLNDKVFLEKILKEGYEKANEIASKKIKKIHEIVGF

SEQ ID NO: 187569 - protein, 147 aa, Unknown
  Bacterial polypetide isolated from the Sargasso Sea
MANKKRILSGVQPTGDLHIGNWLGAINNWVTLQEQYETFLCVVDLHAITASYNPKELSKNTISTAALYVACGIDPNICSIFVQSQISAHSELCWILNCMTPINWMERMIQFKEKSIQQGNNVSIGLFDYPILMAADILLYDADFVPS

SEQ ID NO: 187570 - protein, 65 aa, Unknown
  Bacterial polypetide isolated from the Sargasso Sea
MVEKKLDKGLVFSGVQPTGNLHLGNYLGAIKNWVNLQKEKSCIFCIVDLHAITVAENRFKLKENT

SEQ ID NO: 187571 - protein, 293 aa, Unknown
  Bacterial polypetide isolated from the Sargasso Sea
MTKPIVLSGAQPSGQLTIGNYMGALRQWVNMQDDFDCLYCIVDLHAITTRQEPAALRKACLDAAALYLAVGIDPAKSTVFIQSHVPQHAELGWILNCYTQMGELSRMTQFKDKSARFENNVNVGLFGYPVLMAADILLYQANQVPVGNDQKQHLELTRDICTRFNNLYGEVFTLPEPFIPTEGARVMSLQDPTKKMSKSDDNEANFIGLLEDPKQIVKKIKRAVTDSDEPAVVRFDPENKPGVSNLLTLMSGVTGRSIPELEQHFEGKMYGHLKTETAEAVVALLEPIQARFH

SEQ ID NO: 187572 - protein, 241 aa, Unknown
  Bacterial polypetide isolated from the Sargasso Sea
CIARIGWLNRMTQFKEKAGKKKDNASVGLFSYPVLMAADILLYRATHVPVGDDQKQHLELTRDIAISFNNFFKNKINADFFTLPDPIITGPAKRIMSLRDGEKKMSKSDISDASRINLTDEDDIIQKKIQKAKTDSLPIPDTEEELSGRSEAINLINIYSALSDIKVSEVLKNFSGKGFSIFKKDLTDLMIQKVNPISHEMKKMLNDKEEIKKILADGKLRAKEIAVPVMKDIKNIIGFIY

SEQ ID NO: 187573 - protein, 258 aa, Unknown
  Bacterial polypetide isolated from the Sargasso Sea
MIETNSRTILSGVQPSGDLHIGNYLGAIKNFVKMQNDFKCFFCVVDLHAITVKQNPELLSRNTLEVVATYIASGINPEKSVIFNQSSVSAHAELSWIFNCVTRMGWLSRMTQFKDKAGKDRENASSGLFIYPNLMAADILLYKATHVPVGNDQKQHLELTRDIAQKFNRDFNCEKFFPIPEPIIEDNTSRIMSLKDGNQKMSKSDLSDNSRISMTDETDSIVKKIKKAKTADVNMPSTMNEILKLSEINNLLNIYSGF

SEQ ID NO: 187574 - protein, 155 aa, Unknown
  Bacterial polypetide isolated from the Sargasso Sea
MGKKIFSGVQPTGNLHLGNYLGAIKNFVQLNNDNENECVFCVVDLHAITVSQDPKVLKNNINETVATFVASGIDPKKSIIFNQSQVSAHAEAAWILSCVARMGWLNRMTQFKEKAGKDKEKASIGLYSYPVLMAADILLYDATHVPVGDDQKQHL

SEQ ID NO: 187575 - protein, 210 aa, Unknown
  Bacterial polypetide isolated from the Sargasso Sea
MKKKIFSGVQPTGNLHLGNYLGAIKNFVALQNEKENECVYCVVDLHAITVKQDPNILKDNIRETTAAFLASGLDYKKSIIFNQSLVPAHAEGSWILGCIARMGWLNRMTQFKEKAGKDKEKASVGLYIYPILMAADILLYDSTHVPVGEDQKQHLELSRDIAQKFNLDFNSPDFLKAPEPLIQKKFARIMSLKDGTKKMSKSDPSDLSRI

SEQ ID NO: 187576 - protein, 242 aa, Unknown
  Bacterial polypetide isolated from the Sargasso Sea
GAWILSCVARMGWLNRMTQFKEKAGKDKEKASVGLYSYPVLMAADILLYDATHVPVGDDQKQHLELCRDIAQKFNNDFGVEDFLKVPEPLIQKEFSRIMSLKDGSKKMSKSELSDLSRINLTDDKDQIINKIKKAKTDTLPMPKDIKELEGRLEAQNLLGIFASLSNSTLETSIEKFAGKNFSEFKQQLSELLVNKIIPISEEIKKLLQDQSYLDSILLDGVEKANKIASKKIKNLKETVGF

SEQ ID NO: 187577 - protein, 207 aa, Unknown
  Bacterial polypetide isolated from the Sargasso Sea
MARILTGIQSTGTPHLGNLLGAVIPAIKLAKASNDDSFLFIADLHSLTQIKKGEKLRDNTFSTAATWLACGLDIEKTHFYRQSDVTEVTELAWFLNCFFPYQRLTLAHSFKDKSNNLSDINTGLFTYPMLMAADILLYDAEIVPVGRDQLQHLEITRDVASRFNHQMGKTFVIPEGKVQENTQHIPGTNGEKMSKSKNNIINVFSKR

SEQ ID NO: 187578 - protein, 246 aa, Unknown
  Bacterial polypetide isolated from the Sargasso Sea
SQLAWAFSCIARMGWLNRMTQFKDKAGKNSENVSVGLYSYPTLMAADILIYLATHVPVGEDQKQHLELTRDIAQKFNNDFKNDLFPIPEPLILGEAKRVMSLRDGTKKMSKSDPSDYSRIMLSDTQDEIIQKIKKAKTDPLPLPDNLVAAKNRPEALNLLTLYAALSDADTETVIKNYAGKDFSQFKKDLGDLASSKLAPISLEINKLMNDKDFLDSIINTGKEKAISVAEPVLKKVYEIIGFLSR

SEQ ID NO: 187579 - protein, 242 aa, Unknown
  Bacterial polypetide isolated from the Sargasso Sea
GSWILGCIARMGWLNRMTQFKEKAGKDKEKASVGLYIYPVLMTADILLYDATHVPVGEDQKQHLELSRDIAQKFNLDFNAPDFLRVPEPLIQKNFSRIMSLKDGNNKMSKSDPSDLSRINLTDSKDQIFSKIKKAKTDNDLLPSDDKNLNQRPEVENLLGIYSSLNNQSLNNSIKEFSGKNFSEFKAKLADLVVEKISPISEEINKLQKDTNYIDSILKSGGERANSIASKKVQEIKRIIGF

SEQ ID NO: 187580 - protein, 241 aa, Unknown
  Bacterial polypetide isolated from the Sargasso Sea
WILNCICRVGWLNRMTQFKDKAGKDKEKASVGLYIYPNLMAADILLYKATHVPVGADQKQHLELSRDIAQKFNNDFNKKDFFPLPEPLIQKNISRVMSLRDGTKKMSKSEESDYSRINLKDSSDEIVKKIKKAKTDTDPITENIKDYVNRPEAYNLLSIYSDLSDQKIETTINEFIGKDFSSLKTKLSEKLVETISPIGKNIEKLMRDRKHLEDVLKKGKQKANIIAEENLKKIREIVGFV

SEQ ID NO: 187581 - protein, 249 aa, Unknown
  Bacterial polypetide isolated from the Sargasso Sea
MTKKIFSGVQPTGNLHLGNYLGAIKNFVELQNEEDNNCIYCVVDLHAITLKQDPKELKNNIRETAATFIASGLNPNKSILFNQSLVSAHSEGAWILSCIGRMGWLNRMTQFKEKAGRDKEKASVGLYIYPILMAADIMLYDATHVPVGDDQKQHLELCRDIAQKFNNDYNVEDFLIPPEPLIQKQFSRIMSLKDGSKKMSKSDVSDLSRINLKDSKDLIINKIKKAKTDPHPIPNIIEELENRPEAENL

SEQ ID NO: 187582 - protein, 156 aa, Unknown
  Bacterial polypetide isolated from the Sargasso Sea
MEKKIFSGVQPTGNLHLGNYIGAIKNFVDLQNQEGNECVYCVVDLHAITTKQDPKILKNNIRETTAAFLASGIDPKKSIIFNQSLVPAHAEGSWILGCIARMGWLNRMTQFKEKAGKDKEKASVGLYIYPILMTADILLYDATHVPVGEDQKQHLE

SEQ ID NO: 187583 - protein, 279 aa, Unknown
  Bacterial polypetide isolated from the Sargasso Sea
MGNYLGAMKNFVDLQKTMSCIYCVVDLHAITTFKDPTELRENILDTAAGFLACGLDFNKSIIFNQSSVSGHSELAWILNCISRVGWMNRMTQFKEKAGLNKENASVGLYVYPNLMAADILLYKATHVPVGDDQKQHLELARDIAQKFNNDFKSADFFPLPEPLIQKKLSRVMSLRDGKKKMSKSEESDYSRIDLKDTEDDIRKKIKKAKTDSSPIPEQVSELSNRPEALNLLNIYSFLTNSNLESTLKEMQGKDFSKFKDALSDVIISTVCPIGIKINK

SEQ ID NO: 187584 - protein, 127 aa, Unknown
  Bacterial polypetide isolated from the Sargasso Sea
MTRVLSGIQPTGDIHLGNYLGALRQWALDQHEHDSFYCAVDLHAVTVQQDPQELRSKTIETMATLVAVGLDPEVCTLFVQSHVPYHTELSWLLECTVSFGELRRMTQFKDKSTKQGDAGQEHVSAGL

SEQ ID NO: 187585 - protein, 300 aa, Unknown
  Bacterial polypetide isolated from the Sargasso Sea
SGVQPTGNLHLGNYLGALKNFVSLQKEMECIYCVVDLHAITSFQKPNELEDNVFETVASFLATGIDPNTSIIFNQSSVSGHAELAWILNCVSRIGWLNRMTQFKDKAGSDKEKASVGLYIYPNLMAADILLYKASHVPVGADQKQHLELCRDIAQKFNNDFNCEGFFPLPEPLIPKNVSRVMSLRDGTKKMSKSEESDYSRINLKDTTDEISKKIKKAKSDSEPIPQSLKGLEKKPEALNLVNIYSELSKSSLDKVLNEMSGKDYSFLKTKLAELLINEITPVGKEIKKLLNDKPYLKQV

SEQ ID NO: 187586 - protein, 95 aa, Unknown
  Bacterial polypetide isolated from the Sargasso Sea
MSDKFKKLVFSGVQPTGNLHLGNYLGAIKNFVNLQKKMDCIYCVVDLHAITTFQKPQELKKNIIETTAGFLACGLDYKKSIIFNQSSVSGHAELA

SEQ ID NO: 187587 - protein, 219 aa, Unknown
  Bacterial polypetide isolated from the Sargasso Sea
MLKSKQPSKRIFSGIQPTGNLHIGNYLGAIKNWIKFQEEDDCIYSIVDLHAMTVPNNLQDIKNSTLEVAAAVIASGIDPKKSILFNQSNVPQHTELAWIFNCIARIGWLNRMTQFKEKAGKKKDNATVGLFSYPVLMAADILLYKATHVPVGEDQKQHLELTRDIVSSFNATFKKSLDKDFFHLPEPIILGPAKRIMSLRDGKSKMSKSDISDGSRINL

SEQ ID NO: 187588 - protein, 218 aa, Unknown
  Bacterial polypetide isolated from the Sargasso Sea
MEKVSKRILSGVQPSGDLHLGNYLGAIKNFVSLQKEFECFFCVVDLHAITVWQDPKILKQKTREVAAAFIASGIDPEKNTLFVQSQVPHHAQLAWIFNCVARMGWLNRMTQFKDKAGKNSENVSVGLFSYPTLMAADILIYLATHVPVGEDQKQHLELTRDIAQKFNSDFNTDIFPIPEPLILGAATRVMSLRDGLKKMSKSDPSDYSRIMLSDRKKK

SEQ ID NO: 187589 - protein, 198 aa, Unknown
  Bacterial polypetide isolated from the Sargasso Sea
MANKKRILSGVQPTGDLHIGNWLGAINNWVTLQEQYETFLCVVDLHAITASYNPKELSKNTISTAALYVACGIDPNICSIFVQSQISAHSELCWILNCMTPINWMERMIQFKEKSIQQGNNVSIGLFDYPILMAADILLYDADFVPVGEDQKQHLELARDIAQQRINARFSKDKNILKIPQPIIMKNGSKIMSLIDGS

SEQ ID NO: 187590 - protein, 182 aa, Unknown
  Bacterial polypetide isolated from the Sargasso Sea
VDLHAITVWEDPSQLAKKTREVTAAFIASGIDPEKNILFSQSQVPQHAQLAWVFNCVARMGWLNRMTQFKDKAGKDKENVSVGLFSYPTLMAADILIYLATHVPVGEDQKQHLELTRDIAQKFNNDFQTDLFPIPEPLIFGEATRVMSLRDGTKKMSKSDPSDYSRIMLNDDTDIIVQKIKK

SEQ ID NO: 187591 - protein, 219 aa, Unknown
  Bacterial polypetide isolated from the Sargasso Sea
MVKIKRRQVFGLYSYPVLMAADILLYDTTHVPVGDDQKQHLELCRDIAQKFNNDFKVENFFKIPEPLIQKEFSRIMSLKDGTKKMSKSDLSDLSRINLTDDENQIVNKIKKAKTDTLPLPSNIMELEKRPEAKNLIGIYSSLTNLSLEQSVNEFSGKNFSEFKDSLSQVLVDKITPISEEIKKLLNEKKYLDEILLDGFEKADKIASKKVKKIHEIIGF

SEQ ID NO: 187592 - protein, 309 aa, Unknown
  Bacterial polypetide isolated from the Sargasso Sea
ACGLDAERVTFYRQSDVPEIPELTWLLTCVTAKGLLNRAHAYKASVDKNVENGEDPDAGVTMGLYSYPVLMAADILMFNAHKVPVGRDQIQHVEMARDIAQRFNHLFGHGREFFTLPEAVIEEGVATLPGLDGRKMSKSYDNTIPLFGSAKELKGAIARIVTDSRLPGEPKDPDSSHLFTLYQAFATAQQQDAFRQELLDGLAWGDAKQRLFELLDNELGEARELYHQLITKPAELEDILQAGAAKARRIATPFLGELREAVGLRNFRSEVKSAAPAKKKSSKVARFASFREADGAFRFRFFAPDGEEL

SEQ ID NO: 187593 - protein, 251 aa, Unknown
  Bacterial polypetide isolated from the Sargasso Sea
MSKDIVFSGVQPTGEIHLGNYLGAIKQFLNFQNECDSIFCIVDQHAITIFQDPNELKENVLSVLAIFLASGLDPKKCIIFNQASVKEHSVLSWYLSCTARVGWLNRMTQFKDKAGKNRDNASLGLYAYPVLMAADILLYHADKVPVGDDQKQHLELTRDIAHKFNTDYCHEYFKLPDPIINKDAPRIMSLRDANNKMSKSDVSKYSRILLTDSNDEISTKISKAKSDSLKMPSSSDELSDRPEINNLITIY

SEQ ID NO: 187594 - protein, 222 aa, Unknown
  Bacterial polypetide isolated from the Sargasso Sea
FQNPEELNDNIFEVASILIASGIDINNSILFNQSRVAMHAELAWIFNCTAKIGWLNRMTQFKDKAGKNKEKASAGLYVYPNLMAADILAYKATHVPVGDDQKQHLELTRDIAASFNDNYNIDYFPLVEPLIIGEATRVMNLRDGSKKMSKSDNSDFSRINLTDSPEKISAKIKKAKTDSLPVPDSPSELSNRLEAKNLIGIFAALMGKTQDEIVKDYGGGTF

SEQ ID NO: 187595 - protein, 150 aa, Unknown
  Bacterial polypetide isolated from the Sargasso Sea
MHKKRVFSGVQPTGNLHLGNYLGAIKNFVDLQNKFECVYCIVDLHAITNRQDPKELKANILETLASFIASGLDPEKNIIFNQASVSAHSELAWIFNCVARIGWMNRMTQFKEKAGTNKENASVGLLVYPNLMAADILLYKATHVPVGEDQ

SEQ ID NO: 187596 - protein, 171 aa, Unknown
  Bacterial polypetide isolated from the Sargasso Sea
MSKKIFSGVQPTGNLHLGNYIGAIKNFVNLQNDPDNFCIYCVVDLHAITVKQDPKVLKKNIRETTAAFIASGLDYKKSIIFNQSLVPAHSEGSWILSCVARMGWLNRMTQFKEKAGKDKEKASVGLYIYPILMAADILLYDATHVPVGEDQKQHLELSRDIANKFNLDFKT

SEQ ID NO: 187597 - protein, 221 aa, Unknown
  Bacterial polypetide isolated from the Sargasso Sea
IKNFVALQNEKDNECVYCVVDLHAITVKQDPKTLKDNIRETTAAFLASGLDYKKSIIFNQSLVPAHSEGSWILGCIARMGWLNRMTQFKEKAGKDKEKASVGLYIYPILMAADILLYDATHVPVGEDQKQHLELSRDIAQKFNLDFETPDFLKAPEPLIQKNFARIMSLKDGTKKMSKSDPSDLSRINLTDNKDEIINKIKKAKTDNSALPFDDKKLSERP

SEQ ID NO: 187598 - protein, 230 aa, Unknown
  Bacterial polypetide isolated from the Sargasso Sea
MIQIKIIFCVQSQVPQHAQLGWLFNCVARMGWLNRMTQFKDKAGKNSENVSVGLFSYPTLMAADILIYLATHVPVGDDQKQHLELTRDIAQKFNNDFKTDFFPIPEPLILGEATRVMSLRDGSKKMSKSDPSDYSRIMLTDTAENITQKIKKAKTDPEPLPQDKTGLSKRPEAENLISIFASLQDTSIESVIKDYAGKEFSTFKKDLADLSVSKLEPITSEMNKLMNDVS

SEQ ID NO: 187599 - protein, 282 aa, Unknown
  Bacterial polypetide isolated from the Sargasso Sea
SSKQIYEVAATWLALGLDPTVSVLYQQSQIPELFELNWILNCFTSKGLMNRAHAYKAQVDKNQEDKKDTDYSVNMGLYSYPILMAADILFIETDLVPVGADQVQHLEITRDIASSLNHQYKKNLIKLPQALVQKNARIIPGLDGRKMSKSYENHIPIFLPPKKLRKMIMKITTDSLPPSAPKDPESSHLFSLYTHFSSQKEQEEMKERYKKGISWGEAKEELFKKIEKDLSLPRERYEELISHPKKIKKILDDSTEKVRPLAKKVLDKLKEEMGVSLEKTIK

SEQ ID NO: 187600 - protein, 209 aa, Unknown
  Bacterial polypetide isolated from the Sargasso Sea
LYVYPNLMAADILLYKATHVPVGDDQKQHLELARDIAQKFNNDFKNDNFFPIPEPLIQKKISRVMSLRDGKKKMSKSEESDYSRINLGDNEDEIKKKIKKAKTDSLPIPEKVEDLKNRPEALNLLTIYSSITDSTLEKTLKEMNGKDFSKFKDNLSDALIATICPIGKKIQDLRKDKSYLLKILKEGSNRARKISEHNLNKTKEIVGFI

SEQ ID NO: 187601 - protein, 178 aa, Unknown
  Bacterial polypetide isolated from the Sargasso Sea
MSKKIFSGVQPTGNLHLGNYLGAIKNFTKLQDDKSNKCIFCVVDLHSITVQQDPKLLKKNVRETAATFIACGIDPSKSIIFNQSSVPAHSEGAWILGCISRMGWLNRMTQFKEKAGKDKEKASIGLYVYPVLMASDILLYDTTHVPVGNDQKQHLELCRDIAQKFNNDFNQKDFLKIP

SEQ ID NO: 187602 - protein, 246 aa, Unknown
  Bacterial polypetide isolated from the Sargasso Sea
SHSEVSWILGCTARMGWLNRMTQFKEKAGKDKEKASIGLYIYPILMASDILLYDSTHVPVGEDQKQHLELSRDIAQKFNSDFNCPNFLKVPEPLIQKRFARIMSLKDGTKKMSKSDPSDLSRINLTDKKDEIINKIKKAKTDNSPLPADEKKINERPEVENLLGIYSSLSSQTLQDTINEFGGKNFSDFKKKLSDLVVEKISPISDEINKMKNDNTYIDKILKGGAEKAEKIASKKVKEIKKIVGF

SEQ ID NO: 187603 - protein, 247 aa, Unknown
  Bacterial polypetide isolated from the Sargasso Sea
MSKKIFSGVQPTGNLHLGNYLGAIKNFVDLNNDDQNECIFCVVDLHAITIKQDKDELKNNIRETAATFIASGIDPIRSIIFNQSKVYAHAEGSWILSCMAPMGWLNRMTQFKEKAGKDKEKASVGLYIYPILMASDILLYDATHVPVGEDQKQHLELTRDIAQKFNKDFDCEDFLKAPEPLIKKNFSRIMSLKDGLKKMSKSDPSDLSRINLTDTKDEIINKIKKAKTDSFPIPNEDQKLKDRPEAE

SEQ ID NO: 187604 - protein, 123 aa, Unknown
  Bacterial polypetide isolated from the Sargasso Sea
MSKDIVFSGVQPTGEIHLGNYLGAIKQFLSFQDESDSIYCIVDQHAITVFQDPHELRENVLNVLAIFLAAGLDPNKCIIFNQSSVKEHSILSWYLSCTARVGWLNRMTQFKDKAGKNRDNASL

SEQ ID NO: 187605 - protein, 263 aa, Unknown
  Bacterial polypetide isolated from the Sargasso Sea
SGIDPSKSIIFNQSKVHAHAEGSWMLSCMAPMGWLNRMTQFKEKAGKDKEKASVGLYIYPILMASDILLYDATHVPVGEDQKQHLELTRDIAQKFNKDFNCEDFLKVPEPLIKKKFSRIMSLKDGLKKMSKSDPSDLSRINLTDTKDEIINKIKKAKTDSLPIPNQEQKLKDRPEAENLLGIYSSILNKTLDETLNEFGGKNFSDLKGQLAEVLLSKISPISDEINKLINDQNYLDNVLSEGANKAEEIAGKKIKEMKKIIGF

SEQ ID NO: 187606 - protein, 206 aa, Unknown
  Bacterial polypetide isolated from the Sargasso Sea
MIDQDKKSSLKTFEKRVFSGVQPTGGLTLGNYLGAVKRFVEMQSKEYKTIYCVVDQHAITAWQDPTELKQNTRQIAAFFIAAGIDPNSSILFNQSAVAEHAQLAWVFNCVARMGWMQRMTQFKDKAGKNAQNAALGLFAYPALMAADILLYHATHVPVGDDQKQHLELTRDIAIKFNHDYDIDFFPVTEPVIGGTASRVMSLRDGQ

SEQ ID NO: 187607 - protein, 46 aa, Unknown
  Bacterial polypetide isolated from the Sargasso Sea
MNKELVFSGVQPTGNLHLGNYLGALKNFVSLQKSKNCLYCVVDLHA

SEQ ID NO: 187608 - protein, 231 aa, Unknown
  Bacterial polypetide isolated from the Sargasso Sea
GAWILSCVARMGWLNRMTQFKEKAGKDKEKASIGLYSYPVLMAADILLYDATHVPVGDDQKQHLELCRDIAQKFNNDFQLENFLQVPEPLIQKEFSRIMSLKDGSKKMSKSELSDLSRVNLTDDKDQIINKIKKAKTDPFPMPQDIKELDERLEAKNLLGIYSSLTNSSLENSVRNFAGKNFSEFKDKLAEELVNKIEPISNEIKKLLGDKSYLDEILLEGVEKADIIASK

SEQ ID NO: 187609 - protein, 196 aa, Unknown
  Bacterial polypetide isolated from the Sargasso Sea
MSRIFSGIQPTGDLQLGNYLGALKNWVMLQDKFESIYCVVDLHGITVWQTPDELTSNTREVTAGLIAAGLDPNKNIIFNQSRVSAHSELAWVFNCVARLGWLNRMTQFKEKAGKDRERASVGLYSYPTLMAADILLYKATHVPVGEDQKQHLELTRDIAQKFNNDFGVSLFPLPEPLILGEAPRVMSLRDGKKKMS

SEQ ID NO: 187610 - protein, 258 aa, Unknown
  Bacterial polypetide isolated from the Sargasso Sea
KKSIIFNQSSVAAHSEGAWILSCVARMGWLNRMTQFKEKAGKDKEKASIGLYSYPVLMAADILLYDATHVPVGDDQKQHLELCRDIAQKFNNDFGVEDFLKVPEPLIQKEFSRIMSLKDGSKKMSKSELSDLSRINLTDDKDQIINKIKKAKTDTLPMPKDIKELEGRLEAQNLLGIFASLSNSTLETSIEKFAGKNFSEFKQELSELLVNKIMPISDEIKKLLQDQSYLDSILLDGVEKANKIASKKIKNIKETVGF

SEQ ID NO: 187611 - protein, 81 aa, Unknown
  Bacterial polypetide isolated from the Sargasso Sea
MKKNFKEIVFSGVQPTGNLHLGNYLGAIKNFVELQKKMECIYCVVDLHAITVFQDPKELNRNILETTAKFIACGLDFKKSV

SEQ ID NO: 187612 - protein, 240 aa, Unknown
  Bacterial polypetide isolated from the Sargasso Sea
LFNCIARMGWLNRMTQFKDKAGKNSENVSVGLFSYPTLMAADILIYLATHVPVGDDQKQHLELTRDIAQKFNNDFKIDFFPIPEPLIFGEATRVMSLRDGSKKMSKSDPSDYSRIMLTDSADNIAQKIKKAKTDPQPLPSSKEDLKKRPEAENLISIFASLQDNSIENIILEYAGKEFSDFKKDLIDLSVSKLGPITTEMNKLMNDTSYIDSVLNDGKDKAINVAEPVLIKTKEIIGFLS

SEQ ID NO: 187613 - protein, 230 aa, Unknown
  Bacterial polypetide isolated from the Sargasso Sea
MISQFFSINPQVKEHAELAWILNCVCRIGWLNRMTQFKEKAGKNRENATVGLYGYPVLMAADILLYKSTHVPVGDDQKQHIELARDIASSFNNMFTSDEEDDFFNLPEPQIIGEATRVMSLRDGTKKMSKSDASDASRINLTDTAEEISNKIKKAKTDPHPLPDTIEELKDRPEAHNLMSIYSSLSDQTLEKALIEFSGKGFSYFKPRLIDLAIETLSPISREMRSLLKY

SEQ ID NO: 187614 - protein, 269 aa, Unknown
  Bacterial polypetide isolated from the Sargasso Sea
MHAITTFQEPKKLNENIFEVASILIASGININNSILFNQSRVAMHAELAWIFNCVAKIGWLNRMTQFKDKAGKNKEKASAGLYVYPNLMAADILAYKATHVPVGDDQKQHLELTRDIAASFNDSYSIDFFPIVEPLILGEATRVMNLRDGSKKMSKSDDSDFTRINLTDSKDEISAKIKKAKTDSLPVPESTFELSDRLEAKNLLGIFAALNDVSQEHIIKDYGGGPFSVLKDDLTECIIRKLTPVGEEIRKLLDNKDELDKILKEGAS

SEQ ID NO: 187615 - protein, 98 aa, Unknown
  Bacterial polypetide isolated from the Sargasso Sea
MGKKIFSGVQPTGNLHLGNYLGAIKNFVKLNNEDQNECVFCVVDLHAITVAQDPKKLKDNIYETVATFIASGIDPKKSIIFNQSRVSAHSETAWILSC

SEQ ID NO: 187616 - protein, 245 aa, Unknown
  Bacterial polypetide isolated from the Sargasso Sea
SYLGVLNCYAQMGELNRMTQFKDKSAKNENNINVGLYSYPVLQAADILLYQADKVPVGEDQKQHLELTRDIATRVNNLYGDVFRLPDPYIPDFGARIMSLQEPEKKMSKSDNNPNNFIGLLEDPKKLAKKIKRAVTDSDEQANIYFNPTEKPGVSNLLTLLSLATGKSIKELEPEYTDKMYGHLKGDVADAVVALLEPIQARYAEIRADRAYLDDVMRQGADKASARAAETLAKVYKAVGFIPKP

SEQ ID NO: 187617 - protein, 194 aa, Unknown
  Bacterial polypetide isolated from the Sargasso Sea
LATHVPVGDDQKQHLELTRDIAQKFNNDFKTDFFPIPEPLILGEATRVMSLRDGSKKMSKSDPSDYSRIMLTDTAENIIQKIKKAKTDPEPLPQDKTGLEKRPEAENLISIFASLQDTSIESVIKDYAGKEFSIFKKDLADLSVSKLEPITSEMNKLMSDVSYIDSILNQGKENAIAVAEPVLQKTKEIIGFLS

SEQ ID NO: 187618 - protein, 126 aa, Unknown
  Bacterial polypetide isolated from the Sargasso Sea
MGKKIFSGVQPTGNLHLGNYLGAIKNFVELNNDNENKCVFCVVDLHAITVKQEPRELKNNIRETVATFIASGIDHKKSIIFNQSKVPAHAEGAWILSCVARMGWLNRMTQFKEKAGKDKEKASIGL

SEQ ID NO: 187619 - protein, 239 aa, Unknown
  Bacterial polypetide isolated from the Sargasso Sea
MSKKIFSGVQPTGNLHLGNYLGAIKNFVELNNDEENECIFCVVDLHAITIKQDKDKLKNNIFETAATFIASGIDPSKSIIFNQSKVHAHAEGSWMLSCMAPMGWLNRMTQFKEKAGKDKEKASVGLYIYPILMASDILLYDATHVPVGEDQKQHLELTRDIAQKFNKDFDCEDFLKAPEPLIKKSFSRIMSLKDGLKKMSKSDPSDLSRINLSDTKDDIVIKIKKAKTDSFPIPSEENK

SEQ ID NO: 187620 - protein, 242 aa, Unknown
  Bacterial polypetide isolated from the Sargasso Sea
GCVVFELYGSMGWLNRMTQFKEKAGKDKEKASIGLYIYPILMASDILLYDTTHVPVGEDQKQHLELTRDLAQKFNKDFNCEDFLRVPEPLIKKHFSRIMSLKDGKKKMSKSDPSDFSRINLTDTKDEIVNKIKKAKTDSLPIPYEDQKLKDRPEAENLLGIYSSISDQNLDKSLEEFGGKNFSDLKNQLAEVLLSKISPISDEIKKLINDYEYLDKVLADGVNKAEEIAGKKIVEMKKIIGF

SEQ ID NO: 187621 - protein, 237 aa, Unknown
  Bacterial polypetide isolated from the Sargasso Sea
GCIARMGWLNRMTQFKEFAGKDKEKASVGLYIYPVLMTADILLYDASHVPVGEDQKQHLELSRDIAQKFNLDFNAPNFLRVPEPLIQKNFSRIMSLKDGTKKMSKSDPSDLSRINLTDSKDEIISKIRKAKTDTDPLPVDEKNLKQRPEVENLLGIYSSLSKQSLTDTIDDFRGKNFSNFKEKLADLAVEKILPISNEINKLKKNNDYIDSILKKGGEKANEIASRKILEIKKIIGF

SEQ ID NO: 187622 - protein, 242 aa, Unknown
  Bacterial polypetide isolated from the Sargasso Sea
MKKKIFSGVQPTGNLHLGNYLGAIKNFVDLNNDTQNECIFCVVDLHAITVSQNPKELKSNIFETVATFLASGIDPKNSIIFNQSRVSAHSEAAWVLSCVARMGWLNRMTQFKEKAGKDKEKASIGLYSYPVLMAADILLYDATHVPVGEDQKQHLELCRDIAQKFNNDFKVKDFLKIPEPLIKKEFSRIMSLKDGLKKMSKSEESDLSRINLTDDKDQIINKIKKAKTDTLPLPTRIEELEK

SEQ ID NO: 187623 - protein, 203 aa, Unknown
  Bacterial polypetide isolated from the Sargasso Sea
MITNSKQTVFSGVQPTGNLHLGNFLGAIKNFVELQKKMECIYCVVDLHAITVFQDPKELKKSMLETTATFIACGLDFKKSIIFNQSSVSEHAELAWILNCVSRIGWMNRMTQFKEKAGKNRENASVGLYVYPNLMAADILLYKATHVPVGDDQKQHLELVRDIAQKFNNDFKSENFFPIPEPLIQKKLSRVMSLRDGKNKMSK

SEQ ID NO: 187624 - protein, 154 aa, Unknown
  Bacterial polypetide isolated from the Sargasso Sea
AQLGWLFNCVARMGWLNRMTQFKDKAGKNSENVSVGLFSYPTLMAADILIYLATHVPVGDDQKQHLELTRDIAQKFNNDFKTDLFPIPEPLIFGEATRVMSLRDGSKKMSKSDPSDYSRIMLTDTAENIIQKIRKAKTDPEPLPENKTHLEKRP

SEQ ID NO: 187625 - protein, 252 aa, Unknown
  Bacterial polypetide isolated from the Sargasso Sea
NQSMVPSHSEGSWLLSCIARMGWLNRMTQFKEKAGKDKEKASVGLYIYPVLMAADILLYDTTHVPVGEDQKQHLELTRNIAQRFNGDFNSPNFLKIPEPLIHKDFSRIMSLKEGTQKMSKSDPSDQSRINLTDTKDQIVNKIRKAKTDSDPLPENINELKNRYELKNLLGIYSSLKNQNLDESINEFSGKNFSQLKEKLAELLVEKINPISNEINKLLKDQKHIDEILLEGSKKAEKISKKKVDEIKKKIGF

SEQ ID NO: 187626 - protein, 117 aa, Unknown
  Bacterial polypetide isolated from the Sargasso Sea
MPQKNIFSGVQPTGNLHLGNYIGAIKNFVKLQSENDSKCIYCVVDLHAITTKQDPQKLKDNILETTAVFLASGIDPSKSIIFNQSMVSAHSEGTWILSCIARMGWLNRMTQFKEKAG

SEQ ID NO: 187627 - protein, 208 aa, Unknown
  Bacterial polypetide isolated from the Sargasso Sea
YSYPILMASDILLYDSTHVPVGEDQKQHLELSRDIAQKFNNDFKADDFFKIPEPLIQKQFSRIMSLKDGSKKMSKSEPSDLSRINLTDSKDLIINKIKKAKTDPLPIPGNIDDLNKRLEVKNLISIYSSLTNSTLEKSINTYSGKNFSEFKEELSQLLVDKIVPISQEIKKLIKEKSFLDKILLEGAEKANEIASQKLKKIHQIIGFQ

SEQ ID NO: 187628 - protein, 193 aa, Unknown
  Bacterial polypetide isolated from the Sargasso Sea
MAIKKRILSGVQPTGDLHIGNWLGAINNWVTLQDKYETFLCVVDLHAITASYDPKELSKNTISTAALYVACGIDPKICSIFVQSQISAHSELCWILNCMTPINWMERMIQFKEKSIQQGNNVSIGLFDYPILMAADILLYDADFVPVGEDQKQHLELARDIAQQRINARFSKDKNIFKSSLTKYHEEWIKNNE

SEQ ID NO: 187629 - protein, 142 aa, Unknown
  Bacterial polypetide isolated from the Sargasso Sea
MKKNTVLSGVQPSGDLHIGNYLGAIKNFVDMQNDYNCFFCIVDLHAITVKQDPKILKTNTLEVAATYIASGIDPKTSTIFNQSSVSAHAELAWIINCVTRMGWLNRMTQFKDKAGADKENASSGLFTYPNLMAADILIYKAT

SEQ ID NO: 187630 - protein, 143 aa, Unknown
  Bacterial polypetide isolated from the Sargasso Sea
MSNKKRILSGVQPTGDLHIGNWLGAINNWVTLQEQYETFLCVVDLHAITASYNPKELSQNTISTAALYVACGIDPNICSIFVQSQISAHSELCWILNCMTPINWMERMIQFKEKSIQQGNNVSIGLFDYPILMAADILLYDAD

SEQ ID NO: 187631 - protein, 220 aa, Unknown
  Bacterial polypetide isolated from the Sargasso Sea
MKKKIFSGVQPTGNLHLGNYLGAIKNFVHLNNNVENECIFCVVDLHAITIHQDPIELRNNIRETVATFIASGIDPKKSIIFNQSKVSAHSEAAWILSCIARMGWLNRMTQFKEKAGKDKEKASVGLYSYPVLMAADILLYDSTHVPVGDDQKQHLELCRDIAQKFNNEFKVDNFFVPPEPLITKEFSRIMSLKDGNKKMSKSETSDLSRINLTDEKDQIV

SEQ ID NO: 187632 - protein, 221 aa, Unknown
  Bacterial polypetide isolated from the Sargasso Sea
MKKPRVLTGITTTGTPHLGNFVGAIRPAIEASNDPGVESFLFLADYHSLIKCQKPDLVMQSSKEVAAAWLSLGLDPSRTIFYRQSDIPEITELTWILTCCAAKGLMNRAHAYKAAVSANEEAGEDADFGITMGLFSYPILMAADILVFSGERIPVGKDQIQHVEMARDIAQRFNHNFSEILTIPEAVVGEEGSVLTGLDGRKMSKSYNNIIPLFCSEKQLK

SEQ ID NO: 187633 - protein, 255 aa, Unknown
  Bacterial polypetide isolated from the Sargasso Sea
IIFNQSKVAAHSEGAWILSCVARMGWLNRMTQFKEKAGKDKEKASLGLYSYPVLMAADILLYDSTHVPVGDDQKQHLELCRDIAQKFNNDFNLNNFFVLPEPLIQKQFSRIMSLKDGTKKMSKSEISDLSRINLTDDKDEMINKIKKAKTDPLPMPNTVGELEKRPEAKNLIGIYSSLTDTSLDQIVNDFSGKNFSEFKDNLSQALVEKIVPISMEIKKLLNDKKYLEEVLSEGSTKANNIASQKIKKIQEILGF

SEQ ID NO: 187634 - protein, 266 aa, Unknown
  Bacterial polypetide isolated from the Sargasso Sea
MEKNRILSGIQPTGNLHLGNYLGAIKNFVSLQNKFDCLYMLADYHAITTNYNQAEIKNHIFETTAAFLASGLDNEKNIIFRQSRVSAHLELAWILNCVARLGWLNRMTQFKEKAGDNKEKASIGLYTYPVLMTADILIYGATHVPVGEDQKQHLELCRDIAQKFNNDFKVKNFFKLPEPIIPSNVSRIMSLRDGTKKMSKSDPSDSSRINLKDSNDQITQKIRKAKTDNEPITLNILDENSKRFEAKNLISIYASLQDKNVKEIIK

SEQ ID NO: 187635 - protein, 210 aa, Unknown
  Bacterial polypetide isolated from the Sargasso Sea
IGLYSYPVLMAADILLYDTTHVPVGDDQKQHLELCRDIAQKFNNDYKIDNFFIVPEPLIKKEFSRIMSLKDGLKKMSKSEVSDLSRINLTDDRDEIINKIKKAKTDTLPLPSSIEELEKRPEAKNLIGIYSSLSNNTLQKSIDEFAGKNFSEFKEKLSDIVVNKINPISLRIKELLNDKVFLEKILKDGSEKANEIASKKIKKIQEIVGF

SEQ ID NO: 187636 - protein, 165 aa, Unknown
  Bacterial polypetide isolated from the Sargasso Sea
MTKKIFSGVQPTGNLHLGNYLGAIKNFVELNNDKENECIFCVVDLHAITIKQNPKELRNNIRETVATFVASGINPEKSIIFNQSKVSAHTEAAWLLSCVAKMGWLNRMTQFKEKAGKDKEKASIGLYSYPILMAADILLYDASHVPVGEDQKQHIELCRDIAQKF

SEQ ID NO: 187637 - protein, 76 aa, Unknown
  Bacterial polypetide isolated from the Sargasso Sea
MSKKIFSGVQPTGNLHLGNYLGAIKNFVNLQKEKENICIYCVVDLHAITVKQDPEILKKNIRETTAAFLASGLDPK

SEQ ID NO: 187638 - protein, 263 aa, Unknown
  Bacterial polypetide isolated from the Sargasso Sea
DCIYCIVDLHAITVKQDPKELRKSIRETLAAFIASGLDSKKSIIFNQSSVSAHSEGAWILSCIARMGWLNRMTQFKEKAGKDKEKASIGLYAYPVLMAADILLYDTTHVPVGDDQKQHLELCRDIAQRFNNDFGISNFLKVPEPLIQKNFSRIMSLKDGTKKMSKSDPSDFSRINLMDDKDKIINKIKKAKTDILPMPNENEELKNRPEVLNLLGIFSSLSSQTIEKSINEFSGKNFSIFKEKLTNLLIEKIEPISKEINKLL

SEQ ID NO: 187639 - protein, 161 aa, Unknown
  Bacterial polypetide isolated from the Sargasso Sea
MAKKIFSGVQPTGNLHLGNYIGAIKNFVDLQNEKNNQCIFCVVDLHAITVKQNPKELKDNIRETTAAFLASGIEPKKSIIFNQSLVPAHSEGSWILGCVARMGWLNRMTQFKEKAGKDKEKASIGLYIYPVLMAADILLYDASHVPVGEDQKQHLELSRDI

SEQ ID NO: 187640 - protein, 165 aa, Unknown
  Bacterial polypetide isolated from the Sargasso Sea
MGKKIFSGVQPTGNLHLGNYIGAIKNFVDLQNQDGNKCVYCVVDLHAITVKQNPITLKKNIRETTAAFLASGIDPKKSIIFNQSMVSAHADASWILGCVAKMGWLNRMTQFKEKAGKDKEKASIGLYIYPILMAADILLYDATHVPVGEDQKQHLELSRDIAQKI

SEQ ID NO: 187641 - protein, 228 aa, Unknown
  Bacterial polypetide isolated from the Sargasso Sea
MSKKKLVFSGVQPTGNLHLGNYLGALKNFVSLQKNAECIYCVVDLHAITVFQDPSHLHDNVLETTASFLATGLDPDKSIIFNQSSVSGHAELAWILNCVSRVGWLNRMTQFKDKAGSDKEKASVGLYIYPNLMAADILLYKATHVPVGADQKQHLELSRDIAQKFNNDFNCKDFFPLPEPLIPKNISRIMSLRDGTKKMSKSEESDYFRINLKDTADEFIKKIKKAKS

SEQ ID NO: 187642 - protein, 322 aa, Unknown
  Bacterial polypetide isolated from the Sargasso Sea
KIKWEKPTKRILSGVQPSGDLHLGNYLGAIKNFVSLQKEYECFFCVVDLHAITVWQDPKVLSHKTREVTAAFIAAGIDPKKNNIFVQSQVPQHAQLAWLFNCVARMGWLNRMTQFKDKAGKNSENVSVGLFSYPTLMAADILIYLATHVPVGDDQKQHLELTRDIAQKFNNDFQTDLFPIPEPLIFGEAKRVMSLRDGSKKMSKSDPSDYSRIMLTDTAENIKQKIKKAKTDPYPLPESSSDLESRPEAQNLVSIFAALKDESVQNIINEYVGKEFSIFKRDLADLAVSKLEPITTEMNKMMNDISYIDSILKRVEIMLFQF

SEQ ID NO: 187643 - protein, 161 aa, Unknown
  Bacterial polypetide isolated from the Sargasso Sea
MHKQRVFSGVQPTGNLHLGNYLGAIKNFVNLQKNFECIYCIVDLHAITNRQDPKLLKLNILETIATFIASGLKPEKNIIFNQASVAAHSELAWIFNCVARIGWMNRMTQFKEKAGNNKENASVGLLVYPNLMAADILLYKATHVPVGEDQKQHLELTRDIA

SEQ ID NO: 187644 - protein, 207 aa, Unknown
  Bacterial polypetide isolated from the Sargasso Sea
MVTGLTATGDLHLGSYLGTMKQWERYSKDHDCYFFIADMHAITIPQDPKLMRKRSLDMAALFMSSGVCLESSVLFNQSQVPQHAELCWVLSCISAMGELQRMTQYKEKSANQKQKETLGLFAYPCLMAADILLYNPQYVPVGEDQKQHLELARNIAQRFNHQFKEEVFSVPDPVIPKVAARVMALGDPEKKMSKSDVSVNNTVYLLD

SEQ ID NO: 187645 - protein, 255 aa, Unknown
  Bacterial polypetide isolated from the Sargasso Sea
IFNQSSVSGHAELAWILNCICRVGWLNRMTQFKDKAGKDKEKASVGLYIYPNLMAADILLYKATHVPVGADQKQHLELSRDIAQKFNNDFNKKDFFPLPEPLIQKNISRVMSLRDGTKKMSKSEESDYSRINLKDSSDEIVKKIKKAKTDTDPITENIKDYENRPEAYNLLSIYSDLSDQKIETTINEFIGKDFSSLKTKLSEKLVETISPIGKNIEKLMRDRKHLEDVLKKGKQKANIIAEENLKKIREIVGFV

SEQ ID NO: 187646 - protein, 228 aa, Unknown
  Bacterial polypetide isolated from the Sargasso Sea
NRMTQFKEKAGKDKKNVSVGLYIYPVLMASDILLYDSTHVPVGEDQKQHLELSRDIAQKFNLDFNAPDFFNVPEPLIQKNFARIMSLKDGTKKMSKSDPSELSRINLTDSPDQIINKIKKAKTDTQPLPGNEKELSKRPEAENLLGIYSSLKDQNLENSINEFSGKNFSDFKKKLTEIVIDKITPISKEINKLKKDNNFIDNVLQEGGEKAQVVASKKVKEMKKIIGF

SEQ ID NO: 187647 - protein, 65 aa, Unknown
  Bacterial polypetide isolated from the Sargasso Sea
MGKKIFSGVQPTGNLHLGNYLGAIKNFVDLNNDKENKCIFCVVDLHAITVKQDPKELKNNIRETV

SEQ ID NO: 187648 - protein, 322 aa, Unknown
  Bacterial polypetide isolated from the Sargasso Sea
MRVLSGIHPSGTLHLGNYFGMMNRMVRYQSENDLFCFIANYHAQTTIPTAQTLSENTFNATCDFLALGIDPEISTFWVQSDVPQVTELMWILSSLTSVGSLDRATSYKDKIAQGIKPNAGLYSYPILMAADILLFDAELVPVGRDQKQHLEMTRDIAIRFNNSFGQTLIIPEPDIEKETQLIPGVDGKKMSKSYDNTIPLFDSEKIIRKKIMAIITDTADIDEPKDKDTPLFQLYSLFLDKKDQSKLSARYDGKGLRYGDVKIELFQKVMDHFQPFREKRASLISRPKEVRDILRLGAKKANIIAEEVLDRVKSSVGMIYIK

SEQ ID NO: 187649 - protein, 257 aa, Unknown
  Bacterial polypetide isolated from the Sargasso Sea
NSIIFNQSLVPAHSEGSWILGCIARMGWLNRMTQFKEKAGKDKEKASVGLYIYPILMASDILLYDATHVPVGNDQKQHLELCRDIAQKFNYEYKCPNFLRPPEPLIQKNFSRIMSLKDGTKKMSKSDTSEGSRINLTDTDDQIINKIKKAKTDNDTLPGNETGFKGRPEAENLMGIYSSLRNQNITDTLNEFEGKNFSDLKNKLSEIIVTKLSPISKEIQKLLLDKNYIDQILEDGAAKAEDISSKKVKKIKEIVGF

SEQ ID NO: 187650 - protein, 81 aa, Unknown
  Bacterial polypetide isolated from the Sargasso Sea
MGKKIFSGVQPTGNLHLGNYLGAIKNFVDLNNNKDNKCIFCVVDLHAITVKQNPKELKNNIRETVATFVASGIDPKKSIIF

SEQ ID NO: 187651 - protein, 245 aa, Unknown
  Bacterial polypetide isolated from the Sargasso Sea
SRMEIAATWLAGGLDVNRVTFYRQSDIPEIPELTWLLTCVAAKGLLNRAHAYKASVDKNVENGEDPDAGISMGLYSYPVLMAADILMFNAHKVPVGRDQIQHVEMARDIGQRFNHLFGNGKEFFTMPEALIEENVATLPGLDGRKMSKSYDNTIPLFTSAKDMKDAISRIVTDSRAPGEAKDPDNSHLFTLYQAFATKAQEAQFRGELLEGLGWGEAKNRLFQLLDGQLGEARERYHQLMERPSD

SEQ ID NO: 187652 - protein, 227 aa, Unknown
  Bacterial polypetide isolated from the Sargasso Sea
KEKAGHDKENATSGLFSYPTLMAADILLYKATHVPVGNDQKQHLELTRDIAQKFNNEFKAKDFFPLPEPFIDKDISRIMSLRNGLEKMSKSDESDYSRVSLKDDEESIRKKIKKAKTADVVMPDSERDVNDLPEVNNLLNIYSGITKRSKKELVNIYRGKNFSEFKENLSESLIEVISPIKSEISRLMDDKNYLDSIIKEGSEKANERAIKTLSEVYDIIGFIKNET

SEQ ID NO: 187653 - protein, 223 aa, Unknown
  Bacterial polypetide isolated from the Sargasso Sea
FKEKAGKDKEKASVGLYIYPVLMAADILLYDATHVPVGEDQKQHLELARDISKKFNTDFDTPDFFKIPEPLIQKNFARIMSLKDGKKKMSKSDPSELSRINLTDTDQEIINKIKKAKTDTSPFPININNLKSRPEIENLIGIYSSLSGKKIDLLFDEFKDKNFSFFKEKLSEVIVEKISPISKEIKKLNQDPSYIDQVLRDGSEKAYKLSSKKLQDIKKKFGF

SEQ ID NO: 187654 - protein, 270 aa, Unknown
  Bacterial polypetide isolated from the Sargasso Sea
TTAAFLASGLDHKKSIIFNQSLVPAHSEGSWILGCIARMGWLNRMTQFKEKAGKDKEKASIGLYIYPVLMAADILLYDSTHVPVGEDQKQHLELSRDIAQKFNLDFNIPNFFKTPDPLIQKNFARIMSLKDGTKKMSKSDPSDLSRINLTDNKDEIINKIKKAKTDTEPLPDNEKDLFKRPEAENLLGIYSSLKNQVLQKSINEFGGKNFSEFKKNLSDLVVEKISPISNEINKLKKNNDFIDDVLRDGAAKADVISSKKVEEMKKIIGF

SEQ ID NO: 187655 - protein, 146 aa, Unknown
  Bacterial polypetide isolated from the Sargasso Sea
MKRIFSGIQPSGSLQLGNYLGAIRNWAKMQNDYECIFCVVDLHAITLPQDPLAMRAATREVAAGVIAGGVNPETCIIFNQSQVPEHAELAWLFNCVARLGWLNRMTQFKEKAGKDRDGAFVGLYTYPVLQAADILAYKASDVPVGE

SEQ ID NO: 187656 - protein, 254 aa, Unknown
  Bacterial polypetide isolated from the Sargasso Sea
ASVSAHSELAWIFNCVARIGWMNRMTQFKEKAGINKENASVGLMVYPNLMAADILLYKATHVPVGEDQKQHLELTRDIAKKFNNDFNCGEYFPIVEPLIPKEVSRVMSLRDGKKKMSKSEESDQSRINLKDDKDLIDQKIKKAKTDSSSIPSEAEGLKNRPEAANLISIYASMNNMKINDVLKEFGGKNFSTFKSKLSESVIEKISPIGKEINKLLSDKKNLHKILEKGSKKADLIAKNNLREIYNIVGLTKFS

SEQ ID NO: 187657 - protein, 221 aa, Unknown
  Bacterial polypetide isolated from the Sargasso Sea
MDSKLVFSGVQPTGNLHLGNYLGAVKRFVELQDADTMCIYCLVDLHAITNWQDPKELRRNTIEVTAAFLACGLRQENSIIFNQSQVSTHTELAWIFNCVARIGWLNRMTQFKEKAGKNRENASLGLYCYPTLMAADILAYHATHVPVGEDQKQHLELTRDIAMKFNNDFKTPGFFPIPEPIIEGTATRIMSLRDGTKKMSKSEASEMSRINLTDDSDSIRK

SEQ ID NO: 187658 - protein, 172 aa, Unknown
  Bacterial polypetide isolated from the Sargasso Sea
MSKKKLVFSGVQPTGNLHIGNYLGALKNFVSLQKEMDCIYCVVDLHALTTFQNPSNLRKNVYETVASFIATGLNPDKSIIFNQSSVSGHTELAWILNCVSRIGWLNRMTQFKDKAGSDKEKASVGLYIYPNLMAADILLYKATHVPVGADQKQHLELTRDIAQKFNNDFNCK

SEQ ID NO: 187659 - protein, 79 aa, Unknown
  Bacterial polypetide isolated from the Sargasso Sea
MTKKIFSGVQPTGNLHLGNYLGAIKNFVNLQKEKDNNCIYCVVDLHAITVRQDPKILKKNIRETTAVFLASGLDPSKSI

SEQ ID NO: 187660 - protein, 269 aa, Unknown
  Bacterial polypetide isolated from the Sargasso Sea
IASGLDPEKNIIFNQASVSAHSELAWIFNCVARIGWMNRMTQFKEKAGSNKENASVGLMVYPNLMAADILIYKATHVPVGEDQKQHLELTRDIAKKFNNDFKCGEYFPIVEPLIPKEISRVMSLRDGKKKMSKSEDSDQSRINLKDDKDLIDQKIKKAKTDNDPIPSEINGLKDRYEATNLISIYASINNMKIDKVLKEFGGKNFSTFKSKLSESIIEKICPIGKQIEKLMDDEKYLHNVLEKGSKKADILAKNNLKEIYDIIGLTKFS

SEQ ID NO: 187661 - protein, 61 aa, Unknown
  Bacterial polypetide isolated from the Sargasso Sea
MHKKRVFSGVQPTGNLHLGNYLGAIKNFVDLQNKFECIYCIVDLHAITNLQKPQKLKANIL

SEQ ID NO: 187662 - protein, 51 aa, Unknown
  Bacterial polypetide isolated from the Sargasso Sea
MSKKIFSGVQPTGNLHLGNYLGAIKNFVDLNNDIQNECIFCVVDLHAITIK

SEQ ID NO: 187663 - protein, 182 aa, Unknown
  Bacterial polypetide isolated from the Sargasso Sea
MERVFSGAQPTGNLHLGNYLGAIRNWVELQKKYECIFCVVDMHAITVWQDPKELRSNIRELAASMIASGVDPENQVLFNQSQVSAHAELAWIFNCVARIGWMNRMTQFKEKAGKHRENASLGLYAYPSLMAADILAYKATHVPVGEDQKQHLELARDIALKFNTDYGVEGFFPQPEPLILGP

SEQ ID NO: 187664 - protein, 156 aa, Unknown
  Bacterial polypetide isolated from the Sargasso Sea
MNTDKKLVFSGVQPTGNLHLGNYLGAIKNFVLLQKKMNCIFCVVDLHAITVFQEPKELKKNILETTAGFLASGLDEKKNVIFCQSSVSGHSELAWILSCTARLGWLNRMTQFKDKAGSDKEKASVGLYIYPNLMAADILLYRATHVPVGADQKQHL

SEQ ID NO: 187665 - protein, 311 aa, Unknown
  Bacterial polypetide isolated from the Sargasso Sea
SIKHMSKKIFSGVQPTGNLHLGNYIGAIKNFVNLQNDIKNTCIYCVVDLHAITVKQDPIELKKNIRETAATFIASGLDYKKSIIFNQSLVPAHSEGSWILSCVARMGWMNRMTQFKEKAGKDKEKASVGLYIYPILMAADILLYDATHVPVGEDQKQHLELSRDIANKFNLDFNAPDFLVAPEPLIQKTFARIMSLKDGTKKMSKSDPSELSRINLNDSADQISNKIKKAKTDPEPLPDNINGLSKRPEAENLLGIYSCLIDQPLSKTIDEFSGKKFSEFKEKLASLVVDKISPISFEINKLLKDEKFIDQ

SEQ ID NO: 187666 - protein, 269 aa, Unknown
  Bacterial polypetide isolated from the Sargasso Sea
AAAFIASGLDFKKSIIFNQSLVPAHAESSWILSCVARMGWLNRMTQFKEKAGNDKEKTSVGLYIYPILMAADILLYDSTHVPVGEDQKQHLELSRDIANKFNLDFNAPNFLVAPEPLIQKNFARIMSLKDGIKKMSKSDPSELSRINLNDSSDQILNKIKKAKTDTEPLPENENGLSNRPEAKNLLGIYSSLSDQPLSKTINEFSGKNFSEFKEKLTNLVVDKISPISKEINKLLKDENFIDKVLKDGAEKANEIASKKIKNIKKIIGF

SEQ ID NO: 187667 - protein, 228 aa, Unknown
  Bacterial polypetide isolated from the Sargasso Sea
FQDPKELNNSTLETIAGFIACGLDFKKSIIFNQSSVSEHAELAWIFNCVSRLGWLNRMTQFKEKAGTNKENASVGLYVYPNLMAADILLYKATHVPVGDDQKQHLELCRDIANKFNNDFGSSDFFPIPEPLIHKNFSRVMSLRDGKKKMSKSEESDYSRINLQDSEDEIEKKIKKAKTDSSAIPSDKKDLEKRPEALNLLNIYSSLTNSTLEKTLKEMEGKDFSQFKK

SEQ ID NO: 187668 - protein, 243 aa, Unknown
  Bacterial polypetide isolated from the Sargasso Sea
LAWLFNCVARMGWLNRMTQFKDKAGKNSENVSVGLFSYPTLMAADILIYLATHVPVGDDQKQHLELTRDIAQKFNNDFETDLFPIPEPLIFGEATRVMSLRDGSKKMSKSDPSDYSRIMLTDTAENIVQKIKKAKTDPKPLPVNKIGLEKRPEAENLISIFASMQDTSIESVINEYSGKEFSVFKKDLADLSVSKLEPITSEMNRLMNDIPYIDNVLKTGKENAISVAEPVLEKTKEIIGFLL

SEQ ID NO: 187669 - protein, 204 aa, Unknown
  Bacterial polypetide isolated from the Sargasso Sea
MVKKNLVFSGVQPTGNLHLGNYLGALKNFVSLQKEMECIYCVVDLHAITIFQNPIDLKNNVLETVASFLATGLDPNKSIIFNQSSVSGHAELAWIFNCVSRIGWLNRMTQFKDKAGSDKEKASVGLYVYPNLMAADILLYKATHVPVGADQKQHLELSRDIAQKFNNDFNCKDFFPLPEPLIPKNISRVMSLRDGTKKMSKSEE

SEQ ID NO: 187670 - protein, 106 aa, Unknown
  Bacterial polypetide isolated from the Sargasso Sea
MNKNFKELVFSGVQPTGNLHLGNYLGAMKNFVALQKKMECIYCVVDLHAITVFQEPKDLRKNILETTAGFVACGLDFKKSIIFNQSSVSGHAELAWIFIVYPELDG

SEQ ID NO: 187671 - protein, 129 aa, Unknown
  Bacterial polypetide isolated from the Sargasso Sea
MDRIFSGVQPTGNLHLGNYLGAIRNFVGLQSDYECIYCVVDLHAITVWQDPKELVSNTREVTAAFLASGIDPEGSIIFNQSQVSAHAQLAWIFNCVARLGWLNRMTQFKEKAGKHRENASVGLYAYPNL

SEQ ID NO: 187672 - protein, 268 aa, Unknown
  Bacterial polypetide isolated from the Sargasso Sea
MGAIKNFVKLNNEDQNECVFCVVDLHAITVAQDPKKLKDNIYETVATFIASGIDPEKSIIFNQSKVSAHSETAWILSCVARMGWLNRMTQFKEKAGKDKEKASIGLYSYPVLMAADILLYDTTHVPVGDDQKQHLELCRDIAQKFNNDFNADDFFKIPEPLIQKEFSRIMSLRDGTKKMSKSELSDLSRINLTDDKDQIINKIKKAKTDTLPLPSTSADLEKRPEAKNLMGIYSSLMDVSSEDTINKFSGKNFSEFKEILSQVMVDKI

SEQ ID NO: 187673 - protein, 254 aa, Unknown
  Bacterial polypetide isolated from the Sargasso Sea
MSKKIFSGVQPTGNLHLGNYLGAIKNFVELNNDKKNKCIFCVVDLHAITVKQDKDQLKNNIRETAATFIASGIDPNESIIFNQSKVHAHAEGAWMLSCMAPMGWLNRMTQFKEKAGKDKEKASVGLYIYPILMASDILLYDATHVPVGEDQKQHLELTRDIAQKFNKDFNCKDFLKVPEPLIKKNFSRIMSLKDGLKKMSKSDPSDLSRINLTDSEDEIINKIKKAKTDSHPIPNEVQKLKDRPEAENLLGIYS

SEQ ID NO: 187674 - protein, 280 aa, Unknown
  Bacterial polypetide isolated from the Sargasso Sea
SFLFIANMHSLTQIKNAEELRQNTYEIAAAWLACGLDTEKTYFYRQSDIPEVCELSWYLSCFFPFSRLQLAHSFKDKADRLEDVNAGLFTYPMLMAADILLYDAEIVPVGKDQLQHLEMARDVGARFNNQMGEIFVLPQAELQENTKYVPGIDGHKMSKSRGNIINIFLPEKQLKKQVMAIETDSTPLEEPKNPDTCKVFAIYSLLANETQIAEMRAKYLAGNYGYGHAKTELLNLILENFKTEREKFEYYMNNLSELDAKLQEGAEKTRKIAAETLKRV

SEQ ID NO: 187675 - protein, 127 aa, Unknown
  Bacterial polypetide isolated from the Sargasso Sea
MSKKIFSGVQPTGNLHLGNYLGAIKNFVELNNDINNKCIFCVVDLHAITVKQDKDQLKNNIFETAATFIASGINPNKSIIFNQSTVHAHAEGSWLLSCIDPMGWLNRMTQFKEKAGKDKEKASVGLY

SEQ ID NO: 187676 - protein, 282 aa, Unknown
  Bacterial polypetide isolated from the Sargasso Sea
KPEELRNNVLETVASFLATGLDSEKSIIFNQSAVSGHAELAWILNCVSRMGWLNRMTQFKDKAGADKEKASVGLYIYPNLMAADILLYKATHVPVGADQKQHLELSRDIAQKFNNDFDCKDFFPLPEALIPKNVSRVMSLRDGTKKMSKSEESDYSRINLKDTADQINKKIKKAKSDSEQIPDNLKSLEKKPEALNLINIYSEVSRNSIDKVLIEMSGKEYSYLKTKLAEVLVETITPVGNEIKKLLGDRSHLEQILKKGKQKANIIAEENLKNIREKVGLI

SEQ ID NO: 187677 - protein, 131 aa, Unknown
  Bacterial polypetide isolated from the Sargasso Sea
MKKKIFSGVQPTGNLHLGNYLGAIKNFVDLNNDTQNECIFCVVDLHAITVSQNPKDLKSNIHETVATFVASGIDPKKSIIFNQSRVSAHSESAWILSCVAKMGWLNRMTQFKEKAGKDKEKASIGLYSYPV

SEQ ID NO: 187678 - protein, 230 aa, Unknown
  Bacterial polypetide isolated from the Sargasso Sea
MSKKIFSGVQPSGNLHLGNYLGAIKNFVNLQKEKENNCIYCVVDLHAVTVKQNPEILKRNIRETTAVFLASGIDPTKSIIFNQSMVPSHSEGAWLLGCVARMGWLNRMTQFKEKAGKDKEKASVGLYIYPILMAADILLYDSTHVPVGEDQKQHLELTRDIANKFNLDFKCENFLTVPEPLIQKNFSRIMSLKDGTKKMSKSDLSDQSRINLTDDKDQIINKIRKAKTDS

SEQ ID NO: 187679 - protein, 98 aa, Unknown
  Bacterial polypetide isolated from the Sargasso Sea
MAKKIFSGVQPTGNLHLGNYLGAIKNFVELQNEEENNCIYCVVDLHAITLKQDPKKLKNNIRETAATFIASGLNPNKSILFNQSLVPAHSEGSWILSC

SEQ ID NO: 187680 - protein, 249 aa, Unknown
  Bacterial polypetide isolated from the Sargasso Sea
MQKDMECIYCVVDLHAITVFQKPQSLHDNVLETTASFLASGLNPNKSIIFNQSSVSGHAELAWILNCVSRIGWMNRMTQFKDKAGSDKEKASVGLYIYPNLMAADILLYKATHVPVGADQKQHLELSRDIAQKFNNDYNCKNFFPLPEPLISKNIPRVMSLRDGTKKMSKSEESDYSRINLTDSADEISKKIKKAKSDSEAIPSNKKLLENKPEALNLLSIYSELTKKSLDKIISEMAGKEYSILKKNL

SEQ ID NO: 187681 - protein, 110 aa, Unknown
  Bacterial polypetide isolated from the Sargasso Sea
MKKIIFSGVQPTGNLHLGNYLGAIKNFVKLNKDVNNNCIFCVVDLHAITTKQNPKELKENILETIATFIACGIDPKKSILFNQSQVPAHSETAWILSCVARMGWLNRMTQ

SEQ ID NO: 187682 - protein, 281 aa, Unknown
  Bacterial polypetide isolated from the Sargasso Sea
DPKVLADKTREVTAAFIASGINPKKNNIFVQSQVPQHAQLAWLFNCVARMGWLNRMTQFKDKAGKNSENVSVGLFSYPTLMAADILIYLATHVPVGDDQKQHLELTRDIAQKFNNDFETDLFPIPEPLIFGEATRVMSLRDGSKKMSKSDPSEYSRIMLTDTADNIIQKIKKAKTDPQPLPTNSHDLKTRPEAQNLISIFASLENNSIDDVIKEYAGKEFSVFKKDLADLAVSKLEPITSEMNKIMSEVSYIDAVLREGREKAISVAEPVLNKTKEIIGFL

SEQ ID NO: 187683 - protein, 261 aa, Unknown
  Bacterial polypetide isolated from the Sargasso Sea
LHAITTKQNPKILKDNIRETTAAFLASGIDPNKSIIFNQSLVPAHSEGSWILGCVARMGWLNRMTQFKEKAGKDKEKASVGLYIYPVLMTADILLYDATHVPVGEDQKQHLELSRDIAQKFNLDFNAPNFLRAPEPLIQKNFSRIMSLKNGVNKMSKSDPSDLSRINLTDSKDQIINKIKKAKTDNDPLPDNEKNLNKRPEVENLLGIYSSLNNQSLKNSINEFSGKNFSMFKEKLSDLVVEKISPISVEINKLQKDNNYM

SEQ ID NO: 187684 - protein, 137 aa, Unknown
  Bacterial polypetide isolated from the Sargasso Sea
MGKKIFSGVQPTGNLHLGNYLGAIKNFVELNNDNENKCVFCVVDLHAITVKQEPRELKNNIRETVATFIASGIDHKKSIIFNQSKVPAHAEGAWILSCIARMGWLNRMTQFKEKAGKDKEKASIGLYSYPILMAADI

SEQ ID NO: 187685 - protein, 224 aa, Unknown
  Bacterial polypetide isolated from the Sargasso Sea
FLKRKLGKDKERASIGLYSYPVLMAADILLYDATHVPVGDDQKQHLELCRDIAQKFNNDFEVENFLQVPEPLIQKEFSRIMSLKDGSKKMSKSELSDLSRINLTDNKDQIINKIKKAKTDPLPMPQHIKEIDERLEAKNLLGIYSSLTNSTLENSVKNFAGKNFSEFKEQLIEELVNKVEPISKEIRKLLEDKKFLDKILLDGVEKANMIASKKIERIKEIVGF

SEQ ID NO: 187686 - protein, 257 aa, Unknown
  Bacterial polypetide isolated from the Sargasso Sea
KSIIFNQSGVAAHSEGAWILSCVARMGWLNRMTQFKEKAGKDKEKASIGLYSYPVLMAADILLYDATHVPVGDDQKQHLELCRDIAQKFNNDFGVEDFLKVPEPLIQKEFSRIMSLKDGSKKMSKSELSDLSRINLTDDKDQIINKIKKAKTDTLPMPKDIKELEGRLEAQNLLGIFASLSNSTLETSIEKFAGKNFSEFKQDLSELLVNKIMPISDEIKKLLQDQSYLDSILLDGVEKANKIASKKIKNIKETVGF

SEQ ID NO: 187687 - protein, 155 aa, Unknown
  Bacterial polypetide isolated from the Sargasso Sea
MNNNETNIVLSGVQPSGGLHIGNYLGAIQNFVKMQKEYNCFFCVVDLHAITVKQNPIDLKNNTLEVVATYIASGIDPHKSIIFNQSGISAHAELAWIFNCVTRMGWLNRMTQFKDKAGKDKENASSGLFIYPNLMAADILLYKATHVPVGNDQKQ

SEQ ID NO: 187688 - protein, 183 aa, Unknown
  Bacterial polypetide isolated from the Sargasso Sea
MHNKRVFSGVQPTGNLHLGNYLGAIKNFVELQNKFECIYCIVDLHAITNRQDPKELKSNILETVASFVASGLNPEKNIIFNQASVSAHSELAWIFNCVARIGWMNRMTQFKEKAGVNKENASVGLLVYPNLMAADILLYKATHVPVGEDQKQHLELTRDIAKKFNNDFNCKDYFPIVEPLIPK

SEQ ID NO: 187689 - protein, 198 aa, Unknown
  Bacterial polypetide isolated from the Sargasso Sea
PILMAADILIFNAHQVPVGRDQIQHVEMARDIAQRFNHHYGETFTLPEAVVDDHVAVLQGLDGRKMSKSYGNTIPLFGTSKQLQKAINKIKTNLLEPGEPKDLDDSTVFQVWCAFANEAEREHMRQAFADGIAWGEAKKQLFERVNDELAPAREIYDRLMVNPEEVEAILTQGAERLRPQSAALLEKVRHAVGLRAYR

SEQ ID NO: 187690 - protein, 247 aa, Unknown
  Bacterial polypetide isolated from the Sargasso Sea
MSKKIFSGVQPTGNLHLGNYIGAIKNFVDLQNNKDNSCIFCVVDLHAITVMQDPIELKNNIRETAAAFIASGIDPKKSIIFNQSLVPAHSEGSWILGCVARMGWLNRMTQFKEKAGKDKEKASVGLYIYPILMASDILLYDATHVPVGDDQKQHLELCRDIAQKFNNEYKCPNFLRPPEPLIQKNFSRIMSLKDGTKKMSKSDIAEGSRINLTDTEDLIINKIKKAKTDNNALPGNEDGLNGRPEAE

SEQ ID NO: 187691 - protein, 199 aa, Unknown
  Bacterial polypetide isolated from the Sargasso Sea
MGVKKIFSGVQPTGNLHLGNYIGAIKNFVDLQNENNDCIFCVVDLHAVTVKQDPKILKQNVRETAATFLACGINPKKSIIFNQSSVSAHSELSWLLSCVARMGWLNRMTQFKEKAGKDKEKASVGLYIYPVLMAADILLYDATHVPVGEDQKQHLELARDISKKFNTDFDAPEFFKIPEPLIQKNFARIMSLKDGKKKM

SEQ ID NO: 187692 - protein, 51 aa, Unknown
  Bacterial polypetide isolated from the Sargasso Sea
MVKKIFSGVQPTGNLHLGNYLGAIKNFVELQNEKDNNCIYCVVDLHAITLK

SEQ ID NO: 187693 - protein, 296 aa, Unknown
  Bacterial polypetide isolated from the Sargasso Sea
MSAKPIVLSGCQPSGQLTLGNYMGALKQWVSMQETHDCLYMIVDLHAITVRQDPAKLKEACLDGLALYLACGIDPTRSTLFLQSHVPEHAQLSWVLNCFTQMGELNRMTQFKDKSARNASNINVGLYSYPVLQAADILLYQANEVPVGEDQKQHLELTRDIATRFNNIYGDTFRIPDPFIPEFGARIMSLQEPDKKMSKSDTNPNNFIGLLEEPKKVAKKIKRAVTDSDEQARIYFDWAEKPGVTNLLTLLSLATGKTVDELVPAYEDKMYGHLKSDVADAVVALIEPLQERYKAL

SEQ ID NO: 187694 - protein, 233 aa, Unknown
  Bacterial polypetide isolated from the Sargasso Sea
MGKKIFSGVQPTGNLHLGNYLGAIKNFVELNNDSANECIFCVVDLHAITVKQDPKELKKNIRETVATFIASGIDAKKSIIFNQSGVAAHSEGAWILSCVARMGWLNRMTQFKEKAGKDKEKASVGLYSYPVLMAADILLYDATHVPVGEDQKQHLELCRDIAQKFNNDFGVEDFLKVPEPLIQKEFSRIMSLKDGSKKKSKSELSDLSRINLTDDKDQIINKKKKAKTDTLPM

SEQ ID NO: 187695 - protein, 113 aa, Unknown
  Bacterial polypetide isolated from the Sargasso Sea
MEKVSKRILSGVQPSGDLHLGNYLGAIKNFVSLQKEFECFFCVVDLHAITVWQDPKILKQKTREVAAAFIASGIDPEKNTLFVQSQVPQHAQLAWIFNCVARMGWLNRMTQFK

SEQ ID NO: 187696 - protein, 246 aa, Unknown
  Bacterial polypetide isolated from the Sargasso Sea
MGKKIFSGVQPTGNLHLGNYLGAIKNFVDLNNDNNNECIFCVVDLHAITVKQDPKELKNNIRETVATFIASGIDPKKSLIFNQSRVAAHAEGAWILSCIARMGWLNRMTQFKEKAGKDKEKASIGLYSYPVLMAADILLYDATHVPVGDDQKQHLELCRDIAQKFNNDFRVDNFLQVPEPLIQKEFSRIMSLKDGSKKMSKSELSDLSRINLTDDKDQIINKIKKAKTDPLPMPQDIKELNERLEA

SEQ ID NO: 187697 - protein, 181 aa, Unknown
  Bacterial polypetide isolated from the Sargasso Sea
NEKDNECVYCVVDLHAITVKQNPKILKDNIRETTAAFLASGLDYKKSIIFNQSLVPAHAEGSWILGCIARMGWLNRMTQFKEKAGKDKEKVSVGLYIYPILMAADILLYDSTHVPVGEDQKQHLELSRDIAQKFNLDFKAHDFLKAPEPLIQKNFARIMSLKDGTKKMSKSDPSDLSRINL

SEQ ID NO: 187698 - protein, 244 aa, Unknown
  Bacterial polypetide isolated from the Sargasso Sea
QDSETIYSIVDLHALTLDSNLETLNESVYEVTAAIIASGIDPQKSIIFNQSSVKEHSELCWVFNCVAKMGWLNRMTQFKEKAGKKRENASVGLYNYPILMAADILLYRATHVPVGDDQKQHLELTRDIATSFNHIFKNNLKNDFFTLPEPIISGPAKRIMSLKDGTKKMSKSELSDFSRINLTDNRDNIVKKIKKAKTDALPIPELETELTSRFEAQNLINIYAGLEDKSPQMGFGRVFWKRVC

SEQ ID NO: 187699 - protein, 185 aa, Unknown
  Bacterial polypetide isolated from the Sargasso Sea
MSKKIFSGVQPTGNLHLGNYLGAIKNFVELNNEDSNHCIFCVVDLHAITVKQDPKELKKNIRETVATFIASGIDPKKSIIFNQSGVAAHSEGAWILSCVARMGWLNRMTQFKEKAGKDKEKASIGLYSYPVLMASDILLYDATHVPVGDDQKQHLELCRDIAEKFNNDFGQEGFLKVPEPLIQKE

SEQ ID NO: 187700 - protein, 240 aa, Unknown
  Bacterial polypetide isolated from the Sargasso Sea
GVFNCVSRIGWLNRMTHFKDKAGKNKENVSVGLMVYPNLMAADILAYLATHVPVGDDQKQHLELSRDIAQKFNNDFGVEFFPQPEPLIYGSATRVMSLRDGSKKMSKSDPSDFSRILLTDDDDTIAAKIKKAKSDSELIPGSKEELQSKPECLNLINILSATTNQSVDQVLSHYAGKEYSSLKKDLADSLVQVISPIRGEINNLLNNRDELNVILAEGTEKAAAIANPIIEEVYKIVGFK

SEQ ID NO: 187701 - protein, 213 aa, Unknown
  Bacterial polypetide isolated from the Sargasso Sea
KASVGLYIYPILMAADILLYDSTHVPVGEDQKQHLELSRDIAQKFNLDFKYPDFLKAPEPLIQKNFARIMSLKDGTKKMSKSDPSDFSRINLTDKKDEIVNKIKKAKTDNLALPSDDKKLSERPEVENLLGIYSSLNNQTLQNSINEFGGKNFSEFKNKLSDLVVEKISPISNEINKLKKDNNFIDKILKDGAEKADKITSKKVNEMKKIIGF

SEQ ID NO: 187702 - protein, 197 aa, Unknown
  Bacterial polypetide isolated from the Sargasso Sea
MKKKIFSGVQPTGNLHLGNYLGAIKNFVALQNEKDNDCVYCVVDLHAITVKQDPKILKDNIRETTAAFLASGLDYKKSIIFNQSLVPAHSESSWILGCVARMGWLNRMTQFKEKAGKDKEKASVGLYIYPILMAADILLYDSTHVPVGEDQKQHLELSRDIAQKFNSDFNAPDFLKAPEPLIQKNFARIMSLKDGTK

SEQ ID NO: 187703 - protein, 265 aa, Unknown
  Bacterial polypetide isolated from the Sargasso Sea
IASGIDPSKSIIFNQSKVHAHAEGSWMLSCMAPMGWLNRMTQFKEKAGKDKEKASVGLYIYPVLMASDILLYDATHVPVGEDQKQHLELTRDIAQKFNKDFNCDDFLKVPEPLIKKNFSRIMSLKDGLKKMSKSDPSDLSRINLTDTKDEIINKIKKAKTDSFSIPNEEQKLKDRPEAQNLLEIYSSISNQTLNKTLDEFGGKNFSDLKNQLAEILSSKISPISDEIKKLINDQEYLDKVLVQGASKAEEIAGKKIKEMKEIIGF

SEQ ID NO: 187704 - protein, 115 aa, Unknown
  Bacterial polypetide isolated from the Sargasso Sea
MNKSSKSLVFSGVQPTGNLHLGNYLGAIKNFVDLEKKITCIFSVVDLHAITVFQDPSELKNNILETTAGFVACGLDFKKSIIFNQSSVSEHAELGWVLNCISRVGWMNRMTQFKE

SEQ ID NO: 187705 - protein, 271 aa, Unknown
  Bacterial polypetide isolated from the Sargasso Sea
IRETTATFIASGIDPSKSIIFNQSKVHAHAEGSWMLSCMAPMGWLNRMTQFKEKAGKDKEKASVGLYIYPILMASDILLYDATHVPVGEDQKQHLELTRDIAQKFNKDFNCDDFLKVPEPLIKKNFSRIMSLKDGTKKMSKSDPSDFSRINLTDTKDEIINKIKKAKTDSFPIPNEKQKLKDRPEAENLLVIYSSISNQTLDKTLDEFGGKNFSDLKRDLAENLSNKISPISNEIKKLINDQNYLDKVLAEGAFKAEEIAGKKIKEMKKII

SEQ ID NO: 187706 - protein, 172 aa, Unknown
  Bacterial polypetide isolated from the Sargasso Sea
MSKKIFSGVQPTGNLHLGNYIGAIKNFVDLQNNKDNNCIFCVVDLHAITVMQDPTELKNNIRETAAAFIASGIDPKNSIIFNQSLVPAHSEGSWILGCVARMGWLNRMTQFKEKAGKDKEKASVGLYIYPVLMASDILLYDATHVPVGDDQKQHLELCRDIAQKFNNEYKCP

SEQ ID NO: 187707 - protein, 117 aa, Unknown
  Bacterial polypetide isolated from the Sargasso Sea
MNIKKIFSGVQPTGNLHLGNYLGAIRNWVELQKVHDCIFCVVDLHAITIWQSPEALRANTREVAAAMMASGVDAKKNIIFNQSKVSAHAELAWVFNCVSRLGWLNRMTQFKEKAGKR

SEQ ID NO: 187708 - protein, 244 aa, Unknown
  Bacterial polypetide isolated from the Sargasso Sea
MDTPLKKRVLSGIQPSGELCISNYIGALKNWISLQDEYECVYLIVDLHSLTVDQVPAELRQRCYSYVAQYLACGIDPEKSLIVIQSHVPEHTELTWVLNTITYMGELNRMTQFKDKSKKQKNINLGLYTYPVLMASDILLYQADLVPVGADQKQHLELSRDLAIRFNGKYSPTFTIPEPFIPKQGARIMSLQDPESKMSKSDKNPNNYISLLDDSNVIMKKFKRAVTDSETEIKYDENRKGLHN

SEQ ID NO: 187709 - protein, 233 aa, Unknown
  Bacterial polypetide isolated from the Sargasso Sea
MANKNRILSGVQPSGDLHLGNYLGAIKNFVALQKDYECFFCVVDLHAITVWQDPTLLAQKTREVTAAFIAAGIDPKKNVLFVQSQVPQHAQLAWIFNCIARMGWVNRMTQFKDKAGKDRENVSVGLFSYPTLMAADILIYLATHVPVGDDQKQHLELTRDIAQKFNTDFKTDLFPIPEPLIFGEATRVMSLRDGTKKMSKSDPSDYSRIMLSDNKDAIVQKIRKAKTDPHPCQ

SEQ ID NO: 187710 - protein, 294 aa, Unknown
  Bacterial polypetide isolated from the Sargasso Sea
IVDCHALTTSDSRTQILKNTREVAAAYIASGINPKKTIIFVQSNVTGHSELAWILSCHTPIGWLNRMTQFKDKAGKNKERAPLGLYSYPVLMAADILLYKSTHVPVGDDQKQHLELSRDIAQAFNRYYQNDFFPIPEPIITGNATRVMSLRDGMKKMSKSDPSDQSRINLSDNAGEIEKKIQKAKTDSHPFPEHFQDLDGRPEIKNLINIFSALDNESVDNVISNYVDKDFKIFKKDLSDLLVEKISLISSEMKKLLKNVDYLDSILKDGNLRANEMANESLTKLKTTIGLFKS

SEQ ID NO: 187711 - protein, 317 aa, Unknown
  Bacterial polypetide isolated from the Sargasso Sea
FRNYLGAIKNFVDLNNDNDNKCIFCVVDLHAITVKQNPKELKDNIRETVATFVASGIDPKKSIIFNQSRVVAHAEGAWIFSCIARMGWLNRMTQFKEKAGKDKEKASVGLYSYPVLMAADILLYDATHVPVGDDQKQHLELCRDIAQKFNNDFEVENFLQVPEPLIQKQFSRIMSLKDGSKKMSKSELSDLSRINLTDDKDQIINKIKKAKTDPLPMPEDIKELDKRVEAKNLLGIYSSLTNSTLQNSVESFAGKNFSEFKEILAEVLVNKIEPISLEIKKLLGNKEYLDEILLDGVEKASSIASKKIERIKEIVGF

SEQ ID NO: 187712 - protein, 56 aa, Unknown
  Bacterial polypetide isolated from the Sargasso Sea
MKKKIFSGVQPTGNLHLGNYLGAIKNFVDLNNDTQNECIFCVVDLHAITVSQNPKN

SEQ ID NO: 187713 - protein, 59 aa, Unknown
  Bacterial polypetide isolated from the Sargasso Sea
MIKKIFSGVQPTGNLHLGNYLGAIKNFVNFQNQEKAECIYCVVDLHAITVKQDPAELKN

SEQ ID NO: 187714 - protein, 68 aa, Unknown
  Bacterial polypetide isolated from the Sargasso Sea
MNKKIFSGVQPTGNLHLGNYLGAIKNFVDLNNDEENECVFCVVDLHAITVKQDPRELRNNIRETVATL

SEQ ID NO: 187715 - protein, 113 aa, Unknown
  Bacterial polypetide isolated from the Sargasso Sea
MGKKIFSGVQPTGNLHLGNYLGAIKNFVDLSNENENECIFCVVDLHAITVNQDPKEFKNNIYETVATFIASGIDPKKNIIFNQSQVSAHSEAAWILGCTARMGWLNRMTQLKK

SEQ ID NO: 187716 - protein, 154 aa, Unknown
  Bacterial polypetide isolated from the Sargasso Sea
AWILNCVARIGWLNRMTQFKEKAGKNRENASVGLYVYPNLMASDILLYHANFVPVGDDQKQHLEITRDIAQRFNNDFSSEGEEFFPLPEPLILPVASRVMSLRDGQKKMSKSDPSDMSRIDLIDDADLIRKKIGKAKTDPLPLPDSREELETRP

SEQ ID NO: 187717 - protein, 299 aa, Unknown
  Bacterial polypetide isolated from the Sargasso Sea
KWQNKLLKFYDENPKFILPKSRRNEVINFVKSGLKDLSISRKSFSWGIKVPSNKDHVIYVWLDALTNYLSALDYPDLNSTKYKNFWPTDVHMIGKDILRFHAIYWPAFLMAADIPPPKRVYGHGWILSGEEKMSKSKGNILDPLEIVDKYGLDPLRYYLLKEVSFGNDGSITQEKLEDCINSDLANNYGNLCQRVISFNEKNCGLVIPEKNKFEKDDLLILDKISHSAESLRSNIDNQELSTYTNFIVDCLFDANKYFNDQEPWKKKSDIKRLNTIVYVSLEIIRKVSILLNPNYPQKL

SEQ ID NO: 187718 - protein, 300 aa, Unknown
  Bacterial polypetide isolated from the Sargasso Sea
PTENLHLGNYIGAIKNFVDLQNNKDNNCIFCVVDLHAITVMQDPIDLKNNIRETAAAFIASGIDPKNSIIFNQSLVPAHSEGSWILGCIARMGWLNRMTQFKEKAGKDKEKASVGLYIYPVLMASDILLYDATHVPVGDDQKQHLELCRDIAQKFNNEYKCPDLLKPPEPLIQKHFSRIMSLKDGTKKMSKSDISEGSRINLTDTEDQIINKIKKAKTDNDTLPGNQDGLKGRPEAENLMGIYSSLSNQNITDTLSEFEGKNFSDLKNKLSEIIVTKMSPISKEIQKLLSDKNYIDQILE

SEQ ID NO: 187719 - protein, 78 aa, Unknown
  Bacterial polypetide isolated from the Sargasso Sea
MGKKIFSGVQPTGNLHLGNYLGAIKNFVDLNNDKDNKCIFCVVDLHAITVKQDPKELKNNIRETVATFVASGNRSKKK

SEQ ID NO: 187720 - protein, 225 aa, Unknown
  Bacterial polypetide isolated from the Sargasso Sea
HFKEKAGKDKEKASVGLYIYPILMAADILLYDATHVPVGQDQRQHLELSRDIANKFNLDFNSPNFLVAPEPLIQKNFARIMSLKDGSKKMSKSDPSELSRINLNDTSDQIITKIKKAKTDNDPLPDNENELSKRLEAQNLLGIYSSLSDQTLKNTISEFSGKNFSAFKEKLANLVVDKISPISSEINKLLKDENFIDKILNDGAEKANEIASKKIKDLKKIIGFK

SEQ ID NO: 187721 - protein, 179 aa, Unknown
  Bacterial polypetide isolated from the Sargasso Sea
MSNFTKRVLSGVQPTGGLHLGNYLGAIKNFVPLQDKYESLFCVVDLHAITTWQDPKELISKKCEVAAAFIASGIDPQKSIIFNQSAVPEHTQLSWVLNCVARMGWLNRMTQFKDKAGKNKENVSVGLFTYPVLMASDIMIYKATHVPVGEDQKQHLELTRDIVLKFNNDFQKGKSFLCL

SEQ ID NO: 187722 - protein, 293 aa, Unknown
  Bacterial polypetide isolated from the Sargasso Sea
CVVDLHAITVSQDPKELRDNIRETVATFIACGIDPEKNIIFSQSKVSAHSEAAWILSCIARMGWLNRMTQFKEKAGKDKEKASIGLYSYPVLMAADILLYDTSHVPVGDDQKQHLELSRDIAQKFNNDFNVNDFFKVPEPLIQKEFSRIMSLKDGLKKMSKSEISDQSRINLTDDKDQIINKIKKAKTDALAMPSSDEELLKRPEVKNLIGIYSSLKGLNFEKVIKEFSGKNFSDFKESLSQVLVDKIIPISDEIKKLLKDRNYLDKILLDGSKKADKIASQKMKKIHEIIGF

SEQ ID NO: 187723 - protein, 265 aa, Unknown
  Bacterial polypetide isolated from the Sargasso Sea
MHAITNRQDPEELKSNIFETVASFIASGLDPEKNIIFNQASISAHAELAWIFNCVARIGWMNRMTQFKEKAGANKENASVGLLVYPNLMAADILIYKATHVPVGEDQKQHLELTRDIAKKFNNDFKSDNYFPIVEPLIPKEISRVMSLRDGTKKMSKSEDSDQSRINLKDSRDLIDQKIKKAKTDNDPIPSEVNGMKNRYEAANLISIYASINGIKVEKVLKEFGGKNFSTFKSKLSESIIEKICPIGDEIKKLLKDKSYLDKIL

SEQ ID NO: 187724 - protein, 283 aa, Unknown
  Bacterial polypetide isolated from the Sargasso Sea
MSKKIFSGVQPSGNLHLGNYLGAIKSFVELQNEKDSECVYCIVDLHAITVKQNPNELKKNIKETLATFIASGLDPKKSIIFSQSSVSAHSEGAWILSCVARMGWLNRMTQFKEKAGKDKEKASIGLYAYPVLMAADILLYDATHVPVGNDQKQHLELCRDIAQRFNNDFNSPDFLKVPEPLIQKHFSRIMSLKDGTKKMSKSDPSDLSRINLTDEKDEIVNKIKKAKTDTMSMPGSGENLSKRPEIENLLGIYSSLSNQSLDNTKKKFSGKNFSEFKENLSEL

SEQ ID NO: 187725 - protein, 239 aa, Unknown
  Bacterial polypetide isolated from the Sargasso Sea
MSKKIFSGVQPSGNLHLGNYLGAIKNFVNLQNEKNNQCVYCVVDLHAITVKQNPQELKDSIRDTTAAFLASGLDYKRSIIFNQSSVPAHSEGSWILSCIARMGWLNRMTQFKEKAGKDKEKASVGLYIYPILMASDILLYDSTHVPVGEDQKQHLELTRDIAQKFNIEFNCPNFFTAPEPLIQKTFARIMSLKDGKKKMSKSDPSDLSRVNLNDSKDVIINKIKKAKTDDKSMPQDNKN

SEQ ID NO: 187726 - protein, 169 aa, Unknown
  Bacterial polypetide isolated from the Sargasso Sea
MSKKIFSGVQPTGNLHLGNYIGAIKNFVNLQNNPDNFCIYCVVDLHAITVKQNPIELRKNIRETTAAFIASGLDYKKSIIFNQSLVSAHSEASWILSCVARMGWLNRMTQFKEKAGKDKEKASVGLYIYPVLMAADILLYDATHVPVGEDQKQHLELSRDIANKFNLDF

SEQ ID NO: 187727 - protein, 229 aa, Unknown
  Bacterial polypetide isolated from the Sargasso Sea
MKKNFKEVVFSGVQPTGNLHLGNYLGAMKNFVELQKKMECIYCVVDLHAITVFQEPQELNKNILETTAGFLACGLDFKKSIIFNQSSVSGHAELAWIFNCVSRVGWMNRMTQFKEKAGSNKENASVGLYVYPNLMAADILLYKATHVPVGDDQKQHLELARDIAQKFNNDFRNENFFPIPEPLIQKKISRVMSLRDGKKKMSKSEESDYSRINLGDSEDEIKKKIKKQK

SEQ ID NO: 187728 - protein, 76 aa, Unknown
  Bacterial polypetide isolated from the Sargasso Sea
MGKKIFSGVQPTGNLHLGNYLGAIKNFVELNNDNENKCVFCVVDLHAITIKQEPRELKNNIRETVATFIASGIDHK

SEQ ID NO: 187729 - protein, 237 aa, Unknown
  Bacterial polypetide isolated from the Sargasso Sea
MGRPRVLSGVQPTGALHLGNWLGAIRNWVDLQNTHDTFVCVVDLHAITVPHDPARLAEDTLNTAALYLACGMDPQRCSIFIQSQVAAHSELCWLLNCVTPLNWLERMIQFKEKAVKQGDNVSVGLLDYPVLMAADILLYDADLVPVGEDQKQHLELARDIAQQRINARFGREEQPVLKVPKPLILKEGARVMSLTDGRSKMSKSDPNEASRITLLDPPELITKKIKRAKTDPERGLE

SEQ ID NO: 187730 - protein, 214 aa, Unknown
  Bacterial polypetide isolated from the Sargasso Sea
MAKKIFSGVQPTGNLHLGNYIGAIKNFVELQNEKDNKCVFCVVDLHAITVKQDPKILKDNIRETTAAFLASGIDPKKSIIFNQSLVAAHAEGSWMLGCVARMGWLNRMTQFKEKAGKDKEKASVGLYIYPILMAADILLYDATHVPVGEDQKQHLELSRDIAQKFNLDFNSPNFLRAPEPLIKKSFSRIMSLKDGKKKMSKSDPSDLSRINLTD

SEQ ID NO: 187731 - protein, 309 aa, Unknown
  Bacterial polypetide isolated from the Sargasso Sea
MGAIKNFVDLQNQKDNECIYCVVDLHAITLKQDPKILKNNIRETTATFLASGIDPNKSIIFNQSMVPAHTEGSWILGCVARMGWLNRMTQFKEKAGKDKEKASVGLYIYPVLMTADILLYDATHVPVGEDQKQHLELARDIAQKFNLEFNAQNFLQAPEPLIQKNFSRIMSLKDGSKKMSKSDPSDLSRINLTDDKDEIINKIKKAKTDAMSMPSESKELKNRPEVENLLGIYSSLKNQNIDKSISELSGKNFSHFKDLLSEIVVEKISPISKEINKLLKNKDYIDKILEEGSKKADKYASKKVNDMKK

SEQ ID NO: 187732 - protein, 258 aa, Unknown
  Bacterial polypetide isolated from the Sargasso Sea
MSKKIFSGVQPTGNLHLGNYIGAIKNFVDLQNQDENECVYCVVDLHAITVKQDSKTLKKNIRETTAAFLASGLNHKKSIIFNQSLVPAHAEGSWMLGCIARMGWLNRMTQFKEKAGKDKEKASVGLYIYPVLMAADILLYDSTHVPVGEDQKQHLELSRDIAQKFNLDFDSPNFLKAPEPLIQKNFARIMSLKDGRKKMSKSDPSDLSRINLNDKKDQIVNKIKKAKTDQYPLPDNDKELKNRPEAENLLGIYSSLNN

SEQ ID NO: 187733 - protein, 92 aa, Unknown
  Bacterial polypetide isolated from the Sargasso Sea
MSKKIFSGVQPTGNLHLGNYLGAIKNFVNFQNQKNTDCIYCVVDLHAITVKQDPGKLKANIRETTAAFIASGLDHKKSIIFQQSMVAAHSEF

SEQ ID NO: 187734 - protein, 132 aa, Unknown
  Bacterial polypetide isolated from the Sargasso Sea
MAKKIFSGVQPTGNLHLGNYLGAIKNFVELQNEKDNNCIYCVVDLHAITLKQDPKELKNNIRETAATFIASGLNPSKSILFNQSLVPAHSEGAWILSCIGRMGWLNRMTQFKDKAGKDKEKANVGLYIYPIL

SEQ ID NO: 187735 - protein, 221 aa, Unknown
  Bacterial polypetide isolated from the Sargasso Sea
EKAGKDKEKASVGLYSYPVLMAADILLYDATHVPVGDDQKQHLELCRDIAQKFNNDFKVENFLVAPEPLIQKEFSRIMSLKDGLKKMSKSETSDFSRINLSDTQDQIVNKIKKAKTDPFPMPMNIKDLDKRPEAKNLLGIYSSLKNIDLEKSVKEFSGKNFSEFKENLTQVVVDIISPLSLEIKKLLNEKAYLDQILIEGAQKANGIASNKIKEIHKIMGF

SEQ ID NO: 187736 - protein, 306 aa, Unknown
  Bacterial polypetide isolated from the Sargasso Sea
MGVPHLGNLVGAILPAIKASEQKNTTSFLFLADYHSLIKNSDSRLRYQSSFDIAACWLACGLDPKKVIFYRQSDIPHIFELAWILSCIASKGLLNRAHAYKAAISDNQANKIEDIDKGINMGLFNYPILMAADILMFKADLVPVGQDQKQHIEMTRDIALRFNHHYGEILTPPEAIIDKNTGVLPGIDGRKMSKSYENTIPIFSEEEALRKVVMKIKTNSLEPGEPKDVSDSNIFDIYKAISTQDKIDEMQKLYQEGIAWGEAKKVLFEELDSFLKPFNNEYRKIIKDRSFVEQTLVDGSEKALSV

SEQ ID NO: 187737 - protein, 221 aa, Unknown
  Bacterial polypetide isolated from the Sargasso Sea
MANKKRILSGVQPTGDLHIGNWLGAINNWVTLQEQYETFLCVVDLHAITASYNPKELSKNTISTAALYVACGIDPNICSIFVQSQISAHSELCWILNCMTPINWMERMIQFKEKSIQQGNNVSIGLFDYPILMAADILLYDADFVPVGEDQKQHLELARDIAQQRINARFSKDKNILKIPQPIIMKNGSKIMSLIDGSKKMSKSDPNEGSRINLLDPPEII

SEQ ID NO: 187738 - protein, 307 aa, Unknown
  Bacterial polypetide isolated from the Sargasso Sea
IKNFVSLQKEYECFFCVVDLHAITVWQDPKVLADKTREVTAAFIASGIDPKKNNIFVQSQVPQHAQLAWLFNCVARMGWLNRMTQFKDKAGKNSENVSVGLFSYPTLMAADILIYLATHVPVGDDQKQHLELTRDIAQKFNNDFKTDLFPIPEPLIFGEATRVMSLRDGSKKMSKSDPSDYSRIMLTDTADNIKQKIKKAKTDPQPIPETVTQFESRPEAQNLISIFASLEGINIQNVVNKYGGREFSIFKKDLADLAVAKLEPITSEMNKLMADPAYIDKILNEGKSSAISVAEPVLEKTKKIIGF

SEQ ID NO: 187739 - protein, 112 aa, Unknown
  Bacterial polypetide isolated from the Sargasso Sea
MSKKIFSGVQPTGNLHLGNYLGAIKNFVELSKDNKNQCIFCVVDLHSITTKQDPKKLRDNINETVASFIASGIDPKKNIIFNQSRVSAHSEAAWILSCVARMGWLNRMTQFK

SEQ ID NO: 187740 - protein, 174 aa, Unknown
  Bacterial polypetide isolated from the Sargasso Sea
MKRVFSGVQPTGNLHLGNYLGAIRNFVSLQKTHECIYCVVDMHAITVKQDPEVLKNNILEVAAAFIASGIDPTKSIIFAQSQVSAHAELSWIFNCTARLGWLNRMTQFKEKAGKNRENASAGLYVYPVLMAADILAYHATHVPVGEDQKQHLELARDIAQKFNNDFDIDFFPNY

SEQ ID NO: 187741 - protein, 140 aa, Unknown
  Bacterial polypetide isolated from the Sargasso Sea
MDKKKLVFSGVQPTGNLHLGNYLGALKNFVSLQKEMKCIYCVVDLHAITIYQKPKELENNVFETLAAFLATGLDPEKSIIFNQSSVSGHAELAWILNCVSRVGWLNRMTQFKDKAGSDKEKASVGLYIYPNLMAADILLY

SEQ ID NO: 187742 - protein, 112 aa, Unknown
  Bacterial polypetide isolated from the Sargasso Sea
MSKKKLVFSGVQPTGNLHLGNYLGALKNFVSLQKEMNCIYCVVDLHAITTFQRPSELQSNVLETVASFISTGLDPNKSIIFNQSSVPGHTQLAWILNCVSRIGWLNRMTQFK

SEQ ID NO: 187743 - protein, 106 aa, Unknown
  Bacterial polypetide isolated from the Sargasso Sea
MNKKTVLSGVQPTGDLHLGNYLGAIKNFAKMQNENDCLFCVVDLHAITIFQDPLELRNNTYEITAAYLACGIDPKKSIIFNQSQVPGHAELAWILNCICRVGWLNR

SEQ ID NO: 187744 - protein, 243 aa, Unknown
  Bacterial polypetide isolated from the Sargasso Sea
EGAWILSCIARMGWLNRMTQFKEKAGQDKEKASIGLYSYPVLMAADILLYDATHVPVGDDQKQHLELCRDIAQKFNNDFEVENFLQVPEPLIQKEFSRIMSLKDGSKKMSKSDLSDLSRINLTDNKDQIVNKIKKAKTDPLPMPNDIKELDERLEAKNLLGIYSSLTDSTLENSVENFGGKNFSEFKEKLSDELVNKIEPISNEIKKLLGDKSYLDEILLDGVEKANLIASKKIERIKEIVGF

SEQ ID NO: 187745 - protein, 59 aa, Unknown
  Bacterial polypetide isolated from the Sargasso Sea
MQKKIFSGVQPTGNLHLGNYLGAIKNFVNLSKEENNKCIFCVVDLHAITISQNPKELRN

SEQ ID NO: 187746 - protein, 258 aa, Unknown
  Bacterial polypetide isolated from the Sargasso Sea
NYLGALKRFAALQGQGAETVYCIVDLHAITVWQDPQMLRARIREAAAAFMASGVDPAQSILFNQSQVSAHAEMAWLFNTVARVGWMYRMTQFKDKAGKNSENASLGLLAYPALMAADILTYQATAVPVGEDQKQHLELTRDIAAKFNHDYGVGHFPITEPLIEGVATRVMSLRDGSRKMSKSDPSDASRINLTDDADTIAQKIRKARTDADPLPGAIDGLKDRPEARNLVNIYAALADETPDQVLARFEGQGLAHQAG

SEQ ID NO: 187747 - protein, 64 aa, Unknown
  Bacterial polypetide isolated from the Sargasso Sea
MKKKIFSGVQPTGNLHLGNYLGAIKNFVELNNNKENKCIFCVVDLHAITVKQDPNKLRNNIRET

SEQ ID NO: 187748 - protein, 247 aa, Unknown
  Bacterial polypetide isolated from the Sargasso Sea
MEKPTKRILSGVQPSGDLHLGNYLGAIKNFVTLQKEYESFFCVVDLHAITVWQDPKVLADKTREVTAAFIASGIDPKKNNIFVQSQVPQHAQLGWLFNCVARMGWLNRMTQFKDKAGKNSENVSVGLFSYPTLMAADILIYLATHVPVGDDQKQHLELTRDIAQKFNNDFKTDFFPIPEPLILGEATRVMSLRDGSKKMSKSDPSDYSRIMLTDTAENIIQKIKKAKTDPEPLPQDKTGLEKRPEAE

SEQ ID NO: 187749 - protein, 268 aa, Unknown
  Bacterial polypetide isolated from the Sargasso Sea
AAFLASGIDPKKSIIFNQSLVAAHAEGSWMLGCIARMGWLNRMTQFKEKAGKDKEKASVGLYIYPVLMAADILLYDATHVPVGEDQKQHLELSRDIAQKFNLDFNAPNFLRAPEPLIKKNFSRIMSLKDGTKKMSKSDPSDLSRINLTDNKEEIVNKIRKAKTDTKPLPDNEKDLNKRPEVENLLGIYSSLNDQSLVDSINEFAGKNFSEFKEKLAEIVMEKIFPISKEINKLQKDNNFIDDVLKEGAKKADAIASKKVKEMKSILGF

SEQ ID NO: 187750 - protein, 84 aa, Unknown
  Bacterial polypetide isolated from the Sargasso Sea
MVKKIFSGVQPTGNLHLGNYLGAIKNFVELQNQDKNECVYCVVDLHAITTKQDPKILKNNIRETTAAFLASGLNHNKSIIFQQS

SEQ ID NO: 187751 - protein, 211 aa, Unknown
  Bacterial polypetide isolated from the Sargasso Sea
GLFTYPVLMAADILVYNAHQIPVGHDQKQHLELARDIANRFNALHGEIFTVPEPYIPGVAARVMSLQEPTKKMSKSDENPWNFVGLLEDPKMISKKFKKAMTDSEDPPRVAYDLENKAGVANLLSILSGVTGKSIDSLVAEYEGKMYGHLKGDVADAVIALLEPVQAKFHEIRQDQSLMNQVLKQGAAEARARAAVTLEKVYDAVGFVLPG

SEQ ID NO: 187752 - protein, 168 aa, Unknown
  Bacterial polypetide isolated from the Sargasso Sea
MLKKIFSGVQPSGNLHLGNFLGAIKNFVSLQNQENTDCVYCIVDLHAITTKQDPKALKENIRETLATFIASGIDPKKSIIFNQSAVSAHSEGAWILSCIARMGWLNRMTQFKEKAGKDKEKASVGLYSYPILMASDILLYDSTHVPVGDDQKQHLELCRDIAQKFNLE

SEQ ID NO: 187753 - protein, 286 aa, Unknown
  Bacterial polypetide isolated from the Sargasso Sea
LLVKQDPKILKNNIRETTAAFLASGLDYKKSIIFNQSLVPAHSEGSWILGCIARMGWLNRMTQFKEKAGKDKEKASVGLYIYPILMAADILLYDSTHVPVGEDQKQHLELSRDIAQKFNLEFKSPDFLKAPEPLIQKNFARIMSLKDGTKKMSKSDPSDFSRINLTDKKDEIVNKIKKAKTDNLALPSDDKKLNERPEVENLLGIYSSLNNQTLNNSINEFGGKNFSEFKNKLSDLVVEKISPISNEINKLKKDNNFIDKILKDGAEKADKITSKKVNEMKKIIGF

SEQ ID NO: 187754 - protein, 184 aa, Unknown
  Bacterial polypetide isolated from the Sargasso Sea
MVKKIFSGVQPTGNLHLGNYLGAIKNFVDLQNQEGNECVYCVVDLHAITVKQDPKVLKNNIRETTAAFLASGLDNKKSIIFNQSSVPAHAEASWILGCVARMGWLNRMTQFKEKAGKDKENVSVGLYIYPVLMAADILLYDSSHVPVGEDQKQHLELSRDIAQKFNLDFNAKDFFKVPDPLIQK

SEQ ID NO: 187755 - protein, 263 aa, Unknown
  Bacterial polypetide isolated from the Sargasso Sea
NFVKLNNDGNNNCIFCVVDLHAITNKQNPKELKENTLETIATFIACGIDPKKSILFNQSQVPAHTETAWILSCVARMGWLNRMTQFKEKAGKDKEKASIGLYSYPILMAADILLYDASHVPVGDDQKQHLELCRDIAQKFNKDFNVEDFFKVPEPLIQKEFSRIMSLKDGQKKMSKSELSDLSRINLTDTKDQIVNKIKKAKTDTLPMPSSIDELRKRPEVNNLIGIYSSLSEESLEKILNTFSGKNFSEFKDSLSQLLVDYL

SEQ ID NO: 187756 - protein, 166 aa, Unknown
  Bacterial polypetide isolated from the Sargasso Sea
GNLHLGNYIGAIKNFVDLQDNKDNNCIFCVVDLHAITVMQDPIELKNNIRETAAAFIASGIDPKKSLIFNQSLVLAHSEGSWILGCVARMGWLNRMTQFKEKAGKDKEKASVGLYIYPILMASDILLYDATHVPVGDDQKQHLELCRDIAQKFNNEYKCSDFLRSP

SEQ ID NO: 187757 - protein, 277 aa, Unknown
  Bacterial polypetide isolated from the Sargasso Sea
FCVVDLHAITVMQDPIELKNNIRETAAAFIASGIDPKNSIIFNQSLVPAHAEGSWILGCVARMGWLNRMTQFKEKAGKDKEKASVGLYIYPVLMASDILLYDATHVPVGNDQKQHLELCRDIAQKFNNEYKCPDFLKPPEPLIQKHFSRIMSLKDGTKKMSKSDIAEGSRINLTDNEDQIINKIKKAKTDNNTLPGNEDGLKGRPEAENLMGIYSSLSNQNINDTLNEFEGKNFSDLKNKLSEIIVTKLSPISKEIKKLLSDKNYLDQILEDGSVKA

SEQ ID NO: 187758 - protein, 197 aa, Unknown
  Bacterial polypetide isolated from the Sargasso Sea
MNKKIFSGVQPTGNLHLGNYLGAIKNFVKLSNDDENDCIFCVVDLHAITIKQDPKELKNHIRETVASFIACGINPEKNIIFNQSTVPAHSEATWLLSCVARMGWLNRMTQFKEKAGKDKEKASIGLYSYPILMAADILLYDATHVPVGEDQKQHLELCRDIAQKFNNDYGVEDFLKVPEPLIQKEFSRIMSLKDGTK

SEQ ID NO: 187759 - protein, 221 aa, Unknown
  Bacterial polypetide isolated from the Sargasso Sea
SERHSNNVNAGLFTYPVLMAADILVYNAHQIPVGHDQKQHLELARDIATRFNALHGDIFTVPEPYIPGVAARVMSLQEPTKKMSKSDENPWNFVGLLEDPKMISKKFKKAMTDSEDPPRVTYDLENKAGVANLLSILSGVTGKPIDSLVAEYEGKMYGHLKGDVADAVIALLEPVQAKFHEIRQDQSLMNQVLKQGAAEARARASVTLEKVYDAVGFVLPT

SEQ ID NO: 187760 - protein, 136 aa, Unknown
  Bacterial polypetide isolated from the Sargasso Sea
MGVKKIFSGVQPTGNLHLGNYIGAIKNFVDLQNENNECIFCVVDLHAVTVKQDPKILKQNIRETAATFLACGINPKKSIIFNQSSVSAHSEVSWLLSCVARMGWLNRMTQFKEKAGKDKEKASVGLYIYPVLMAAD

SEQ ID NO: 187761 - protein, 195 aa, Unknown
  Bacterial polypetide isolated from the Sargasso Sea
MAKKIFSGVQPTGNLHLGNYLGAIKNFVNLNNDNDNKCIFCVVDLHAITVKQDPKELKNNIRETVATFIASGIDPKKSIIFNQSRVSAHAEGAWILSCVARMGWLNRMTQFKEKAGKDKEKASIGLYSYPVLMAADILLYDATHVPVGDDQKQHLELCRDIAQKFNNDFEVENFLQVPEPLIQKEFSRIMSLKDG

SEQ ID NO: 187762 - protein, 223 aa, Unknown
  Bacterial polypetide isolated from the Sargasso Sea
KEKAGSNKENASVGLYVYPNLMAADILLYRATHVPVGDDQKQHLELARDIAQKFNNDFKNKNFFPIPEPLIQKNFSRVMSLRDGKKKMSKSEESEYSRINLTDTPDEIRKKIKKAKSDSEPIPEEIKTLETKPEAFNLINIYSSLTNLKHQDILNEMRGKDFSSLKEALTDVLIATICPIGEKIIELKNDKSYLFKVLKTGSDKAKEISDRNLNKIKEIVGFI

SEQ ID NO: 187763 - protein, 225 aa, Unknown
  Bacterial polypetide isolated from the Sargasso Sea
AGVGLMERSTSYKDKIEKGLKPHMGLFSYPILMAADILLYGSEIVPVGKDQKQHLEITRDIAIRFNNIYGDVFVVPEADINENTMLVPGIDGQKMSKSYGNTIPIFSDEKIIRKAVMSITTDSADINDLKDKDTPLFKIYSMFLNNDEKDILSDRYDTPGLRYGDLKKELFEKIIEHFSPYRKKRNDLLKNIDFVYSSLNQGAQKASIIADDYIKKIRDSMGLNY

SEQ ID NO: 187764 - protein, 226 aa, Unknown
  Bacterial polypetide isolated from the Sargasso Sea
MGKKIFSGVQPTGNLHLGNYLGAIKNFVELNNDKDNQCVFCVVDLHAITVHQDPKELRNNIRETVATFIASGIDPNKSVIFNQSKVSAHTEAAWILSCVARMGWLNRMTQFKEKAGKDKEKASIGLYSYPILMAADILLYDASHVPVGDDQKQHLELCRDIAQKFNNDFKVEDFFKVPEPLIQKEFSRIMSLKDGTKKMSKSESSDLSRINLTDDKDQIINKIKKA

SEQ ID NO: 187765 - protein, 172 aa, Unknown
  Bacterial polypetide isolated from the Sargasso Sea
MLKKIFSGVQPSGNLHLGNFLGAIKNFVSLQNQENTDCVYCIVDLHAITTKQDPKALKENIRETLATFIASGIDPKKSIIFNQSAVSAHSEGAWILSCIARMGWLNRMTQFKEKAGKDKEKASVGLYSYPILMASDILLYDSTHVPVGDDQKQHLELCRDIAQKFNLDFNVP

SEQ ID NO: 187766 - protein, 273 aa, Unknown
  Bacterial polypetide isolated from the Sargasso Sea
MSKKIFSGVQPTGNLHLGNYLGAIKNFVNLQKEKDNTCIYCVVDLHAITVKQDPRILKKNIRETTATFLASGLDPKKSIIFNQSMVPSHSEGAWLLGCVARMGWLNRMTQFKEKAGKDKEKASVGLYIYPVLMASDILLYNSTHVPVGEDQKQHLELTRDIAQKFNLDFNSPNFLITPEPLIQKNFSRIMSLKDGKKKMSKSDPSDQSRINMTDDKDQIVNKIKKAKTDSGEFPENNNDLNKRPELNNLFGIYSSIQDQDMKSTINEFQGKNF

SEQ ID NO: 187767 - protein, 116 aa, Unknown
  Bacterial polypetide isolated from the Sargasso Sea
MGKKIFSGVQPTGNLHLGNYLGAIKNFVELNNEANNDCIFCVVDLHAITVNQDPKELKNNVRETVATFIASGIDPKKSIIFNQSKISAHSEAAWILSCTTRMGWLNRMTQFKEKAG

SEQ ID NO: 187768 - protein, 112 aa, Unknown
  Bacterial polypetide isolated from the Sargasso Sea
MKKIIFSGVQPTGNLHLGNYLGAIKNFVKLNNDGNNNCIFCVVDLHAITNKQNPKELKENTLETIATFIACGIDPKKSILFNQSQVPAHTETAWIISCVARMGWLNRMTQLK

SEQ ID NO: 187769 - protein, 283 aa, Unknown
  Bacterial polypetide isolated from the Sargasso Sea
PAISESKKESTSSFLFLAYYHSLIKNLDPELTHSSSFEIAACWLACGLDSKTTTFYRQSDVPHIMELAWILSCLTAKGLLNRAHAYKAAVSLNEDKNSKDPDKGITMGLFNYPILMAADILMFNADEVPVGQDQKQHIEMTRDIANRFNHHYGDVFTIPEAVISDETGILPGIDGQKMSKSYGNTIPAFIDTTKLKKLVNKIKTNSLEPGVPKETRDCTVFSLYKAFASPDQVLNMEEAYENGISWGEAKNQLYGLLEEFISPYREEYQRISQDRGYVEQTLK

SEQ ID NO: 187770 - protein, 165 aa, Unknown
  Bacterial polypetide isolated from the Sargasso Sea
MGKKIFSGVQPTGNLHLGNYLGAIKNFVDLNNDKDNKCIFCVVDLHAITVKQDPKELKNNIRETVATFVASGIDPKKSIIFNQSSVAAHAEGAWILSCVARMGWLNRMTQFKEKAGKDKEKASIGLYSYPVLMAADILLYDATHVPVGDDQKQHLELCRDIAQKI

SEQ ID NO: 187771 - protein, 168 aa, Unknown
  Bacterial polypetide isolated from the Sargasso Sea
MSKKIFSGVQPSGNLHLGNYIGAIKNFVDLQNQKGNQCVYCVVDLHAITLKQDPKILKDSIRETTAAFLSSGIDPNKSIIFNQSLVPAHAEGSWILGCIARMGWLNRMTQFKEKAGKDKEKASVGLYIYPILMAADILLYDATHVPVGEDQKQHLELSRDIAQKFNSD

SEQ ID NO: 187772 - protein, 241 aa, Unknown
  Bacterial polypetide isolated from the Sargasso Sea
MQKNNTLLSGAQPSGNIHIGNYFGAIENWVNLQDQYQSLFGVMDLHAITAKYDPRLLRESSINLVITYLACGIDPQKSNIFIQSSISEHLEFSWILGCHTPMGWLNRMTQFKDKSQGQKKENIKYGLYSYPVLMAADILLYGAGFVPVGNDQKQHIELTAEICQSFNHNYQTDFLKVPKYIYASSKRLMSLNNGKNKMSKSDVSELSRINLEDSEEEIFKKIKKCKTDSISGISYDENRPE

SEQ ID NO: 187773 - protein, 303 aa, Unknown
  Bacterial polypetide isolated from the Sargasso Sea
IFSGVQPTGNLHLGNYIGAIKNFVDLQNQADNECVYCVVDLHAITTKQDPKILKSNIRETTAAFLASGIDPNKSIIFNQSLVPSHSEGSWILGCIARMGWLNRMTQFKEKAGKDKEKASVGLYIYPILMTADILLYDATHVPVGEDQKQHLELSRDIAQKFNLDFNAPNFLRAPEPLIQKNFSRIMSLKNGKNKMSKSDPSDLSRINLTDNKDQIVNKIKKAKTDNDPLPSNEKNLSKRPEVENLLGIYSSLSGQNLENSINEFSGKNFSVFKEKLAELVVEKISPISIEINKLQKDISFIDK

SEQ ID NO: 187774 - protein, 200 aa, Unknown
  Bacterial polypetide isolated from the Sargasso Sea
MKKKIFSGVQPTGNLHLGNYLGAIKNFVALQNEKDNECVYCVVDLHAITVKQDPKILKDNIRETTAAFLASGLDYKKSIIFNQSLVPAHSEGSWILGCIARMGWLNRMTQFKEKAGKDKEKASVGLYIYPILMAADILLYDSTHVPVGEDQKQHLELSRDIAQKFNLDFKTPDFFIAPEPLIQKNFARIMSLKDGKKKMS

SEQ ID NO: 187775 - protein, 176 aa, Unknown
  Bacterial polypetide isolated from the Sargasso Sea
MTKKIFSGVQPTGNLHLGNYIGAIKNFVDLQNNKDNSCIFCVVDLHAITVMQDPTELKNNIRETAAAFIASGIDPKNSIIFNQSLVPAHSEGSWILGCIARMGWLNRMTQFKEKAGKDKEKASVGLYIYPVLMASDILLYDATHVPVGDDQKQHLELCRDIAQKFNNEYKCPRFSK

SEQ ID NO: 187776 - protein, 105 aa, Unknown
  Bacterial polypetide isolated from the Sargasso Sea
PPVVRYDVQNKAGVSNLLDILSAVTGQSIPELEKQFEGKMYGHLKGEVADAVSGMLTELQERYYRYRNDEAFLQQVMKDGAEKAGARASATLKAVYEAIGFVARP

SEQ ID NO: 187777 - protein, 173 aa, Unknown
  Bacterial polypetide isolated from the Sargasso Sea
MSNKKLVFSGVQPTGNLHLGNYLGALKNFVSLQKEMNCVYCVVDLHAITTFQNPKELKNNILETTAGFLATGLDPNKSIIFNQSSVPAHSELAWIFNCVSRVGWLNRMTQFKDKAGSDKEKASVGLYIYPNLMAADILLYKATHVPVGADQKQHLELTRDIAQKFNKEFNCKD

SEQ ID NO: 187778 - protein, 271 aa, Unknown
  Bacterial polypetide isolated from the Sargasso Sea
TTASFLASGLDSEKSIIFKQSSVSEHAELAWIMNCVARLGWLNRMTQFKDKAGSDKEKASVGLYIYPNLMAADILLYKATHVPVGADQKQHLELCRDIAQKFNNDFNCDGFFPLPEPLILKKISRVMSLRDGTKKMSKSEESDYSRINLTDTADEIKKKIKKAKTDSSPIPESEKELEKRPEALNLLNIYADLNQIPLSKVLKDMSGKEFSYFKEKLSQALIEVIEPIGKKIKNLMNDKDYLEVILKKGQEKASKKAEENLKKIREKIGLL

SEQ ID NO: 187779 - protein, 300 aa, Unknown
  Bacterial polypetide isolated from the Sargasso Sea
KNNQCVYCVVDLHAITIKQDPKILKDSIRETTAAFLASGIDSNKSIIFNQSQVSAHAEGSWILGCIARMGWLNRMTQFKEKAGKDKEKASIGLYIYPILMAADILLYDATHVPVGEDQKQHLELSRDIANKFNLDFNVPNFFKVPDPLIQKNFSRIMSLKDGKKKMSKSDPSDLSRINLTDTKEEILNKIKKAKTDTMPIPNEISELKKRPEVGNLLGIYSSLNNQTTEKTINEFNGKNFSDFKDNLAELVVEKIYPISLEITKLLKNEDHIDQILKEGAEKANEQSSKKVKEMKKIIGF

SEQ ID NO: 187780 - protein, 128 aa, Unknown
  Bacterial polypetide isolated from the Sargasso Sea
MGKKIFSGVQPTGNLHLGNYLGAIKNFVNLNNDNDNECIFCVVDLHAITTKQNPKELKNNIRETVATFVASGIDPKKSIIFNQSSVSAHSEGAWILSCVARMGWLNRMTQFKEKAGKDKEKASIGVVF

SEQ ID NO: 187781 - protein, 154 aa, Unknown
  Bacterial polypetide isolated from the Sargasso Sea
MAKKIFSGVQPTGNLHLGNYLGAIKNFVELQNEEDNNCIYCVVDLHAITLKQDPKELKNNIRETAATFIASGLNPNKSILFNQSLVPAHSEGSWILSCIGRMGWLNRMTQFKEKAGKDKEKASVGLYIYPILMAADIMLYNATHVPVGDDQKQH

SEQ ID NO: 187782 - protein, 256 aa, Unknown
  Bacterial polypetide isolated from the Sargasso Sea
PTGNLHLGNYLGAIKNFVALQNEKDNECVYCVVDLHAITVKQDPKILKDNIRETTAAFLASGLDYEKSIIFNQSLVPAHSEGSWILGCIARMGWLNRMTQFKEKAGKDKEKASVGLYIYPILMAADILLYDSTHVPVGEDQKQHLELSRDIAQKFNSDFNAPDFLKTPEPLIQKNFARIMSLKDGTKKMSKSDPSDLSRINLTDQKDEIVNKIKKAKTDNSTLPSDDKKLNERPEVENLLGIYSSLNNQTLFDTIN

SEQ ID NO: 187783 - protein, 145 aa, Unknown
  Bacterial polypetide isolated from the Sargasso Sea
MTKKIFSGVQPTGNLHLGNYLGAIKNFTKLQNDNKNNCIFCVVDLHSITVHQDPKLLKKNVRETAATFIASGIDPSKSIIFNQSSVPAHSEAAWILGCVSKMGWLNRMTQFKEKAGKDKEKASIGLYVYPVLMAADILLYDTTHV

SEQ ID NO: 187784 - protein, 193 aa, Unknown
  Bacterial polypetide isolated from the Sargasso Sea
MIQPSGDLGIGHYLGAIIHWLKLQEQGDSGLFAIADLHAITVPQSPEVLKKRTLDLVAFYLACGIDPDKSIIFTQSHVPQHAELAWILSCLTSIGELNRMTQFKDKTQHAKRERIGVGLHVYPVLMAADILAYQADKVPVGADQKQHLELARDLAIRFNDKFGQVFNVPEPVIASCGARIKSLTNPLKKMSKS

SEQ ID NO: 187785 - protein, 187 aa, Unknown
  Bacterial polypetide isolated from the Sargasso Sea
GDDQKQHLELTRDIAQKFNNDFKTDFFPIPKPLIFGEATRVMSLRDGSKKMSKSDPSDYSRIMLTDSAENIAQKIRKAKTDPEPLPLDKDGLAKRPEAENLISIFASLQNTSIENVVSEYAGKEFSIFKKDLVDLSVSKLEPITTEMNRLMGDITYIDSVLNEGKEKAITVAEPVLAKTREIIGFLS

SEQ ID NO: 187786 - protein, 253 aa, Unknown
  Bacterial polypetide isolated from the Sargasso Sea
KKNILFNQASVSAHSELAWIFNCVSRLGWLNRMTQFKEKAGSQKERASVGLYVYPTLMASDILIYRATHVPVGEDQKQHLELCRDIAQKFNNDFNTKFFPLTEPLIPDAESRIMSLRDGKKKMSKSDESDFSRINLTDDPDLISQKIKKAKTDSAPIPKNLKELDKRPEALNLIQIYSSINKLEVEKVLNEFGGKNFSEFKNKLGDSLIESICPIGKKIKEYLNDSQYLEKVLIDGSQKASEIATKNLEEIYD

SEQ ID NO: 187787 - protein, 226 aa, Unknown
  Bacterial polypetide isolated from the Sargasso Sea
MDKKRVFSGVQPTGNLHLGNYLGAIKNFVDLQNKFECVYCIVDLHAITNRQDPTQLKSNIFETAASFIASGLNPDKSIIFNQASVPAHSELAWIFNCVARIGWMNRMTQFKEKAGANKENASVGLMVYPNLMAADILLYKATHVPVGEDQKQHLELTRDIAKKFNNDFKSKDFFPIVEPLIPKEISRVMNLRDAKKKMSKSEESDYSRINLKDEKELIVQKIKKAT

SEQ ID NO: 187788 - protein, 253 aa, Unknown
  Bacterial polypetide isolated from the Sargasso Sea
MGVQPTGNLHLGNYLGAIKNFVDLNNDKDNKCIFCVVDLHAITVRQDPKELKNNIRETVATFIASGIDSKKSIIFNQSRVAAHSEGAWILSCVARMGWLNRMTQFKEKAGKDKEKASIGLYSYPVLMAADILLYDATHVPVGDDQKQHLELCRDIAQKFNNDFEVENFLQVPEPLIQKEFSRIMSLKDGSKKMSKSELSDLSRINLTDNKDQIINKIKKAKTDPMPMPQDLKELDERLEAKNLLGIYSSLTNS

SEQ ID NO: 187789 - protein, 195 aa, Unknown
  Bacterial polypetide isolated from the Sargasso Sea
EKNIIFNQSQVPEHTQLAWLLSCTARIGWLNRMTQFKDKAGKNRENASVGLYTYPILMAADIMLYKASHVPVGDDQKQHLELARDIAHKFNTDYNIDFFVLPEPLFNSDSTRIMSLRDGTKKMSKSDTSDYSRILMTDDNDTISLKIKKAKTDSLSMPELENGLSKRPEIDNLINIYSSCSGISRNIVIDQFSSK

SEQ ID NO: 187790 - protein, 279 aa, Unknown
  Bacterial polypetide isolated from the Sargasso Sea
SNVLETVATFIASGLNPEKNIIFNQASVSAHSELAWIFNCVARIGWMNRMTQFKEKAGENKENASVGLLVYPNLMAADILIYKATHVPVGEDQKQHLELTRDIAKKFNNDFNCKDYFPIVEALIPKEISRVMSLRDGKKKMSKSEDSDQSRINLKDSKDLINQKIKKAKTDTAPIPSEISGLKNRYEATNLITIYASLNNIDLQTVLKEFGGKNFSTFKSKLSESIIEKICPIGEEMKKLLKDKNYLNEVLVKGSKKAKLIAEINIKEIYEIIGLTRFS

SEQ ID NO: 187791 - protein, 211 aa, Unknown
  Bacterial polypetide isolated from the Sargasso Sea
YVYPTLMASDILLYDATHVPVGNDQKQHLEITRDIAQKFNTDFNCADFIKIPEPLIQEEFSRIMSLKDGTKKMSKSDISDQSRINLKDEKDAIVNKIKKAKTDSLPLPSDMIDLKKRPEADNLIGIYCNLSGYKVEKVLSDFSGKNFSFFKEKLSDLVIDKIYPIGKEINKLLKAKDHLINVLKQGTKKAEVRANDKLKKIHEKIGFLDIK

SEQ ID NO: 187792 - protein, 208 aa, Unknown
  Bacterial polypetide isolated from the Sargasso Sea
NDLKNVNAALFTYPILMAADILLYDANYVPVGKDQIQHLEITRNVASKFNNLHGETLIIPESITDENTKLIIGTDGQKMSKSKSNIINIFLPDKQLKKQIMSIKTDSLPIESIKNPNTCNVFKLYSLIGNETQVKQMKENYEKGGYGYGEAKSQLFNLILETYSKQRNTYNYLMDNRSEIDQILKEGAIRAKTIADQVIKRVKSKLGI

SEQ ID NO: 187793 - protein, 209 aa, Unknown
  Bacterial polypetide isolated from the Sargasso Sea
GLYIYPILMAADILLYDATHVPVGEDQKQHLELTRDIAQKFNTDFKAQDFFKIPEPLIQEKFSRIMSLKDAKNKMSKSDPSDASRINLTDTEEQIHNKIKKAKTDTKSFPANEKDLTKRPEIQNLIGIYSSLKSQKITDTLKEFQGKNFSNFKDNLSEVVIENISPISKEISKLKLDKGHILQVLKDGSEKAEAIAAEKVKKIKEIIGF

SEQ ID NO: 187794 - protein, 214 aa, Unknown
  Bacterial polypetide isolated from the Sargasso Sea
MKKRILTGITTTGTPHIGNYIGAIRPAIEMTKDSDESFFFLADYHSIIKNQDSDSIKNSVKNVALAWLSSGLDPNKSYFYKQSDVPEIIELCWILNCVTAKGLMNRAHAYKAATSINENDPDKGITMGLFSYPVLMAADILMFDSTHVPVGLDQVQHLEMTRDIAARFNHLYKPILTLPDPIIQDKENIVPGLDGRKMSKSYGNVIPLLGSEKI

SEQ ID NO: 187795 - protein, 258 aa, Unknown
  Bacterial polypetide isolated from the Sargasso Sea
KKSIIFNQSQVSAHSEAAWILSCVARMGWLNRMTQFKEKAGKDKEKASIGLYSYPVLMAADILLYDSTHVPVGDDQKQHLELCRDIAQKFNNDYKIENFFKVPEPLIKKEFSRIMSLKDGLKKMSKSEVSDLSRINLTDDKDQIINKIKKAKTDTLALPSKIEELEKRPEAKNLIGIYSSLVNNTLQESIDEFAGKNFSEFKEKLSEIVVNEINPISQRINELLGDKVFLEKILKDGYERANEIASKKIKKIHEIVGF

SEQ ID NO: 187796 - protein, 292 aa, Unknown
  Bacterial polypetide isolated from the Sargasso Sea
MGNYAGAIRPAIVASRDPQMDSFYFLADYHALIKCDDPARIQRSRLEIAATWLALGLDTDKATFYRQSDIPEIPELCWLLTCVAGKGLLNRAHAYKASVDKNVEQGEDPDAGVTMGLFSYPVLMAADILMFNAQKVPVGRDQIQHVEMARDIGQRFNHLFGKGKDLFVLPEVVIEEEVATLPGLDGRKMSKSYDNTIPLFGTGKQLKDAVARIVTDSRLPGEPKDAEGSHLFTLYQAFASHAQQAEFRAELEGGLAWGEAKNRLYQLLEDTLGEARERYNALIAKPADLEDI

SEQ ID NO: 187797 - protein, 125 aa, Unknown
  Bacterial polypetide isolated from the Sargasso Sea
MGKKIFSGVQPTGNLHLGNYLGAIKNFVDLSNENDNECIFCVVDLHAITVNQDPKEFRNNIHETVATFIASGIDPIKNIIFNQSQVSAHSEAAWILGCIARMGWLNRMTQFKEKAGKDKEKASIG

SEQ ID NO: 187798 - protein, 287 aa, Unknown
  Bacterial polypetide isolated from the Sargasso Sea
MKKRILTGITTTGIPHIGNYIGAIRPALELANESDESFFFLADYHSIIKNQNIEEIKHSVENVALAWLSSGLDPKKTYFYRQSDVPEILELSWILSCVTAKGLMNRAHAYKAASSINTDDPDKGITMGLFSYPVLMAADILMFDSTHVPVGSDQIQHLEMTRDIAARFNHLFKPLLTLPEPIIQKNENVVLGTDGRKMSKSYGNVIPLLESEKNLKKSIMKIVTNSLEPGEPKDSINCTVFELYKNFAAESEIQSMQQSYDDGISWGEAKEILFNLVNEELQPIRSK

SEQ ID NO: 187799 - protein, 255 aa, Unknown
  Bacterial polypetide isolated from the Sargasso Sea
QSQVTQHAELAWIFNCVSRLGWLNRMTQFKDKAGKDRENASVGLYAYPNLMASDILLYKADGVPVGEDQKQHLELSRDIAQKFNNDFGVDFFPLPEPLILGEATRVMSLRDGTKKMSKSDPSEASRINMTDGPDAIAKKIRKAKTDPEDLPGDPKDLAGRPEAANLFGIYAALSDQSLADVCTQFDGAQFSALKVDLTELAVSVLGPIGNEMARMMRDPAYLDGVLSTGSERARAIAAPILGDVYDIVGLLRSQS

SEQ ID NO: 187800 - protein, 260 aa, Unknown
  Bacterial polypetide isolated from the Sargasso Sea
MTKKKLVFSGVQPTGNLHLGNYLGALKNFVSLQKEMECIYCVVDLHAITVFQDPNHLHKNVLETTASFLATGLDPNKSIIFNQSSVSGHAELAWILNCVSRIGWLNRMTQFKDKAGSDKEKASVGLYIYPNLMAADILIYKATHVPVGADQKQHLELSRDIAQKFNKDFNCKDFFPLPEPLIPKNISRVMSLRDGTKKMSKSEESDYSRINLKDTADEINKKIKKAKSDSDSIPGDIKSLENKPEALNLLTIYSELTQNS

SEQ ID NO: 187801 - protein, 275 aa, Unknown
  Bacterial polypetide isolated from the Sargasso Sea
SWSIKNFVSLQKKMECIYCVVDLHAITTFQNPKILKSNILETTAGFIASGLDHENSIIFNQSSVSGHAELAWILNCVSRVGWLNRMTQFKDKAGTDKEKASVGLYIYPNLMAADILLYKATHVPVGADQKQHIELSRDIAQKFNNDFQVENFFPLPEPLIPKKISRIMSLRDGTKKMSKSEESEYSRINLKDDADEIVKKIKKAKTDSEPIPSNEVELNKRPEALNLITIYSDLTNTPVGEVLKQMSGKDFTHLKKNLSDALVEKICPIGKEIKK

SEQ ID NO: 187802 - protein, 261 aa, Unknown
  Bacterial polypetide isolated from the Sargasso Sea
SGIDPKKSIIFNQSAVSAHSEGAWILSCIARMGWLNRMTQFKEKAGKDKEKASVGLYSYPILMASDILLYDSTHVPVGDDQKQHLELCRDIAQKFNLDFNVPDFLKVPEPIIQKYFSRIMSLKDGTKKMSKSDPSDLSRVNLTDDKDVIKNKIKKAKTDSLPISEKDIEKRFEAKNLLEIYSSLAEKKIEDTINQFDGRNFSEFKEKLSDIMVEKISPISLEINKLLNDKKYLDKILIEGIEKADKIANKKILEMKKIIGF

SEQ ID NO: 187803 - protein, 221 aa, Unknown
  Bacterial polypetide isolated from the Sargasso Sea
MKTVFSGIQPSGLVHLGNLLGAINNWVKLSNENSKNYFCIVDLHSLTGLPNKNDLKKSINDTLKVLVASGINTKTSVIYKQSNLQEHAYLSWILSNFCQVGELQRMTQFKEKASSFGTHSGLLTYPILMASDILIHKANEVPVGDDQTQHLELTRNIAERFNANYGQIFPIPEKTSGKSGARLMSLRHPENKMSKSSDDINGTIYFNDEKDNILKKFKSSV

SEQ ID NO: 187804 - protein, 276 aa, Unknown
  Bacterial polypetide isolated from the Sargasso Sea
FRTVASFVASGLSTEKNIIFNQASVAAHSELAWIFNCVSRIGWMNRMTQFKEKAGSNKENASVGLLVYPNLMAADILIYKATHVPVGEDQKQHLELTRDIAKKFNNDFKCKDFFPIVEPLISKDIPRVMSLRNGKKKMSKSDDSDYSRINLKDDKDLINLKIKKATTDADSIPSEISGLKDRAEAKNLLSIYASINKTNLEKVLKDFGGKNFSTLKSSLSETIIEKICPIGKEITKLLQDEKYLTTILKKGTNKADLIAKENIKEIYNLIGLTKFT

SEQ ID NO: 187805 - protein, 107 aa, Unknown
  Bacterial polypetide isolated from the Sargasso Sea
MSKKIFSGVQPTGNLHLGNYLGAIKNFVNFQNQTNTDCIYCVVDLHAITVKQDPVRLKANIRETTAAFIASGLDHKKSIIFQQSMVAAHSEFSWILGCSARMGWLIG

SEQ ID NO: 187806 - protein, 344 aa, Unknown
  Bacterial polypetide isolated from the Sargasso Sea
MSDAVQSEAIGKFKKRVFSGVQPSGGLTLGNYLGAIKRFVQMQNDDYETIYCVVDLHAITVWQSPKVLRQNIRELAASFIASGLDPNKSILFNQSAVPEHAQLGWVFNCVARMGWMQRMTQFKDKAGKNAQNASLGLFGYPALMAADILAYHATHVPVGDDQKQHLELTRDIAIKFNHDYEIDFFPVTEPVIGGPAARVMSLRDGTKKMSKSDPSDLSRINMTDNSDMIANKIRKAKTDQYGLPSEPKGLEGRAEAQNLVSIYAALGDQSVESVLSEIGGKQFSDFKPMLVERATAVLSPISSEMDRILQDIPQLDKVLSDGAFKAKSVAKPILKKTFDIIGLN

SEQ ID NO: 187807 - protein, 299 aa, Unknown
  Bacterial polypetide isolated from the Sargasso Sea
MSKKIFSGVQPTGNLHLGNYIGAIKNFVDLQNNKDNSCIFCVVDLHAITVMQDPIELKNNIRETAAAFIASGIDPKKSIIFNQSLVPAHSEGSWILGCVARMGWLNRMTQFKEKAGKDKEKASVGLYIYPILMASDILLYDATHVPVGDDQKQHLELCRDIAQKFNNEYKCPDFLRPPEPLIQKHFSRIMSLKDGSKKMSKSDIAEGSRINLTDNEDQIINKIKKAKTDNDTLPGKEDGLKGRAEAENLMGIYSSLSNQNITDTLNEFEGKNFSELKNKLSEIIVNKLSPISKEIQKLL

SEQ ID NO: 187808 - protein, 178 aa, Unknown
  Bacterial polypetide isolated from the Sargasso Sea
MNSKKILTGITTTGTPHLGNYVGAIRPAIASSKEQDHDSFFFLADYHALIKSKDCEGLRQSCLEVAATWIASGLDIDHTYFYRQSDIPEILELNWILSNFTAKGLMNRAHAYKAAVDGNIEYNVSEPDKGITMGLFSYPVLMAADILMFNATHVPVGQDQVQHIEMTRGIAQRFNHHY

SEQ ID NO: 187809 - protein, 333 aa, Unknown
  Bacterial polypetide isolated from the Sargasso Sea
MSKKIFSGVQPTGNLHLGNYLGAIKNFVNFQNQTNTDCIYCVVDLHAITVKQDPGKLKANIRETTAAFIASGLDHKKSIIFQQSMVAAHSEFSWILGCSARMGWLNRMTQFKEKAGKDKEKASVGLYVYPVLMAADILLYDTTHVPVGEDQKQHLELTRDIAQKFNLDFNSNDFLKIPEPMIQKEFARIMSLKDGTKKMSKSDPSEMSRINLNDTKEEIENKIKKAKTDTLALPDNIKELENRPEAKNLLGIYSSLNNQEINKTIKEFSGKSFSEFKKKLSEIAIEKIYPISLEMSKIKKDFTFIDSVLTDGNVKADTISSKKVSEIKKIIGF

SEQ ID NO: 187810 - protein, 297 aa, Unknown
  Bacterial polypetide isolated from the Sargasso Sea
MEKITKRILSGVQPSGDLHLGNYLGAIKNFVSLQKEFECFFCVVDLHAITVWQDPKILKQKTREVAAAFIASGIDPDKNTLFVQSQVPQHAQLAWIFNCVARMGWLNRMTQFKDKAGKNSENVSVGLFSYPTLMAADILIYLATHVPVGEDQKQHLELTRDIAQKFNNDFKTDIFPIPEPLILGEATRVMSLRDGLKKMSKSDPSDYSRIMLSDSEDEIVKKIKKAKTDPLPLPDNLDDAKNRPEAINLLTIYAALSDQEIGTVISEYGGKEFSQFKNDLGELASTKLSPISVEMNK

SEQ ID NO: 187811 - protein, 338 aa, Unknown
  Bacterial polypetide isolated from the Sargasso Sea
MTNKKRILSGVQPTGDLHIGNWLGAINNWVELQEKHETFLCVVDLHAITTEYDPKQLSKNTLSTAALYVACGIDPNICSIFVQSQISAHSELCWILNCMTPINWMERMIQFKEKSVQQGNNVSIGLFDYPILMAADILLYDADYVPVGEDQKQHLELARDIAQQRINAKFSKEENILKIPQPIIMKKGSKIMSLNDGSKKMSKSDINEGSRINLLDTPEIITKKIKRAKSDSYMGMEFNNPERPESRNLLMIYSLLSGKEVSELENDFSQTGWGTFKKIFTEQIVESLKPIQERYHVLINDPYELNKILINGKENAEAVANKTLSRIKSELGFFEIEK

SEQ ID NO: 187812 - protein, 253 aa, Unknown
  Bacterial polypetide isolated from the Sargasso Sea
MANKKRILSGVQPTGDLHIGNWLGAINNWVTLQEQYETFLCVVDLHAITASYNPKELSRNTISTAALYVACGIDPNICSIFVQSQISAHSELCWILNCMTPINWMERMIQFKEKSIQQGNNVSIGLFDYPILMAADILLYDADFVPVGEDQKQHLELARDIAQQRINARFSKDKNILKIPQPIIMKNGSKIMSLIDGSKKMSKSDPNEGSRINLLDAPEVITKKIKRAKSDSSIGIEFNNPKRPESKNLLMIY

SEQ ID NO: 187813 - protein, 224 aa, Unknown
  Bacterial polypetide isolated from the Sargasso Sea
MTKPIVLSGAQPSGQLTIGNYMGALRQWVNMQDDFDCLYCIVDLHAITTRQDPAALRKACLDAAALYLAVGIDPAKSTVFIQSHVPQHAELGWILNCYTQMGELSRMTQFKDKSARFENNVNVGLFGYPVLMAADILLYQANQVPVGNDQKQHLELTRDICTRFNNLYGEVFTLPEPFIPTEGARVMSLQDPTKKMSKSDDNEAKFIGLLEDPKQIVKKIKRAG

SEQ ID NO: 187814 - protein, 334 aa, Unknown
  Bacterial polypetide isolated from the Sargasso Sea
MANKKRILSGVQPTGDLHIGNWLGAINNWVTLQEQYETFLCVVDLHAITASYNPKELSNNTISTAALYVACGIDPKICSIFVQSQISAHSELCWILNCMTPINWMERMIQFKEKSIQQGNNVSIGLFDYPILMAADILLYDADFVPVGEDQKQHLELARDIAQQRINARFSKDKNILKIPQPIIMKNGSKIMSLIDGSKKMSKSDPNEGSRINLLDPPEIITKKIKRAKSDSSIGIEFNNPERPESKNLLMIYSILSGKEISQCENEFSEAGWGTFKKLITEQLIESLEPIQKKYKLLINDPYQLNKILDEGKEKAEDLANQTLKRVKSKLGFF

SEQ ID NO: 187815 - protein, 335 aa, Unknown
  Bacterial polypetide isolated from the Sargasso Sea
MNTNPTILTGDRPTGQLHLGHYVGSLRQRVQLQHDHQQFILIADLQGLTDNGSDPQKISSNIFEVMADYLAVGIDPHKTTICLQSALPALAELSALYMNIVTVARVERNPTVKSEIAQKGFSRSLPVGFLAYPISQAADITAFKAGLVPVGDDQLPMIEQTNEIVHKMNSLTTTPVLQHCRALLSDVSRLPGIDGGAKMSKSLGNTLTLSASEEQIHRAVGAMYTDPTHLRVSDPGQIEGNVVFTYLDAFHPDPAFVAEMKAHYQRGGLGDRQCKNALEECLQTLLAPIRQRRATYIADKGMLLELLRQGSERAHRLTQQTLHEVMRGLGLPVLF

SEQ ID NO: 187816 - protein, 338 aa, Unknown
  Bacterial polypetide isolated from the Sargasso Sea
MSNKKRILSGVQPTGDLHIGNWLGAINNWVTLQDQYETFLCVVDLHAITASYNPKELSQNTISTAALYVACGIDPNICSIFVQSQISAHSELCWILNCMTPINWMERMIQFKEKSIQQGNNVSIGLFDYPILMAADILLYDADFVPVGEDQKQHLELARDIAQQRINARFSKDKNILKIPQPIIMKNGSKIMSLVDGSKKMSKSDPNEGSRINLLDAPEIITKKIKRAKSDSSIGIEFNNPERPESKNLLMIYSILSGKEISQCEKEFSETGWGTFKKLITEQLIESLEPIQKKYKLLINDPYQLNKILDEGKEKAEDLANQTLKRVKSKLGFFEMEQ

SEQ ID NO: 187817 - protein, 335 aa, Unknown
  Bacterial polypetide isolated from the Sargasso Sea
MEKPTNRILSGVQPSGDLHLGNYLGAIKNFVSLQKDYECFFCVVDLHAITVWQEPKVLASKTREVTAAFIASGIDPNKNNIFVQSQVPQHAQLAWLFNCVARMGWLNRMTQFKDKAGKNSENVSVGLFSYPTLMAADILIYLATHVPVGDDQKQHLELTRDIAQKFNNDFKVDLFPIPEPLIFGEATRVMSLRDGSKKMSKSDPSDYSRIMLTDTAENIIQKIKKAKTDPQPLPQNIDGLSSRPEAENLISIFASLQDVSIEKVISEYSGKEFSIFKKDLADLAVSKLEPITVEMNKLMNDISYIDSVLSIGKEKAKQVAEPVLAKTKEIIGFLS

SEQ ID NO: 187818 - protein, 193 aa, Unknown
  Bacterial polypetide isolated from the Sargasso Sea
MKKKIFSGVQPTGNLHLGNYLGAIKNFVALQNEKDNECVYCVVDLHAITVKQDPNILKDNIRETTAAFLASGLDYKKSIIFNQSLVPAHSEGSWILGCIARMGWLNRMTQFKEKAGKDKEKASVGLYIYPILMAADILLYDSTHVPVGEDQKQHLELSRDIAQKFNLDFKAPDFLIAPEPLIQKNFSRIMSLK

SEQ ID NO: 187819 - protein, 333 aa, Unknown
  Bacterial polypetide isolated from the Sargasso Sea
MGKKIFSGVQPTGNLHLGNYLGAIKNFVELNNDDSNQCFFCVVDLHAITVKQDPKELKKNIRETVATFIASGIDPKKSIVFNQSGVAAHSEGAWILSCVARMGWLNRMTQFKEKAGKDKEKASIGLYSYPVLMAADILLYDASHVPVGDDQKQHLELCRDIAQKFNNDFGVEGFLKVPEPLIQKEFSRIMSLKDGSKKMSKSELSDLSRINLTDDKDQIINKIKKAKTDPLPMPKDIKELENRLEAQNLLGIYASLSNSTLESSIANFVGKNFSEFKNELSELVVNKIIPISKEIKKLLNDQSYLDSILLDGVEHAEKIASKKMKNIKEIVGF

SEQ ID NO: 187820 - protein, 274 aa, Unknown
  Bacterial polypetide isolated from the Sargasso Sea
MDAAALYLAVGIDPAKSTVFIQSHVPQHAELGWILNCYTQMGELSRMTQFKDKSARFENNVNVGLFGYPVLMAADILLYQANQVPVGNDQKQHLELTRDICTRFNNLYGEVFTLPEPFIPTEGARVMSLQDPTKKMSKSDDNEANFIGLLEDPKQIVKKIKRAVTDSDEPAVVRFDPENKPGVSNLLTLMSGVTGRSIPELEQHFEGKMYGHLKTETAEAVVALLEPIQARFHELRQDEAHLQAILAAGAQKARERAEKTLASVYDVVGFVPRA

SEQ ID NO: 187821 - protein, 333 aa, Unknown
  Bacterial polypetide isolated from the Sargasso Sea
MGKKIFSGVQPTGNLHLGNYLGAIKNFVDLNKDKDNKCIFCVVDLHAITVKQDPKELKNNIQETVATFVASGIDPKKSIIFNQSSVAAHAEGAWILSCVARMGWLNRMTQFKEKAGKDKEKASIGLYSYPVLMAADILLYDATHVPVGDDQKQHLELCRDIAQKFNNDFEVENFLQVPEPLIQKEFSRIMSLKDGSKKMSKSELSDLSRINLTDNKDQIINKIKKAKTDPLPMPQDIKELDERLEAKNLIGIYSSLTNSTLENAVKNFAGKNFSEFKEQLAEELVNKIEPISNEIKKLLGDKSYLDKILLDGVEKANLIASKKIERIKEIVGF

SEQ ID NO: 187822 - protein, 334 aa, Unknown
  Bacterial polypetide isolated from the Sargasso Sea
MNKKKLVFSGVQPTGNLHLGNYLGALKNFVSLQKQMECIYCVVDLHAITTFQKPSELQNNVLETVASFISTGLDPNKSIIFNQSSVPGHTELAWILNCVSRIGWLNRMTQFKDKAGSDKEKASVGLYIYPNLMAADILLYKATHVPVGADQKQHLELSRDIAQKFNNDFKCKDFFPIPDPLIPKNVSRVMSLRDGTKKMSKSEESDFSRINLKDDADEIIKKIKKAKSDSEPIPEDLSNLEKKPEALNLINIYAEITKKSLETVISEVAGKEYSFLKTKLSEVLISEIVPIGKEIKKLLDDKAYLMKILKKGKEKANIIAEENLKNIREKVGLI

SEQ ID NO: 187823 - protein, 335 aa, Unknown
  Bacterial polypetide isolated from the Sargasso Sea
MSKNFVKRVLSGVQPTGGLHIGNYLGAIKNFVDMQNDGECLFCIVDLHAITVWQDPKLLDMQKREVAAAFIASGIDPEKNSIFNQSEVPEHSQLAWLLNCTSQMGWLKRMTQFKDKAGKNQEKVSVGLFTYPVLMAADILVYKATHVPVGDDQKQHIELTRDIVIKFNNDYKKEIFPLPEPLILKSTSRVMSLKDGQKKMSKSDPSDLSRIMLTDEDDDIRKKISKAKTDEFPFPDNPSDLEKRPEAKNLITIFSGFTGTSIDNLITEYAGKNFSHLKSNLSEVVISGIKPIREEMKKLLEDKNHLDKVTNKGTKTARTIAAQVLKEVYETVGLK

SEQ ID NO: 187824 - protein, 335 aa, Unknown
  Bacterial polypetide isolated from the Sargasso Sea
MEKPTKRILSGVQPSGDFHLGNYLGAIKNFVSLQKEYECFFCVVDLHAITVWQDPKVLANKTREVTAAFIASGIDPKKNNIFVQSQVPQHAQLGWLFNCVARMGWLNRMTQFKDKAGKNSENVSVGLFSYPTLMAADILIYLATHVPVGDDQKQHLELTRDIAQKFNNDFKTDFFPIPEPLILGEATRVMSLRDGSKKMSKSDPSDYSRIMLTDTAENITQKIKKAKTDPEPLPQDKTGLEKRPEAENLISIFASLQDTSIENVIKDYAGKEFSTFKKDLADLSVSKLEPITSEMNKLMNDVSYIDSILKQGQDNAIAVAEPVLQKTKEIIGFLT

SEQ ID NO: 187825 - protein, 345 aa, Unknown
  Bacterial polypetide isolated from the Sargasso Sea
FFKLSKWEDKLIEYYEKNPESILPQSRYNEVLSFIKGGLKDLSISRTTFNWGIKVPDADKHVMYVWIDALCNYITALNYPNTDNESFKKFWPGIHVVGKDILRFHAVYWPAFLMAADIEPPKKIFAHGWWTNEGQKISKSVGNIINPYEIIDTYGLDQIRFFLFREVPFGNDGDFSKGAIAQRVNADLSNNYGNLIQRITSFIIKNSNSKVSKPTNYNQIDITLMKSFDETLDSYFKNMKSFQIDKALKNIFDYLSEINAYVDSQAPWSLKNTDNQRMNDVLYLVTLMTIKTSILLYPVIPSSIDKALNIYNLTINNLNLINFDDFSPESIFINKPKPLFPRIEL

SEQ ID NO: 187826 - protein, 332 aa, Unknown
  Bacterial polypetide isolated from the Sargasso Sea
MKKRILTGITTTGTPHIGNYLGAIKPALDLVEPDNDSYFFLADYHALIKQNNPNEIEKSVKNVALAWLSSGLDPEKSNFYRQSDIPEVHELTWILNCSASKGLLNRAHAYKSMAAENTQTGNDEDKAINMGLFSYPVLMAADILIFGATHVPVGPDQAQHMEMTRDIAGTFNHTYSNLLTLPEAIIQNEVSIPGIDGKKMSKSYNNIIPFLSSEKDLDKSISKIVTNSLEPGQPKDTKDCTLFQLYSCFATSDEINEMNQAYKDGIGWGDAKKKLFSIINSEISPIREKYFELNDKPNLLNDLFSEGAQKVRPQAKELVEKLREAVGINKIV

SEQ ID NO: 187827 - protein, 333 aa, Unknown
  Bacterial polypetide isolated from the Sargasso Sea
MSKKIFSGVQPSGNLHLGNYIGAIKNFVDLQNQKNNQCVYCVVDLHAITIKQDPKILKDSIRETTAAFLASGIDSGKSIIFNQSQVSAHAEGSWILGCIARMGWLNRMTQFKEKAGKDKEKASIGLYIYPILMAADILLYDATHVPVGEDQKQHLELSRDIANKFNLEFNVPNFFKVPDPLIQKNFSRIMSLKDGKKKMSKSDPSDLSRINLTDTKEEILNKIKKAKTDTMPIPNEISELKKRPEVENLLGIYSSLNNQTTEKTINEFNGKNFSDFKNNLAELVVEKISPISLEITKLLNNEDHIDQILKEGTEKANEQSSKKVKEMKKIIGF

SEQ ID NO: 187828 - protein, 324 aa, Unknown
  Bacterial polypetide isolated from the Sargasso Sea
MKTVFSGIQPSGLVHLGNLLGAINNWVKLSNENSKNYFCIVDLHSLTGLPNKNDLKKSINDTLKVLVASGINTKTSVIYKQSNLQEHAYLSWILSNFCQVGELQRMTQFKEKASSFGTHSGLLTYPILMASDILIHKANEVPVGDDQTQHLELTRNIAERFNTNYGEIFPIPEKTSGKSGARLMSLRHPENKMSKSSDDINGTIYFNDEKDNILKKFKSSVTDSENIVRYDPKNKPGISNLIEIYAAVNDKEISETEKEFENSQYGEFKIAVAETVIDYLDPIKNNFDDLTSDNLEDIVVSNLKSAKDSAQKTIIEVEEALGIS

SEQ ID NO: 187829 - protein, 333 aa, Unknown
  Bacterial polypetide isolated from the Sargasso Sea
MGKKIFSGVQPTGNLHLGNYLGAIKNFVELNNDKANECIFCVVDLHAITVKQDPKELKKNIRETVATFIASGIDAKKSIIFNQSGVAAHSEGAWILSCVARMGWLNRMTQFKEKAGKDKEKASIGLYSYPVLMAADILLYDATHVPVGEDQKQHLELCRDIAQKFNNDFGIEDFLKVPEPLIQKEFSRIMSLKDGSKKMSKSELSDLSRINLTDDKDQIINKIKKAKTDTLPMPKDIKELEGRLEAQNLLGIFASLSNSTLETSIEKFAGKNFSEFKQELSELLVNKIMPISEEIKKLLQDQSYLDSILLDGVEKANKIASKKIKNIKETVGF

SEQ ID NO: 187830 - protein, 332 aa, Unknown
  Bacterial polypetide isolated from the Sargasso Sea
MTKPIVLSGAQPSGELTIGNYMGALRQWVAMQDSHDCLYCVVDLHAITVRQDPQALREACLDTLALYLACGVDPKKSTVFIQSQVPQHTQLGWALNCYTQMGELSRMTQFKDKSQKHANNINVGLFGYPVLMAADILLYQANEIPVGQDQKQHLELTRDIATRFNNAYGETFTIPEPFIPEHGAKVMSLQDPLKKMSKSDDNRNNVIGLLEDPKAVMKKLKKAMTDSDEPPVVRFDMENKPGVSNLLSLMSGITGQSIASLEAEFEGKMYGHLKGAAGEAVVGMLEPLQERYRALRADRAYLDQVMKAGAENAQARAEVTLKKVYEKIGLLV

SEQ ID NO: 187831 - protein, 322 aa, Unknown
  Bacterial polypetide isolated from the Sargasso Sea
MAKILTGIQSTGTPHLGNILGAIIPAVDMANSTNDESYLFIANMHSLTQIKNEKILKENTFSTAATWLAFGLDPEKTCFYRQSDVPEVTELAWYLSCFFPYQRLKLAHSFKDKSDNLKDVNSGLFSYPMLMSADILLYDADIVPVGKDQLQHLEMTRDVASRFNNLMGETFIIPEAKIQDDTKYITGTDGEKMSKSKNNIIDIFVDDKTLRKQIMKIETHSLSVEDPKNPEECNVFKLYEVVASTNEIEQLKKQYLKGGIGYGESKELLYDKILNRFSENREKYFDLLQNRFKVEDLLSKGSKKARVQAQKVLKRVRSRLGF

SEQ ID NO: 187832 - protein, 321 aa, Unknown
  Bacterial polypetide isolated from the Sargasso Sea
MSRILTGIQSTGTPHLGNILGAIIPAIEESKKNKDSYLFIADLHSLTQIKDPVELSENTYSTAAAWLAFGLDTSNTVFYKQSDVPTTTELSWVLSSLFPYQRLTLAHSFKDKSNQLKDVNVGLFTYPMLMAADILLYDANVVPVGKDQLQHLEITRDVANKFNNKYGETLVIPEALTNDETKYVIGTDGQKMSKSKNNIIDIFLSEKMLKKQIMSIETDSTPLESPKNAESCNVFKIYTLLGSPDQVKNLKTKYENGGFGYGHAKQELFELILEKFKAERERYDHLMSSKKEIDLILSEGAEKAMKTANEVMNRVRKKLGY

SEQ ID NO: 187833 - protein, 191 aa, Unknown
  Bacterial polypetide isolated from the Sargasso Sea
MSKKIFSGVQPTGNLHLGNYLGAIKNFVDLNNDDQNECIFCVVDLHAITTKQDKDELSNNIRETTATFIASGIDPSKSIIFNQSKVHAHAEGSWMLSCMAPMGWLNRMTQFKEKAGKDKEKASVGLYIYPILMASDILLYDATHVPVGEDQKQHLELTRDIAQKFNKDFNCEDFLRVPEPLIKKHFSRIMS

SEQ ID NO: 187834 - protein, 333 aa, Unknown
  Bacterial polypetide isolated from the Sargasso Sea
MSKKIFSGVQPTGNLHLGNYLGAIKNFVDLNNDNRNECIFCVVDLHAITVRQDKDQLKNNIRETTATFLASGINPNKSIIFNQSKVHAHSEGSWMLSCIAPMGWLNRMTQFKEKAGKDKEKASVGLYIYPILMASDILLYDATHVPVGEDQKQHLELTRDIAQKFNKDYDCDDFLKVPEPLIKKNFSRIMSLKDGLKKMSKSDPSDLSRINLTDTKDEIINKIKKAKTDSLPIPFEEQKLKDRHEAENLLGIYSSISDQTLDKTLKEFGGKNFSDLKRQLAEVLSSKISPISDEIKKLINDQNYLDKVLAEGAFKAEEIAGKKIKEMKKIIGF

SEQ ID NO: 187835 - protein, 334 aa, Unknown
  Bacterial polypetide isolated from the Sargasso Sea
MSSFQKRVFSGVQPTGTLHLGNYLGAIKNFVELQKEFECIYCVVDQHAITVEQNPAELRSNTLEVLASFIAAGVDYKKQIIFQQSSVAEHSQLAWVFNCVSRIGWLNRMTQFKDKAGKNKENVSVGLMVYPNLMAADILAYLATHVPVGDDQKQHLELSRDIAQKFNNDFKVDFFPLPEPLIYGNATRVMSLRDGTKKMSKSDASEFSRILLTDSDDDISSKIKKAKSDSDLIPDDKDQLQNKPECLNLINILSACSNESIEKTLVSYAGKEYSKLKNDLADKLIQVIGPIRTEILNLLNNKDELNKVLDMGSEKASTIAGPILKEVYKIVGFR

SEQ ID NO: 187836 - protein, 334 aa, Unknown
  Bacterial polypetide isolated from the Sargasso Sea
MTSFQKRVFSGVQPTGTLHLGNYLGAIKNFVELQKEFECIYCVVDQHAITVEQNPNELRSNSLEVLASFIAAGVDYKKQIIFQQSSVAEHSQLAWLFNCVSRIGWLNRMTQFKDKAGKNRENVSVGLMVYPNLMAADILAYLATHVPVGDDQKQHLELSRDIAQKFNNDFKVDFFPLPEPLIYGNATRVMSLRDGTKKMSKSDASELSRILLTDSDDDISSKIRKAKSDSDLIPEHKDQLQNKPECLNLINILSACLDQSIEKTLAGYAGKEYSKLKNDLADTLIQVVGPVRKEILNLLDNKDELNKILQVGSEKASTIAGPIIKEVYKIVGFR

SEQ ID NO: 187837 - protein, 154 aa, Unknown
  Bacterial polypetide isolated from the Sargasso Sea
MKKKIFSGVQPTGNLHLGNYLGAIKNFVDLNNETQNECIFCVVDLHAITVSQNPKDLKSNIHETVATFVASGIDPKKSIIFNQSQVSAHSEAAWILSCVARMGWLNRMTQFKEKAGKDKEKASIGLYSYPVLMAADILLYDSTHVPVGDDQKQH

SEQ ID NO: 187838 - protein, 333 aa, Unknown
  Bacterial polypetide isolated from the Sargasso Sea
MSKKIFSGVQPTGNLHLGNYLGAIKNFVDLNNVNDNKCIFCVVDLHAITVKQDPKELKNNIRETVATFIASGIDPKKSIIFNQSGVAAHSEGAWILSCVARMGWLNRMTQFKEKAGKDKEKASIGLYSYPVLMAADILLYDATHVPVGDDQKQHLELCRDIAQKFNNDFEVENFLQVPEPLIQKEFSRIMSLKDGSKKMSKSELSDLSRINLTDDKDQIINKIKKAKTDPLPMPQNIKELNERLEAKNLLGIYSSLTNSSLENSINNFAGKNFSEFKEKLTEELVNKIEPISNEIKKLLGDKSFLDEILLDGVEKANLIASKKIERIKEIVGF

SEQ ID NO: 187839 - protein, 333 aa, Unknown
  Bacterial polypetide isolated from the Sargasso Sea
MKNKKILTGITTTGTPHLGNYVGAIRPAIASSKEKDHDSFFFLADYHALIKSKDPEGLRQSCLEIAATWIASGLDIDNTYFYKQSDIPEILELNWILSNFTAKGLMNRAHAYKAAVDDNEKADPDKGITMGLFSYPVLMAADILMFKATHVPVGQDQVQHIEMTRDIAQRFNHHYEEIFVIPEGVIDKESSVLPGLDGRKMSKSYGNIIPLFCDSKTLRKHVMKIKTNSLEPGEPKSSEDCLLFDIYKSFASDSKISSMKKDLEGGISWGDAKNQLYELLDEQLSNHRLRYDELMNDPSYLDKVLRDGAERAREVAHTNLNEIKSVIGLGSLS

SEQ ID NO: 187840 - protein, 244 aa, Unknown
  Bacterial polypetide isolated from the Sargasso Sea
MSKPVVLSGIQPTGGMTIGNYVGAINQWLKLQEDHESFFMLVDLHAITVRQEPELLRSRVLDGVALYAACGIDPEKSALFVQSQVPEHAQLAWVLNCYAQMGELNRMTQFKDKSSKHANNVNVGLFSYPVLQAADILLYQADQVPVGEDQKQHLELTRDIATRFNNLYGDVFKLPEPYIPEFGARVMSLQDPLKKMSKSDENPNGYIMLLDEPKKIEKKLKKAVTDSDEQARIYFDRTEKPGVS

SEQ ID NO: 187841 - protein, 212 aa, Unknown
  Bacterial polypetide isolated from the Sargasso Sea
ASVGLYIYPVLMAADIILYDTTHVPVGEDQKQHLELTRDIAQRFNLEYKSQNFLKVPEPLIQREFSRIMSLKDGTKKMSKSDPSDLSRINLNDSNDQIINKIKKAKTDNDPMPKSKSDIEKRNEIKNLYNIYSSLSNQSETKTIEEFSNKNFSDFKNRLAELVVSNVEPISKEINKLNKDNRFIDEILEQGAEKADKIASKKVKEIKEIIGF

SEQ ID NO: 187842 - protein, 333 aa, Unknown
  Bacterial polypetide isolated from the Sargasso Sea
MNSKKILTGITTTGTPHLGNYVGAIRPAIASSKEQDHDSFLFLADYHALIKNNDRDELRQSCLEIAATWIAFGLDIENTYFYRQSDIPEILELNWILSNFTAKGLMNRAHAYKAAVDENEKGDPDKGITMGLFSYPVLMAADILMFNATHVPVGQDQVQHIEMTRDIAQRFNHHYGEIFVIPEGVIDNESSILPGLDGRKMSKSYGNIIPLFSDSKTLRKHVMKIKTNSLEPGEPKSTEDCLLFDIYKSFASESEISSMKKDLEDGMSWGDAKNELYELLDGQLSNHRLKYDELIGDPAYLDKVLQQGAERAREVAKSNLHEIKSAIGLGSLS

SEQ ID NO: 187843 - protein, 185 aa, Unknown
  Bacterial polypetide isolated from the Sargasso Sea
MKTVFSGIQPSGLVHLGNLLGAINNWAKLSNEDSKNYFCIVDLHSLTAMPNKSDLKDSIKNTLKVLLASGINLENSVIYVQSDLKHHAYLSWILSNFCQVGELQRMTQFKEKASSFGTHSGLLTYPILMAADILIHKANEVPVGDDQTQHLELTRNIAERFNNNYGEIFPIPEKTSGKYGARLMS

SEQ ID NO: 187844 - protein, 332 aa, Unknown
  Bacterial polypetide isolated from the Sargasso Sea
MRKRILTGITTTGTPHIGNYLGAIKPALELVASDNDSYFFLADYHALIKQTDPREIEASVKNVALAWLSSGLNPDQSHFYRQSDIPEVHELTWILNCSAAKGLLNRAHAYKAIVAENTESGSDEDKAINMGLFSYPVLMAADILLFEATHVPVGPDQAQHMEMTRDIAGKFNHTYSNILTIPETIIQSEVSVPGIDGRKMSKSYNNIIPFLSSEKALQKSIAKIITNSLEPGEPKEHKSCTLFQLYSMFANAEEINNMKLSYKDGIGWGDVKKDLFTAINNEIVPIREKYAALKDQPDLLNDLFSDGASRVRPQAQELVGKLRELVGISKIV

SEQ ID NO: 187845 - protein, 223 aa, Unknown
  Bacterial polypetide isolated from the Sargasso Sea
FKEKAGKDKEKASVGLYIYPVLMAADILLYDATHVPVGEDQKQHLELSRDIAQKFNLDFNAPDFLRAPEPLIQKNFSRIMSLKDGRNKMSKSDPSDLSRINLTDNKDQIVNKIKKAKTDNEQLPVDDKNLSDRPEVENLLGIYSSLSGQSLQNSINEFSGKNFSDFKKKLAEIVVEKISPISIEINKLQKDINYIDTVLSDGGKRAEMIASKKVTEIKKLIGF

SEQ ID NO: 187846 - protein, 333 aa, Unknown
  Bacterial polypetide isolated from the Sargasso Sea
MSKKIFSGVQPTGNLHLGNYLGAIKNFVDLNNDDQNECIFCVVDLHAITIKQDKHELKNNIRETAATFIASGIDPSKSIIFNQSKVYAHAEGSWMLSCLAPMGWLNRMTQFKEKAGRDKEKASVGLYIYPILMASDILLYDATHVPVGEDQKQHLELTRDIAQKFNKDFDCHEFLKAPKPLIKKNFSRIMSLKDGLKKMSKSDPSDLSRINLTDTKDEIINKIKKAKTDSFPIPNEDQKLKGRPEARNLLGIYSSILGQTLDKTLEEFGGKNFSDLKSRLADVLSSKISPISDEIKRLIDDYEYLDKILAEGASKAEEIAGKKIAEMKKIIGF

SEQ ID NO: 187847 - protein, 147 aa, Unknown
  Bacterial polypetide isolated from the Sargasso Sea
MVKKIFSGVQPTGNLHLGNYIGAIKNFVDLQNQDGNECVYCVVDLHAITTKQNPTTLKKNIRETTAAFLASGIDPKKSIIFNQSLVSAHSEGSWILGCIARMGWLNRMTQFKEKAGKDKEKASIGLYIYPVLMAADILLYDATHVPV

SEQ ID NO: 187848 - protein, 246 aa, Unknown
  Bacterial polypetide isolated from the Sargasso Sea
AQLGWALNCYTYFGELSRMTQFKDKSARYSENINAGLFDYPVLMAADILLYQTNQVPVGEDQKQHLELSRDIAQRFNALYGEVFKVPEPFIPASGARVMSLLEPTKKMSKSDDNRNNVIGLLEDPKSVVKKIKRAVTDSDEPPVVRYDQQNKAGVSNLLDILSGVTGQSIAELEQHFEGKMYGHLKGEVADAVSGMLLELQERYNRFRNDEAFLNQVMKDGAEKASARASQTLKAVYEAIGFVAKP

SEQ ID NO: 187849 - protein, 263 aa, Unknown
  Bacterial polypetide isolated from the Sargasso Sea
MHKKRVFSGVQPTGNLHLGNYLGAIKNFVNLQNKFECVYCIVDLHAITNRQDPKELKSNILETIASFVASGLDPEKNIIFNQASVSAHSELAWIFNCVARIGWMNRMTQFKEKAGANKENASVGLLVYPNLMAADILIYKATHVPVGEDQKQHLELTRDIAKKFNNDFKCGEYFPVVEPLIPEEVSRVMSLRDGKKKMSKSEDSDQSRINLKDDKDLINQKIKKAKTDNDPIPSEINGLKNRHEALNLISIYASINGIKVDKV

SEQ ID NO: 187850 - protein, 283 aa, Unknown
  Bacterial polypetide isolated from the Sargasso Sea
PKPNDLQNNVLETVASFISTGLDPNKSIIFNQSSVPGHTELAWILNCVSRIGWLNRMTQFKDKAGSDKEKASVGLYIYPNLMAADILLYKSTHVPVGADQKQHLELSRDIAQKFNNDFNCKDFFPIPEPLIPKNVSRVMSLRDGTKKMSKSEESDFSRINLKDNADEIIKKIKKAKSDSEPIPENLSNLEKKPEALNLINIYAEMTKKNLETVLNEVAGKEYSFLKTKLSEVLISEIVPIGKEIKKLLDDKAHLMLILKKGKEKANIIAEENLKNIREKVGLI

SEQ ID NO: 187851 - protein, 333 aa, Unknown
  Bacterial polypetide isolated from the Sargasso Sea
MTKKIFSGVQPTGNLHLGNYLGAIKNFVELQNEKDNNCIYCVVDLHAITLKQDPKELKNNIRETAATFIASGLNPNKSILFNQSLVPAHSEGAWILSCIGRMGWLNRMTQFKEKAGKDKEKASVGLYIYPILMAADIMLYNATHVPVGDDQKQHLELCRDIAQKFNNEYNVEDFLVPPEPLIQKQFSRIMSLKDGSKKMSKSDVSDLSRINLKDSKDLIISKIKKAKTDPHPIPNIIEELENRPEAENLLGIYSSLKNQNIKTTLREFGGKNFSEFKTNLSEQLIDKISPIANEINKLLNNADYLDKILLTGAEKANDIAENKVREIKEIIGF

SEQ ID NO: 187852 - protein, 333 aa, Unknown
  Bacterial polypetide isolated from the Sargasso Sea
MGKKIFSGVQPTGNLHLGNYLGAIKNFVELNNDDANECIFCVVDLHAITVKQDPKELRKNIRETVATFIASGIDAKKSIIFNQSGVAAHSEGAWILSCVARMGWLNRMTQFKEKAGKDKEKASIGLYSYPVLMAADILLYDATHVPVGDDQKQHLELCRDIAQKFNNDFGVEDFLKVPEPLIQKEFSRIMSLKDGSKKMSKSELSDLSRINLTDDKDQIINKIKKAKTDTLPMPKDIKELEGRLEAQNLLGIFASLSNSTLETSIEKFAGKNFSEFKQDLSELLVNKIMPISDEIKKLLQDQSYLDSILLDGVEKANKIASKKIKNIKETVGF

SEQ ID NO: 187853 - protein, 322 aa, Unknown
  Bacterial polypetide isolated from the Sargasso Sea
MSKILTGVQSTGTPHLGNILGAIIPAIELSKKSENESFLFIADLHSLTQIKKAEELKENTFATAAAWLAFGLDVDKTVFYKQSDVTQVTELSWYLSCFYPYQRLTLAHSFKDKSNSLRDINTGLFTYPILMAADILLYDAKFIPVGKDQLQHIEITRKVASKFNSINGETFIIPEPLIQEKHKNIPGTDGNKMSKSKNNTINIFLSDKKLRKQIMSIATDSTPMEKPKNPDNCNVFKIYSLIASQKDIKKMKSKYLSGGFGYGDAKNILFEEILNKFKSERDLFNHFISNPDEIYDILEVGAKKARKIADNVLNRVRKKIGY

SEQ ID NO: 187854 - protein, 273 aa, Unknown
  Bacterial polypetide isolated from the Sargasso Sea
MGRVFSGVQPTGNLHLGNYLGAIKNFVLLQNDHKCIYCVVDMHAITVKQDPKILKSNILEVAAAFVASGINPEKSVIFVQSQVSAHAELAWIFNCVARLGWLNRMTQFKEKAGKNRENASAGLYTYPVLMAADILAYHATHVPVGDDQRQHLELARDIAQKFNNDFKADYFPITEPVIMGNATRVMSLRDGKNKMSKSDVSDYSRLNLTDSADDISNKIRKAKTDPLPLPDESCLSSEKKFNEDIIANRPEAVNLLSIYSALSNESLKEVVLK

SEQ ID NO: 187855 - protein, 532 aa, Unknown
  Bacterial polypetide isolated from the Sargasso Sea
MGQPVGIARGPGLQLRAGADLGCADPRAARRRHRRAVLHADGVCRRQREPRARRAEPVSAAAARRRPHPGGAAADEAIDRAVAHRALRFHHRPRAGRDGRADELLAAPARQRRLCRPERHPVPIRLASLTTTMFPERIFSGMRPTGSLHLGHYHGVLKNWVKLQSEYPCFFCVVDWHALTTHYETPEVIEKNVWDVLIDWLASGIDPAQATLFIQSKVPEHAELALLLGMSTPLGWLERVPTYKEQMEKLKDKDLSTYGFLGYPVLMAADILLYRGSLVPVGEDQVPHVEMTREIARRFNYLYGREPGFEEKALDAAKKLGGKRAKLYHELRNAYQQEGDDEALEQARAMLQESQSLSMSDRERLFGYLEGARKIILVEPQALLTEASRMPGLDGQKMSKSYGNTIGLREDAETITKKVRTMPTDPARVRRTDPGDPDKCPVWQLHQVYTDEATHDWVQKGCRSAGIGCLDCKQPVVEGILREQQPMLERAQKYMDDPSLLRAIVADGCDKARKYATETMRDVRDAMGLSYN

SEQ ID NO: 187856 - protein, 336 aa, Unknown
  Bacterial polypetide isolated from the Sargasso Sea
MKKEIYLTGITTTGTPHIGNYVGAIRPGIQASIDRTKDNFYFLADLHALAKAGDPERIAKSTLEISAAWLALGLDINNAYFYRQSDIHEIPELTWILKSMTAKGLMNRAHSYKAQVQKNIESGAQDNDKGINMALYSYPILMAADILMFKSTHVPVGKDQKQHIEMTRDIAQRFNHKYGNILVVPEAVISEDTATLSGLDGRKMSKSYDNVIPLFSDEKKLKKLIMKIKTNSLEPGIPKDTDDSILYDIYQAFSSPEETENVKNLYAQGIAWGEMKKILYECINDQLKPARESYQRLIANPKKIEDELQKGAERAREISVPYMEEIRNAVGIRKLN

SEQ ID NO: 187857 - protein, 344 aa, Unknown
  Bacterial polypetide isolated from the Sargasso Sea
MSNAVQSEPIGKFNKRVFSGVQPSGGLTLGNYLGAIKRFVQMQDDDYETIYCVVDLHAITVWQNPKMLRKSTRELAAFFIASGLDPNKSILFNQSAVPEHAQLGWIFNCVARMGWMQRMTQFKDKAGKNAQNASLGLFGYPALMAADILAYHATHVPVGDDQKQHLELTRDIAVKFNHDYEIDFFPVTEPVIGGPAARVMSLRDGTKKMSKSDPSDLSRINMTDNSDMIANKIRKAKTDQYGLPSEPKGLEGRAEAQNLVSIYAALGDQSVESVLSEIGGKQFSDFKPMLVERATEVLSPISSEMDRIMQDIPQLDKVLNDGAFKAKSIAEPILKKTFDIIGLT

SEQ ID NO: 187858 - protein, 313 aa, Unknown
  Bacterial polypetide isolated from the Sargasso Sea
LGAIKNFVNLQNEKNNQCVYCVVDLHAITVKQNPKELKDSIRETTAAFIASGLDYKRSIIFNQSSVPSHSEGSWILSCVARMGWLNRMTQFKEKAGKDKEKASVGLYIYPILMASDILLYDTTHVPVGEDQKQHLELTRDIAQKFNLEFNCPDFFTAPEPLIQKTFARIMSLKDGKKKMSKSDPSDLSRVNLNDSKDVIINKIKKAKTDDKSMPEDNKNLNKRPEIENLLGIYSSLADQKIEKTINEFSGKNFSEFKTKLSEMVVEKISPISTEINKLQEDKEFIDKILRDGSERANEIASKKVNELKKIVGF

SEQ ID NO: 187859 - protein, 330 aa, Unknown
  Bacterial polypetide isolated from the Sargasso Sea
MKKRILTGITTTGIPHIGNYIGAIRPALELAKGSDESFFFLADYHSIIKNQNIDEIKHSVENVALSWLSCGLDPKKTYFYRQSDVPEILELSWVLTCVTAKGLMNRAHAYKAASSINTDDPDKGITMGLFSYPVLMAADILMFDSTHVPVGSDQVQHLEMTRDIAARFNHLFKPLLTLPEPIIQKNENVVLGTDGRKMSKSYGNVIPLLESEKNLKKSIMKIVTNSLEPGEPKESIDCNVFELYKYFATESEIQSMQQSYDDGISWGEAKEMLFNSVNQELQPIRSKYEELSKNKDHINDLLSDGAKKARLIAKEKILEIREAVGLSKIL

SEQ ID NO: 187860 - protein, 338 aa, Unknown
  Bacterial polypetide isolated from the Sargasso Sea
MANKKRILSGVQPTGDLHIGNWLGAINNWVTLQEQYETFLCVVDLHAITASYNPKELSKNTISTAALYVACGIDPNICSIFVQSQISAHSELCWILNCMTPINWMERMIQFKEKSIQQGNNVSIGLFDYPILMAADILLYDADFVPVGEDQKQHLELARDIAQQRINARFSKDKNILKIPQPIIMKNGSKIMSLIDGSKKMSKSDPNEGSRINLLDPPEIITKKIKRAKSDSSIGIEFNNPERPESKNLLMIYSILSGKEISQCENEFLETGWGTFKKLITEQLIESLEPIQKKYKLLINDPYQLNKILNEGKEKAEDLANQTLKRVKSRLGFFETEK

SEQ ID NO: 187861 - protein, 285 aa, Unknown
  Bacterial polypetide isolated from the Sargasso Sea
SIIKNQDSDSIKNSVKNVALAWLSSGLDPNKSYFYKQSDVPEIIELCWILNCVTAKGLMNRAHAYKAATSINENDPDKGITMGLFSYPVLMAADILMFDSTHVPVGSDQVQHLEMTRDIAARFNHLYKPILTLPDPIIQDKENVVPGLDGRKMSKSYGNVIPLLESEKILKKSVMKIVTNSLEPGEPKDSSDCTIFSLFKNFVDDSEMKSIQKAYDEGIAWGEAKEMLFNSINDELEPIRLKFEELKEDNDYINDLLSDGAKKARDIAKDKIFQIKEAIGITKIS

SEQ ID NO: 187862 - protein, 333 aa, Unknown
  Bacterial polypetide isolated from the Sargasso Sea
MSKKIFSGVQPTGNLHLGNYLGAIKNFVNLQKDKQNNCIYCVVDLHAITVKQDPKVLKKNIRETTATFVASGLNPKESIIFNQSMVPSHSEGAWLLGCIARMGWLNRMTQFKEKAGKDKEKASVGLYIYPILMASDILLYDTTHVPVGEDQKQHLELTRDIAQKFNLDFDCKDFLTAPEPLIQKNFSRIMSLKDGTKKMSKSDPSDQSRINMTDDKDLIVSKIKKAKTDSAKLPENDKDINNRPELKNLYGIFSSIQNQTLDLTIDEFKGKNFSDFKNKLAEVLVEKIYPISNETNKLLKDEKFIDQILLDGSEKAEVIAKKKVNDIKNIIGF

SEQ ID NO: 187863 - protein, 323 aa, Unknown
  Bacterial polypetide isolated from the Sargasso Sea
MKTVFSGIQPTGKVHLGNLLGAINNWVHLSNEENKNYFCVVDLHSLTTHPDPSLMQENINETIKVLISSGINQKNSNIYIQSNVPEHVQLSWILSNFCQIGELQRMTQFKEKADQLGSHAGILTYPVLMAADILIHKANEVPVGDDQTQHLELTRNIVERFNNSYGEIFPLPERTTGKVGARLMSLRHPDNKMSKSKDDLNGTIYFDDSKDEIIKKFKSSVTDSENEIKFDNETKKGISNLIDIYSTLHELTHADVENKFKNSSYGEFKIEVGESVVSYLEPIKERYDSLSEGDVASLIKDNLDDVKNSAKKTMDEVSAVVGV

SEQ ID NO: 187864 - protein, 285 aa, Unknown
  Bacterial polypetide isolated from the Sargasso Sea
VLQDPKVLANKTREVTAAFIASGIDPKKNNIFVQSQVPQHAQLGWLFNCVARMGWLNRMTQFKDKAGKNSENVSVGLFSYPTLMAADILIYLATHVPVGDDQKQHLELTRDIAQKFNNDFKTDFFPIPEPLILGEATRVMSLRDGSKKMSKSDPSDYSRIMLTDTAENITQKIKKAKTDPEPLPQDKTGLEKRPEAENLISIFASLQDTSIESVIKDYAGKEFSTFKKDLADLSVSKLEPITSEMNKLMSDVSYIDSILNQGKENAIAVAEPVLQKTKEIIGFLS

SEQ ID NO: 187865 - protein, 333 aa, Unknown
  Bacterial polypetide isolated from the Sargasso Sea
MGKKIFSGVQPTGNLHLGNYLGAIKNFVDLNNDNKNECIFCVVDLHAITVKQDPKELKNNIRETVATFIASGIDPKKNIIFNQSRVAAHAEGAWILSCVARMGWLNRMTQFKEKAGKDKEKASIGLYSYPVLMAADILLYDATHVPVGDDQKQHLELCRDIAQKFNNDFDVENFLQVPEPLIQKEFSRIMSLKDGSKKMSKSDLSDLSRINLTDDKDQIINKIKKAKTDPLSMPSSTKELEERLEAKNLIGIYASLTNSSIEKSVQNFAGKNFSEFKENLSEVLVDKIEPISKEIKKLLEDKIYLEQILLEGVEKANLIASKKIDKMKEIVGF

SEQ ID NO: 187866 - protein, 339 aa, Unknown
  Bacterial polypetide isolated from the Sargasso Sea
MNKKNKERVFSGVQPTGSLHIGNYLGAIRNFVNVQNDYDSIFCIVDLHAITVWQDPKILSENIYEVAAAYIASGIDPSKATIFVQSQIPAHAELAWILNCVSRIGWLNRMTQFKEKAGKNREKVSVGLYVYPNLMASDILLYHANLVPVGDDQKQHLEITRDIAQKFNNDFCKSNKVGFFPIPEPMILPVASRVMSLRDGSKKMSKSDTSEMTRIEFADDNDLIMKKIMKAKTDPLPMPVTIEELDERPEINNLINIYGAFSGKKIENIIIDFEGKQLSDFKKELCEAVTDEIAPIRDKFLELKDDKTYLKEILHNGMIKAREKSDPIIEEVKSIVGLG

SEQ ID NO: 187867 - protein, 336 aa, Unknown
  Bacterial polypetide isolated from the Sargasso Sea
MNKKRVFSGVQPTGNLHLGNYLGAIKNFVNLQDRFECVYCIVDLHAITNRQDPKELKSNIYETVASFIASGLNPEKNIIFNQASVSAHSELAWVFNCVARIGWMNRMTQFKEKAGSNKENASVGLLVYPNLMAADILIYKATHVPVGEDQKQHLELTRDIAKKFNNDFNCKDYFPIVEPLIPKEISRVMSLRDGKKKMSKSESSDQSRINLKDDKDLIDQKIKKAKTDNDAIPSEIGGLKNRPEATNLLSIYASINNVDLSEVLKEFANKNFSTFKSNLSESLVEKICPIGNEIKKLLKDKNNLNKILINGAKRADLIANRNLKEIYEIIGLTKFT

SEQ ID NO: 187868 - protein, 238 aa, Unknown
  Bacterial polypetide isolated from the Sargasso Sea
MSSFQKRVFSGVQPTGTLHLGNYLGAIKNFVELQKEFECIYCVVDQHAITVEQNPAELRSNTLEVLASFIAAGVDYKKQIIFQQSSVAEHSQLAWVFNCVSRIGWLNRMTQFKDKAGKNKENVSVGLMVYPNLMAADILAYLATHVPVGDDQKQHLELSRDIAQKFNNDFKVDFFPLPEPLIYGNATRVMSLRDGTKKMSKSDASEFSRILLTDSDDDVSSKIKKAKSDSDLIPDDKN

SEQ ID NO: 187869 - protein, 275 aa, Unknown
  Bacterial polypetide isolated from the Sargasso Sea
NNVRETIAAFVASGLDYNKSIIFQQSMVPAHSEGAWILGCSARMGWLNRMTQFKEKAGKDKEKASVGLYVYPVLMASDILLYDTTHVPVGEDQKQHLELTRDIAQKFNQDFNSPSFFKLPEPMIQKNFSRIMSLKDGVKKMSKSDPSEMSRINLNDSKDTIVNKIKKAKTDTLPLPGNEKELENRPEAKNLIGIYSSLSNQNVSKTMEEFSGKNFSDFKNKLSEIVIEKIYPISKEMNKLKKDQNFTDKILKEGTHKASEIASKKIKDIKNIIGF

SEQ ID NO: 187870 - protein, 336 aa, Unknown
  Bacterial polypetide isolated from the Sargasso Sea
MHKKRVFSGVQPTGNLHLGNYLGAIKNFVDLQNKFECIYCIVDLHAITNRQDPKELKSNILETTASFIASGLNSEKNIIFNQASVAAHSELAWIFNCVARIGWMNRMTQFKEKAGVNKENASLGLLVYPSLMAADILIYKATHVPVGEDQKQHLELTRDIAKKFNNDFKCDNYFPIVEPLIPKEFSRVMSLRDGMKKMSKSEDSDQSRINLKDDKDLIDQKIKKAKTDNDPIPSEINGLKNRHEAANLISIYASINQIEVDKVLKEFGGKNFSTFKSKLSESLIERICPIGNEIKKLLKDKNHLKQILEKGSKKAEIIAQSNLREIYEVIGLTKFT

SEQ ID NO: 187871 - protein, 267 aa, Unknown
  Bacterial polypetide isolated from the Sargasso Sea
MSAGLNPDNTYFYRQSDIPEISELAWILGCVTSKGLINRSHAYKAAVDQNKSNNLDDDKAITMGLFSYPVLMAADILIFNATHVPVGSDQIQHLEMTRDIAGRFNHIYKNDLFNLPEAITNDDAKTIPGLDGRKMSKSYNNVIPFLCTEKELQKGVMRIVTNSLEPGVKKDTKDCNLFTIYSSFASNDQINALKKLYADGVGWGEAKKLVFNDLNAIIEPVRDRYFDLLQKPDYLNDVLDHGSSKVTPIAKELLEKVRDLVGIKKIS

SEQ ID NO: 187872 - protein, 314 aa, Unknown
  Bacterial polypetide isolated from the Sargasso Sea
MKNINKIVLSGVQPTGGLHIGNYLGAIKNFVSMQTEYDCFFCVVDLHAITVKQDPKLLKNNTYEAVATYLASGIDPVKSVIFNQSNVSSHSELAWIFNCITRMGWLNRMTQFKDKAGKDKENASSGLFIYPNLMAADILLYKATHVPVGDDQKQHLELTRDIAQKFNRDYECDGFFPIPEPIIDKNISRIMSLKNGEQKMSKSDPSDYSRISLTDSADQIEKKIKKAKTADTPMPDNNEDVSKLLEVNNLLNIFSGFSEIDKSKLIEKYKGQNFSNFKNNLAEVIIEHIKPISKEIDKLMSDKAYLNQNNFKWS

SEQ ID NO: 187873 - protein, 250 aa, Unknown
  Bacterial polypetide isolated from the Sargasso Sea
SSVAAHAEGAWILSCVARMGWLNRMTQFKEKAGKDKEKASIGLYSYPVLMAADILLYDATHVPVGDDQKQHLELCRDIAQKFNNDFKVENFFQVPEPLIQKEFSRIMSLKDGSKKMSKSELSDLSRINLTDDKDQIINKIKKAKTDPLPMPLDIKDLDERLEAKNLLGIYSSLTNSKLENSVKNFSGKNFSEFKEQLAEELVNKIEPISNEIKKLLGDKSYLDKILLDGVEKANLIASKKIERIKEIVGF

SEQ ID NO: 187874 - protein, 333 aa, Unknown
  Bacterial polypetide isolated from the Sargasso Sea
MNSKKILTGITTTGTPHLGNYVGAIRPAIASSKEQDHDSFFFLADYHALIKSKDCEGLRQSCLEIAATWIASGLDIDHTYFYRQSDIPEILELNWILSNFTAKGLMNRAHAYKAAVDENEKVDPDKGITMGLFSYPVLMAADILMFNATHVPVGQDQVQHIEMTRDIAQRFNHHYGEIFAVPEGVIDNESSILPGLDGRKMSKSYGNIIPLFCDSKSLRKHVMKIKTNSLEPGEPKSTEDCLLFDIYRSFASESEINSMKKGLEDGMSWGDAKNELYELLDGQLSNHRLIYDDLIGDPSYLDKVLRQGAERAREVAKSNLHEIKSAIGLGTLS

SEQ ID NO: 187875 - protein, 227 aa, Unknown
  Bacterial polypetide isolated from the Sargasso Sea
MKKKIFSGVQPTGNLHLGNYLGAIKNFVALQNEKQNECVYCVVDLHAITVKQDAKTLKHNIRETTAAFLASGLDYKKSIIFNQSLVPAHAEGSWILGCIARMGWLNRMTQFKEKAGKDKEKASVGLYIYPILMASDILLYDSTHVPVGEDQKQHLELSRDIAQKFNLDFNAPDFLIAPEPLIQKNFARIMSLKDGTKKMSKSDPSDLSRINLTDEKDEIVNKIKKAK

SEQ ID NO: 187876 - protein, 325 aa, Unknown
  Bacterial polypetide isolated from the Sargasso Sea
VQPTGNLHLGNYLGAIKNFVDLNNDNDNKCIFCVVDLHAITVKQEPKELKNNIRETVATFIASGIDPKKSIIFNQSRVAAHAEGAWILSCVARMGWLNRMTQFKEKAGKDKEKASIGLYSYPVLMAADILLYDATHVPVGDDQKQHLELCRDIAQKFNNDFNVENFLQVPEPLIQKEFSRIMSLKDGSKKMSKSELSDLSRINLTDDKDQIINKIKKAKTDPLPMPQSIKELDQRLEAKNLLGIYSSLTNSSLENSVENFVGKNFSEFKEKLTEELVNKIEPISKEIKKLLGDKRYLDEILLDGVEKANLIASKKIERIKEIVGF

SEQ ID NO: 187877 - protein, 337 aa, Unknown
  Bacterial polypetide isolated from the Sargasso Sea
MIPKAKPIVLSGAQPSSQLTIGNYLGALRQWDRMQDDYDCLYCIVDLHAITVRQDPAALRSASLDSLALYLACGIDPNRSSVFMQSHVPEHSQLNWILNCYTQFGELSRMTQFKDKSERHANNVNAGLFTYPVLMAADILVYNAHQIPVGHDQKQHLELARDIANRFNALHGEIFTVPEPYIPGVAARVMSLQEPTKKMSKSDENPWNFVGLLEDPKMISKKFKKAMTDSEDPPRVAYDLENKAGVANLLSILSGVTGKSIDSLVAEYEGKMYGHLKGDVADAVIALLEPVQAKFHEIRQDQSLMNQVLKQGAAEARARAAVTLEKVYDAVGFVLPG

SEQ ID NO: 187878 - protein, 332 aa, Unknown
  Bacterial polypetide isolated from the Sargasso Sea
MSNNFKQKVFSGVQPTGNLHLGNYLGAIKNFVELQKKMECIYCVVDLHAITVFQDPKELKKNMLETTATFIACGLDFKKSIIFNQSSVSEHSELAWIFNCISRIGWMNRMTQFKEKAGKNKENASVGLYVYPNLMAADILLYKATHVPVGDDQKQHLELVRDIAQKFNNDFKSDNFFPIPEPLIQKKLSRVMSLRDGKNKMSKSDESEYSRINLQDTEDEIYKKIKKAKTDSEPIPSKIEDLKNRPEALNLINIYSFITNKTLENTLASMAGKDFSKLKKELSDVLVATICPIGKKIKELKKDEKYLIDILKKGSNKAKEIAKININKVKDI

SEQ ID NO: 187879 - protein, 336 aa, Unknown
  Bacterial polypetide isolated from the Sargasso Sea
MDKVTKRILSGVQPSGDLHLGNYLGAIKNFVSLQKEFECFFCVVDLHAITVWQDPKLLKQKTREVAAAFIASGIDPEKNTLFVQSQVPQHAQLAWIFNCVARMGWLNRMTQFKDKAGKNSENVSVGLFSYPTLMAADILIYLATHVPVGEDQKQHLELTRDIAQKFNSDFNTDIFPIPEPLILGEATRVMSLRDGLKKMSKSDPSDYSRIMLSDSEEEIVKKIKKAKTDPLPLPENLEEAKKRPEAINLLTIYAALNDLDLKNVVDNYAGKEFSQFKKDLGELASSKLSPISLEINKLMKDEKYLDTIISNGKDRAINIANPVLSKIYEIIGFFSQ

SEQ ID NO: 187880 - protein, 334 aa, Unknown
  Bacterial polypetide isolated from the Sargasso Sea
MTKNRILSGVQPSGDLHLGNYLGAIKNFVSLQKDYECFFCVVDLHAITVWQDPKELAQKTREVTAAFIASGIDPNENILFAQSQVPQHSQLAWIFNCVARMGWLNRMTQFKDKAGKDRENVSVGLFSYPNLMAADILIYLATHVPVGEDQKQHLELTRDIAQKFNNDFSTDLFPIPEPLIFGEATRVMSLRDGTKKMSKSDPSDYSRIMLSDNVDSIVQKIKKAKTDPHPLPATKEEAEKRPEALNLITIFAALSDQSTDKVLEQYSGKEFSLFKKDLADLAAEKLQPISKEVTKLMSDQDYLDQIMKTGKDKAIAVAEPVLTKVYDIVGFANT

SEQ ID NO: 187881 - protein, 335 aa, Unknown
  Bacterial polypetide isolated from the Sargasso Sea
MKERVFSGVQPSGSLHIGNYLGAIKNFVEVQNQFDSIFCIVDLHAITVWQDPEVLSENIIEVAAAYIASGIDPDKATIFVQSQIPAHAELAWILNCVSRIGWLNRMTQFKEKAGKNREKVSVGLYVYPNLMASDILLYHANLVPVGDDQKQHLEITRDIAQKFNNDFGRVNENEFFPLPEPMILPVASRVMSLRDGEKKMSKSDSSEMTRIEFSDENDLIMKKIAKAKTDPLPMPSAIKELNERPEINNLINIYSAFSGEKIEGVINKFEGKKLSEFKSDLCDVVINEMEPIRIRFKELKNDKTYLKKILHDGMLKAKEKSDPIINEVKSIVGLG

SEQ ID NO: 187882 - protein, 139 aa, Unknown
  Bacterial polypetide isolated from the Sargasso Sea
MKKKIFSGVQPTGNLHLGNYLGAIKNFVALQNEKDNECVYCVVDLHAITVKQDPKILKDNIRETTAAFLASGLDYKKSIIFNQSLVPAHSEGSWILGCIARMGWLNRMTQFKEKAGKDKEKASVGLYIYPILMAADILL

SEQ ID NO: 187883 - protein, 272 aa, Unknown
  Bacterial polypetide isolated from the Sargasso Sea
RETLATFIASGLDYEKSIIFNQSSVTAHAEGAWILSCIARMGWLNRMTQFKEKAGKDKEKASVGLYAYPVLMAADILLYDSTHVPVGHDQKQHLELCRDIAQRFNSDFNVEDFFKVPEPLIQKNFSRIMSLKDGMKKMSKSDPSDLSRINLTDEKDLIVNKIKKAKTDNMPMPTIEENLEKRPEVENLLGIYSSLSNQTLDQSKKEFSGKNFSDFKEKLSDLLVEKITPISKEIKKLLNDEKNLDHILYDGSQKADKIALKKIKKIKQIIGF

SEQ ID NO: 187884 - protein, 330 aa, Unknown
  Bacterial polypetide isolated from the Sargasso Sea
MKKRILTGITTTGTPHIGNYIGAIRPALDLVEDSNDSFFFLADYHSIIKNQNSDDISASVKNIALAWLSCGLDTNSSYFYRQSDIPEIIELSWILNCVTAKGLMNRAHAYKAASSLNKKDPDKGITLGLFAYPVLMAADILMFDSTHVPVGSDQIQHLEMTRDIASRFNHLYKPLFTIPEPIIQDKEKVVLGLDGRKMSKSYGNVIPLLESEKNLKKSIMKIVTNSLEPGEPKDSKGCTVFDLYKSFASDEAISDFQQSYDDGISWGEAKEILFNLINKELEPIRNRYNDLVNDQALINDLLNDGAKKARLIAKDKLSEIREVIGIKSIS

SEQ ID NO: 187885 - protein, 332 aa, Unknown
  Bacterial polypetide isolated from the Sargasso Sea
MTKPIVLSGAQPSGELTIGNYMGALRQWVAMQDSHDCLYCVVDLHAITVRQDPQALREACLDTLALYLACGVDPKKSTVFIQSQVPQHTQLGWALNCYTQMGELSRMTQFKDKSQKHANNINVGLFGYPVLMAADILLYQANEIPVGQDQKQHLELTRDIATRFNNAYGETFTIPEPFIPEHGAKVMSLQDPLKKMSKSDDNRNNVIGLLEDPKAVMKKLKKAMTDSDEPPVVRFDMENKPGVSNLLSLMSGITGQSIASLEAEFEGKMYGHLKGAAGEAVVGMLEPLQERYRALRADRAYLDQVMRAGAENAQARAEVTLKKVYEKIGLLV

SEQ ID NO: 187886 - protein, 310 aa, Unknown
  Bacterial polypetide isolated from the Sargasso Sea
MNNKKILTGITTTGTPHLGNYVGAIRPAIASSNEKEHDSFLFLADYHALIKSKDPEALRRSCLEIAATWIASGLDIDKTYFYRQSDIPEILELNWILSNFTAKGLMNRAHAYKAAVDDNEKADPDKGITMGLFSYPVLMAADILMFKATHVPVGQDQVQHIEMTRDIAQRFNHQYGEIFVIPQGVIDQESAVLPGLDGRKMSKSYGNIIPLFCDSKTLRKHVMKIKTNSLEPGEPKSSEDCLLFDIYKSFASDSQISSMQKDLEDGISWGDAKNQLYELLDEQLSSYRLRYDELMSDPSYLDKVLRDGAE

SEQ ID NO: 187887 - protein, 332 aa, Unknown
  Bacterial polypetide isolated from the Sargasso Sea
MSKNVIFSGVQPTGEIHLGNYLGAIKQFVDYQKDYNSIFSIVDLHAVTVWQDPQQLLNNIHKVLSIFLACGLDKEKNIIFNQSQVPEHTQLAWLLSCTARIGWLNRMTQFKDKAGKNRENASVGLYTYPILMAADIMLYKASHVPVGDDQKQHLELARDIAHKFNTDYNIDFFVLPEPLFNSDSTRIMSLRDGTKKMSKSDTSDYSRILMTDDNDTIALKIKKAKTDSLSMPESGNDLSKRPEIENLINIYSSCSGISKNTVIEQFSSKEISYFKKELSQVIINLIQPICSEAKKLYEDKNFLNQVLSSGAIRARQISQNTISDVYKIAGMI

SEQ ID NO: 187888 - protein, 330 aa, Unknown
  Bacterial polypetide isolated from the Sargasso Sea
MKKRILTGITTTGTPHIGNYIGAIRPALKMANSEDQSFFFLADYHAVIKNQDSDKIEKSVEDIALAWLACGLDPKETFFYRQSDVPEILELTWILNCITAKGLMNRAHAYKAAMALNKEDADKGISMGLFSYPVLMAADILMFDSTHVPVGSDQIQHLEMTRDIAARFNHLYKPLLTLPEPIIQDDEKVVLGLDGRKMSKSYGNVIPLLEDEKVLRKSVMKIVTNSLEPGVPKNPDDCTVFDLYKNFADDNSVSEFKKQYENGISWGEAKEILFDVINAELKPIRSRYEDLIKDKNYINDVLSDGSKKTRLLAQEKISEIREVIGIKKIS

SEQ ID NO: 187889 - protein, 333 aa, Unknown
  Bacterial polypetide isolated from the Sargasso Sea
MGKKIFSGVQPTGNLHLGNYIGAIKNFVDLQNQEGNDCVYCVVDLHAITTKQDPKILKSSIRETTAAFLASGIDPKKSIIFNQSLVPAHSEGAWILGCIARMGWLNRMTQFKEKAGKDKEKASVGLYIYPVLMAADILLYDATHVPVGEDQKQHLELSRDIANKFNLDFNAPDFLRAPEPLIQKNFSRIMSLKDGKNKMSKSDPSDLSRINLTDDKDQIVNKIKKAKTDNDPLPGDDKNLSDRPEVENLLGIYSSLSNQNLKKSINEFSGKNFSDFKKKLAEVVVEKISPISNEINKIQRDINYIDKVLKEGGERADLIASKKVSEMKKIIGF

SEQ ID NO: 187890 - protein, 340 aa, Unknown
  Bacterial polypetide isolated from the Sargasso Sea
MSKINNNTVLSGVQPSGDLHIGNYLGAIKNFVNMQNNYNCFFCIVDLHAITVKQDPKILKRNTLEVAATYIASGIDPKNSVIFNQSSVSAHSELAWIFNCVTRMGWLNRMTQFKDKAGKDKENASSGLFIYPNLMAADILVYKATHVPVGDDQKQHLELTRDIAQKFNRDFNCENFFPIPEPIIDKNISRIMSLKDGSQKMSKSDLSEYSRISLLDESDEIIKKIKKAKTADAVMPGKIEEVKKLAEVNNLLNIYSGFSAIEKHKLVEQYEGQNFSKFKSDLSDVLVERLKPITKEVKKLMQDIGYLSEILLDGQNKANQVAQKTINDVYDIVGLHRNEA

SEQ ID NO: 187891 - protein, 282 aa, Unknown
  Bacterial polypetide isolated from the Sargasso Sea
MGKKIFSGVQPTGNLHLGNYLGAIKSFVELNNDDANECIFCVVDLHAITSKQDPKKLRDNIRKTVATFIACGISPEKSIIFNQSTVSAHSEAAWLLSCVARMGWLNRMTQFKEKAGKEKEKASIGLYSYPILMAADILLYDSTHVPVGEDQKQHLELCRDIAQKFNNDYGVDDFFKVPEPLIQKQFSRIMSLKDGTKKMSKSELSDLGRINLTDDKDLIINKIKKAKTDPFLLPSDVNKLEERPEAKNLLGIYSCLTNSSLDKSVKEFNGKNFSEFKEKLSQ

SEQ ID NO: 187892 - protein, 333 aa, Unknown
  Bacterial polypetide isolated from the Sargasso Sea
MSKKIFSGVQPTGNLHLGNYIGAIKNFVDLQNNKDNNCIFCVVDLHAITVMQDPIELKNNIRETAAAFIASGIDPKNSIIFNQSLVPAHAEGSWILGCVARMGWLNRMTQFKEKAGKDKEKASVGLYIYPVLMASDILLYDATHVPVGDDQKQHLELCRDIAQKFNNEYKCPDLLRPPEPLIQKHFSRIMSLKDGTKKMSKSDIAAGSRINLTDTEDQIVNKIKKAKTDNDTLPGNEGGLKGRPEAENLMGIYSSLSNQNITQTLNEFEGKNFSELKSKLSEIIVTKLSPISKEIQKLLSDKEYIDQILVDGAQKAQNISSKKVKKIKEIVGF

SEQ ID NO: 187893 - protein, 266 aa, Unknown
  Bacterial polypetide isolated from the Sargasso Sea
MDKVTKRILSGVQPSGDLHLGNYLGAIKNFVSLQKEFECFFCVVDLHAITVWQDPKLLKQKTREVAAAFIASGIDPKKNTLFVQSQVPQHAQLAWIFNCVARMGWLNRMTQFKDKAGKNSENVSVGLFSYPTLMAADILIYLATHVPVGEDQKQHLELTRDIAQKFNSDFNTDIFPIPEPLILGEATRVMSLRDGLKKMSKSDPSDYSRIMLSDSEEEIVKKIKKAKTDPLPLPENIEEAKKRPEAINLLTIYAALHDLDLKNVVD

SEQ ID NO: 187894 - protein, 264 aa, Unknown
  Bacterial polypetide isolated from the Sargasso Sea
MLKKIFSGVQPTGNLHLGNYLGAIKNFVELNNNKENKCIFCVVDLHAITVKQNPNDLRDNIRETVATFVASGIDPKKSIIFNQSRVSAHSEAAWILSCTAKTGWLSRMTQFKEKAGKDKEKASVGLYSYPVLMAADILLYDSTHVPVGDDQKQHLELCRDIALKFNNDFGVDDFFKLPEPLIQKEFSRIMSLKDGKKKMSKSDLSDFSRINLTDSKDQIVNKIKKAKTDTLPMPSNKNELDNRDEVKNLIGIYTILTNSSLEKV

SEQ ID NO: 187895 - protein, 336 aa, Unknown
  Bacterial polypetide isolated from the Sargasso Sea
MEKVTKRILSGVQPSGDLHLGNYLGAIKNFVSLQKEFECFFCVVDLHAITVWQDPKILKQKTREVTAAFVASGIDPNKNTLFVQSQVPQHAQLGWIFNCVARMGWLNRMTQFKDKAGKNSENVSVGLFSYPTLMAADILIYLATHVPVGEDQKQHLELTRDIAQKFNNDFKTDIFPIPEPLIFGAATRVMSLRDGLNKMSKSDPSDYSRIMMSDSEDKIINKIKKAKTDPLPLPENLEEAKKRPEAINLLTIYAALSDLEVEKVVANYAGKEFSQFKKDLSEITSSKLSPISKEINKLMKDEKYLDSIIIKGKEKAINVADPVLSKIYEIIGFFRG

SEQ ID NO: 187896 - protein, 332 aa, Unknown
  Bacterial polypetide isolated from the Sargasso Sea
MKGRIFSGVQPTGNLHLGNYLGAIKNWVELQKEFECIYCVVDLHAITIPRTPEEIHEDTLEVTAGLIASGIDPSKSVLFNQSQVPHHSELAWIFNCTAKLGWLNRMTQFKEKAGKNRENASVGLYVYPTLMAADILAYKATHVPVGQDQKQHLELTRDIASAFNSSYVKEFFPLPEPQIFDTASRVMSLRDGLSKMSKSDASDYSRINLRDTIDEISLKFKKAKSDPNPLPYSVKELEDRHEAKNLVGIYSALSKKTEREVLNEFGGKGFGAFKPALADLAVSVLEPINHDLNKLLEDKGYLIDILNKGAQKAAKVSGSVLSEVRNLVGFVR

SEQ ID NO: 187897 - protein, 335 aa, Unknown
  Bacterial polypetide isolated from the Sargasso Sea
MEIPSKRILSGVQPSGDLHLGNYLGAIKNFVSLQKEYECFFCVVDLHAITVWQDPKVLANKTREVTAAFIASGIDPKKNNIFVQSQVPQHAQLGWLFNCVARMGWLNRMTQFKDKAGKNSENVSVGLFSYPTLMAADILIYLATHVPVGDDQKQHLELTRDIAQKFNNDFKTDFFPIPEPLILGEATRVMSLRDGSKKMSKSDPSDYSRIMLTDTAENIVQKIRKAKTDPEPLPENKTDLEKRPEAENLISIFASLKDTSVETVIDEYSGKEFSIFKRDLADLSVSKLEPITSEMNKLMNDISYIDSVLNTGKDNAISVAEPVLQKTKEIVGFLT

SEQ ID NO: 187898 - protein, 270 aa, Unknown
  Bacterial polypetide isolated from the Sargasso Sea
MKKRILTGITTTGTPHIGNYIGAIRPAIEMTKDSDESFFFLADYHSIIKNQDSDSIKNSVKNVALAWLSSGLDPNKSYFYKQSDVPEIIELCWILNCVTAKGLMNRAHAYKAATSINENDPDKGITMGLFSYPVLMAADILMFDSTHVPVGSDQVQHLEMTRDIAARFNHLYKPILTLPDPIIQDKENVVPGLDGRKMSKSYGNVIPLLESEKILRKSVMKIVTNSLEPGEPKDSSDCTIFSLFKNFVDDSEMKLIQKAYNEGIAWGEAK

SEQ ID NO: 187899 - protein, 220 aa, Unknown
  Bacterial polypetide isolated from the Sargasso Sea
MERSTSYKDKIDKGLTPHMGLFSYPVLMAADILLYGSNVVPVGKDQKQHLEITRDIAIKFNNTYGEILIVPEADIEEKTMLVPGIDGQKMSKSYGNTIPIFADDNKLKKIVMSIVTDSAGIDEPKDKNTPLYKLYSLFLNNDEKKILSDRYDTPGLRYGDIKKELLEKIYEHFSPYKKRREYLFNNLDEVDDILNQGREKATVVASEYINKTRKAMGIAY

SEQ ID NO: 187900 - protein, 248 aa, Unknown
  Bacterial polypetide isolated from the Sargasso Sea
MHNPVILTGDRPTGKLHIGHYVGSLRQRVAAQHHYRQFVMIADLQALTDNGHNPAKVTDHVLEVMADYLAAGLDPAKTTFCLQSALPALAELTTYYLNLVSVARLERNPTVKAEIQQKGFERSLPAGFLIYPVSQAADITAFRATHVPVGEDQLPMLEQTNEIVRRFNTLVGKEVLNECQPILSDTGRLPGIDGKAKMSKSLGNTIELGMSAEEIKQAVFAMYTDPNHLKVSDPGQVEGNTVFSYLDA

SEQ ID NO: 187901 - protein, 265 aa, Unknown
  Bacterial polypetide isolated from the Sargasso Sea
LASGIDPKKSIIFNQSLVSAHSEGAWILGCVARMGWLNRMTQFKEKAGKDKEKASVGLYIYPVLMAADILLYDATHVPVGEDQKQHLELSRDIAQKFNLDYDAPNFLKVPEPLIQKKFSRIMSLKDGTKKMSKSDPSDLSRINMTDTKDQIVNKIKKAKTDPDLLPSTDKDFQKRPELENLLGIYSSIKSQSLLESINEFSGKNFSDLKDKLTEAIVEKITPISNEINKLQKDSKFIDDVLHEGAQKAEEIASKKVKEIKKIIGF

SEQ ID NO: 187902 - protein, 344 aa, Unknown
  Bacterial polypetide isolated from the Sargasso Sea
MKSLQSDDLQKRIFSGIQPTGNLHLGNYLGAIKNWVNLQNDISSIFSIVDLHAITVPQEPTKLKSSTHEVTAAIIASGIDIDKSILFNQSSVKEHAELAWILNCVCRIGWLNRMTQFKEKAGKNRENSSVGLYGYPVLMAADILLYKSTHVPVGDDQKQHIELARDIASSFNNMFTSDEEDDFFNLPEPQIIGEATRVMSLRDGTKKMSKSDASDASRINLTDTAEEISNKIKKARTDPHPLPDTIEELKDRPEAHNLMNIYSSLSDQTLEKALTEFSGKGFSYFKPRLIDLAIETLSPISREMRSLLKYRNEIDKILKNGEQKAKEIAEPVLKDVKNLVGFVN

SEQ ID NO: 187903 - protein, 333 aa, Unknown
  Bacterial polypetide isolated from the Sargasso Sea
MKKKIFSGVQPTGNLHLGNYLGAIKNFVDLNNETQNECIFCVVDLHAITVSQNPKDLKSNIYETVATFVASGIDPKKSIIFNQSQVSAHSEAAWILSCIARMGWLNRMTQFKEKAGKDKEKASIGLYSYPVLMAADILLYDSTHVPVGDDQKQHLELCRDIAQKFNNDYKVENFFITPEPLIKKEFSRIMSLKDGLKKMSKSEVSDLSRINLTDDKDQIINKIKKAKTDTLPLPSKIEELEKRPEAKNLIGIYSSLMNKTLQKTIDEFAGKNFSEFKEKLSEIVVKEINPISAKIKELLDDKAYLEKILKDGYDKANEIASKKIKKIHEIVGF

SEQ ID NO: 187904 - protein, 213 aa, Unknown
  Bacterial polypetide isolated from the Sargasso Sea
KADPDKGVTMGLFSYPVLMAADILMFKATHVPVGQDQVQHIEMTRDIAQRFNHQYGEIFVIPQGVIDQESAVLPGLDGRKMSKSYGNIIPLFCDSKTLRKHVMKIKTNSLEPGEPKSSEGCLLFDIYKSFASDSQISSMQKDLEDGISWGDAKNQLYELLDEQLSSYRLRYDELMNDPSYLNKVLRDGAERAREVAHTNLNEIKSVTGLGSLS

SEQ ID NO: 187905 - protein, 333 aa, Unknown
  Bacterial polypetide isolated from the Sargasso Sea
MAKKIFSGVQPSGNLHLGNYLGAIKNFVNLQNEENNECVYCVVDLHAITVKQGPNELKDSIRETTAAFLASGLDYKKSIIFNQSSVAAHSEVSWILSCTARMGWLNRMTQFKEKAGKDKEKASVGLYIYPILMAADILLYDSTHVPVGEDQKQHLELCRDIAQKFNIEFNCQNFLVAPEPLIQKSFSRIMSLKDGTKKMSKSDPSDLSRINLNDSKDTIINKIKKAKTDDKTLPSDKKNLNERPEVENLLGIYSSLSDQNLESTVNEFSGKNFSEFKKKLSELVVEKISPISDEINKLYKDKEFIDKILNDGAEKANKIASKKVSELKKIVGF

SEQ ID NO: 187906 - protein, 293 aa, Unknown
  Bacterial polypetide isolated from the Sargasso Sea
CVVDLHAITTKQDPQKLKDNILETTAVFLASGIDPSKSIIFNQSMVPAHSEGTWILSCIARMGWLNRMTQFKEKAGKDKEKASVGLYIYPILMAADILLYDATHVPVGEDQKQHLELTRDIAQKFNTDFKVQDFFKIPDPLIQEKFSRIMSLKDAKNKMSKSDPSDASRINLTDTEEQIHNKIKKAKTDTKSFPADEKDLNKRPEIQNLIGIYSSLKSQKITHTINEFEGKNFSNFKEKLSEVVIENISPISKEISKLKSDKGHILQVLKDGSEKAEAIASEKVKKIKEIIGF

SEQ ID NO: 187907 - protein, 258 aa, Unknown
  Bacterial polypetide isolated from the Sargasso Sea
KSIIFNQSSVSEHAELAWILNCVSRIGWMNRMTQFKEKAGKNRENASVGLYVYPNLMAADILLYKATHVPVGDDQKQHLELVRDIAQKFNNDFKSENFFPTPEPLIQKKLSRVMSLRDGKNKMSKSDESEYSRINLQDSEDEISKKVKKAKTDSQPIPSKIEDLKNRPEALNLINIYSFITDKTLEKTLVNMAGKDFSKLKKELSDALIATICPIGKKIRELKKDEKHLIEILKNGSNRAKKIAKTNINKVKDIVGFI

SEQ ID NO: 187908 - protein, 76 aa, Unknown
  Bacterial polypetide isolated from the Sargasso Sea
MSKKIFSGVQPTGNLHLGNYLGAIKNFVNLQKEKDNTCIYCVVDLHAITVKQDPKILKKNIRETTASFLASGLDSK

SEQ ID NO: 187909 - protein, 196 aa, Unknown
  Bacterial polypetide isolated from the Sargasso Sea
MLYDATHVPVGEDQKQHLELTRNIAQRFNGDFNCPNFLKIPEPLIHKDFSRIMSLKEGTQKMSKSDPSDQSRINLTDTKDQIVSKIRKAKTDSEPFPENINELKNRYELKNLLGIYSSLKNQNLDESINEFSGKNFSQLKEKLAEVLVEKIYPISNEINKLLKDQKHIDEILLDGSKKAEKISKKKVDEIKKKIGF

SEQ ID NO: 187910 - protein, 206 aa, Unknown
  Bacterial polypetide isolated from the Sargasso Sea
MPDNLSDLSKSATQEINECSSTTELDSLRIKYLGKKGAITIALKSVSSVDPKDRPAYGKKINELKSLIQGTLSQKRASLQKKEINQSIDDKKIDVSLPGRSNFGGHRHPVTKTLLEIEEIFYGAGFAVEDGPEIEDEYHNFTALNIPSNHPARAMHDTFYFNSEFLLRTHTSPIQIRSMEKEGVPIRVIAPGKVYRRDSDITHTPM

SEQ ID NO: 187911 - protein, 165 aa, Unknown
  Bacterial polypetide isolated from the Sargasso Sea
KDSYLLRTHTSNTQIHSMLEHAAPIYMLSPGRVYRCDSDTTHLPMFTQVEGLAVDVDISFADLKGILIDFLEFFFNKKMDVRFRPSYFPFTEPSAEVDIKFDSDWLEVLGCGMVHPNVLKNCNIDHHKFQGYAFGMGVERLAMLYYGVKDIRDFYSSNLEFLEQI

SEQ ID NO: 187912 - protein, 211 aa, Unknown
  Bacterial polypetide isolated from the Sargasso Sea
MENLNSIKKEILQKIKSAESDDNVEEIRIRELGKKGRITKLLSELGKLDQDKRKKLGPEINNLKNKVLEEIQEKKEFFLDQVLNKKLLEEKVDVTLPVKSSQNTNGRIHPVSQVLDEITEIFGSLGYEIADGPDIETEYYNFNALNIPESHPARQMHDTFYFDEFDKDQGQSVLRTHTSPVQVRTMEEGKPPFRFISPGRTYRCDSNQTHT

SEQ ID NO: 187913 - protein, 247 aa, Unknown
  Bacterial polypetide isolated from the Sargasso Sea
HPISQTIFNIIEIFGNLNYAVETGPDIETDFNNFTALNIPEHHPAREMQDTFYIEDNGDKNVLRTHTSPVQVRTMLNTKPPIKIIVPGRTYRSDSDATHAPMFHQVEGLVVDTSSTMVDLKSTLVSFLEEFFEVKNLQYRFRPSYFPFTEPSAEMDVAYTKVNNKIKIGEGDKWLEILGCGMVNPVVLDNCNIDSTQYQGFAFGMGIERLSMLKYGISDLRSFFDPNYRWLDHYGFSILDNQTRSGL

SEQ ID NO: 187914 - protein, 309 aa, Unknown
  Bacterial polypetide isolated from the Sargasso Sea
MIRKLDEHISYIKNFKSKDIDEIESLKIQFLGRKGIINDLFNEFKNVPSDQKKEYGQKINELKNLAQSKYDELKSVNSKSNKSISEDLTKPGFPISSGTLHPITLIKNQIIEIFSKVGFELSEGPEIEDDWHNFTALNLPKHHPARDMQDTFFIQQDPDILLRTHTSSVQVRYLENNSPPLKILSPGRVYRNEAISSRSHCIFHQVEGIYVDENVSFADLKQMILYFTKSMFGKSKLRFRPSFFPFTEPSAEVDIYWGLETETDYRITKGTGWLEIMGCGMVDPQVLENCNIDSEKYTGYAFGLGMREC

SEQ ID NO: 187915 - protein, 262 aa, Unknown
  Bacterial polypetide isolated from the Sargasso Sea
ITLPERPYVKGKIHPVSQTIDEISSIFSEIGFSVEEGPDVENEYNNFTALNTPDNHPARDMHDTFYLDEKKDKLLRTHTSPVQIRTMLKSKPPFKIIAPGRTYRSDSDQTHSPMFHQVEGLYIDKDINMGHLKGCLSYFIKEFFEVDKIKMRFRPSHFPFTEPSAEVDIGYKIKDGRIIIGEGDKWLEILGCGMVHPNVLKNVKVNPSKFQGYAFGIGIDRLAMLKYGINDLRSFFDCDYRWLNHYGFDPLDVPTNYRGLSR

SEQ ID NO: 187916 - protein, 279 aa, Unknown
  Bacterial polypetide isolated from the Sargasso Sea
MKVSQNWLKNLVEITSSPEDLSEKLSIGGFEVESLEDCSKNINGVVLGKVLSVLKHEGSDKLSICQVDIGNSKNLQIICGASNIKPNIYVYVATVGAKLNAVDLTIKKSEIRGVISEGMICSLQELGLEDSSEGIEIIDESLALKHELGAPGSDLLQLNDFIYDLAITANRPDGMSVIGIAREISALLESTLNFPELNHKYNIHLLKGIKLCPEAIESNCIYTISCIDGVNGEKLSPNWLKDRIEKSGIKSINLLVDLTNYILLEQGQPLHAFDKDKLS

SEQ ID NO: 187917 - protein, 216 aa, Unknown
  Bacterial polypetide isolated from the Sargasso Sea
MIISENWLREWVEFDLDFNSLPALLTAAGLETGVVEEIKALPKKVVAGHIVRISPHPGATELTLCDVDTGDAKPVRVVCGAPNAALGVVAPFARIGSELSAGQKIGEAVIRGEPSSGMLCSAAELGLEEQSQGLLLLDPELGPGTQLNDHLQLPDRLLEIELTPNRGDCLSILGVAREVAALTGGRLKEPKLPRVRTTESETRSISLDGDGRCARY

SEQ ID NO: 187918 - protein, 206 aa, Unknown
  Bacterial polypetide isolated from the Sargasso Sea
MSEIKNIRDQFISKLENDLSIDQINEIKTELFGKNGLISSKFKTIGSIPETDRKKFASDLNQVKDELQNLITSKISEIEGKKINEKLEKEKVDITLPERPFVRGKVHPVSQTIDEISSIFSEIGFSVEEGPDVENEYNNFTALNTPDNHPARDMHDTFYLDENKEVLLRTHTSPVQIRTMLKDKPPFKIIAPGRTYRSDSDQTHAP

SEQ ID NO: 187919 - protein, 148 aa, Unknown
  Bacterial polypetide isolated from the Sargasso Sea
LESNPPPVRVIAPGRVYRRDAVDATHSPVFHQVEVLAIDEGLDFSHLRGTVSHFLKAFFGDLPVRFRASYFPFTEPSAEVDVQWRGRWLEVMGCGMVDPAVLEGMGLDPERWSGFAAGLGVERFCMVRHGIDDIRRLFTSDLRFLEQF

SEQ ID NO: 187920 - protein, 199 aa, Unknown
  Bacterial polypetide isolated from the Sargasso Sea
YVETETDGMPNVLRTHTSPVQIRSMLKQKPPIRLIAPGKTFRCDNDQTHSPMFHQVEGLVIDQESNMSHLKGCLEIFLKTFFETDKLNMRFRPSHFPFTEPSAEVDIGYTKKGNQLIIGEGEDWLEILGCGMVHPNVLENVNINSNEYQGYAFGMGIERLAMLKYGISDLRTFFDSDLRWNKHYGFSPLNIPSIIGDLS

SEQ ID NO: 187921 - protein, 150 aa, Unknown
  Bacterial polypetide isolated from the Sargasso Sea
MSLFDKNQLPESYLNSGSLHPINQIKDYLVGILMDMGFSEETGPEIETEENNFDLLNIEKSHPARQMHDTFYVNGMKNVLRTHTSPVQVRTMLSKNPPLAIISAGKVFRKDDDSTHLPMFHQIEGMYIDKNVNFANLKYVIYEIIHKIFG

SEQ ID NO: 187922 - protein, 178 aa, Unknown
  Bacterial polypetide isolated from the Sargasso Sea
RTMLNDKPPFKIIAPGRTYRSDSDQTHAPMFHQVEGLHIDKNINMSHLKGCLNYFIKEFFEVDKIKMRFRPSHFPFTEPSAEVDIGYELKDGKIIIGEGNKWLEILGCGMVHPNVLRNVKVDTSKFQGYAFGIGIDRLAMLKYGINDLRAFFETDYRWLNHFGFDPLDVPSSYRGLSR

SEQ ID NO: 187923 - protein, 130 aa, Unknown
  Bacterial polypetide isolated from the Sargasso Sea
KDSDLTHTPMFHQIEGLVVEENASFSQLKGLLNDFLEDFFGEEVELRFRPSYFPFTEPSAEADIRWNKNWLEVLGCGMVHPNVLEGVGVDTTKYNGFAFGLGVERMAMLKYEIPDLRAFFENDIRFLDQF

SEQ ID NO: 187924 - protein, 201 aa, Unknown
  Bacterial polypetide isolated from the Sargasso Sea
MAGLEVDGFENINSKITGTDSIIQLDITPNRGDCFSILGVARELAVINNLKLHLPEIPKVHDSFTDSIKIKVCPEGPSYFGRTLKNISIDAKTQPLIAERLKLSDQKLIDPVVDITNYILLELGQPLHAFDRDTLNGNISVRTAQNKEQITLLDDQQVELDSDCLVISDDKGAIAFAGIMGGKETAVSNSTKSIFLESAYF

SEQ ID NO: 187925 - protein, 226 aa, Unknown
  Bacterial polypetide isolated from the Sargasso Sea
MAFAENKIDVLKKIKSSKSFEDLEKLRLYYLGKKGLIPEALKGLGSLSIEEKKSKGQELNIIKKEIEEGIKNQRAEIENIEISNRINLETIDVTLPPNISDKGKIHPISQTIFNIIEIFGNLNYAVETGPDIETDFNNFTALNIPEHHPAREMQDTFYIQDNGDKNVLRTHTSPVQVRTMLNTKPPIKIIVPGRTYRSDSDATHAPMFHQVEGLVVDTSSTMVDLK

SEQ ID NO: 187926 - protein, 106 aa, Unknown
  Bacterial polypetide isolated from the Sargasso Sea
HFPFTEPSAEVDIGYRIENNKIIIGEGDKWLEILGCGMVHPNVLKNSKVDPNKFQGFAFGIGIDRLAMLKYGINDLRSFFESDYRWLNYYGFDPLDVPTNYRGLSK

SEQ ID NO: 187927 - protein, 115 aa, Unknown
  Bacterial polypetide isolated from the Sargasso Sea
KIKMRFRPSHFPFTEPSAEVDIGYEIKDGKIVIGEGDQWLEILGCGMVHPNVLKNVKVDPAKYQGYAFGIGIDRLAMLKYGINDLRAFFECDYRWLNHFGFDPLDVPTNYRGLSR

SEQ ID NO: 187928 - protein, 150 aa, Unknown
  Bacterial polypetide isolated from the Sargasso Sea
THTPMFHQVEGLVVNKDATMADLKSTLITFLKEFFEIDNLKYRFRPSYFPFTEPSAEMDVAFTKKNNVLKIGEGDDWLEILGCGMVNPKVLENCKIDSSVYQGFAFGMGIERLSMLKYGITDMRGLFDLNIKWLDHYGFSPLDLKNRSEV

SEQ ID NO: 187929 - protein, 104 aa, Unknown
  Bacterial polypetide isolated from the Sargasso Sea
MLTRFITELFGRDMEIRFRPSYFPFTEPSAELDIKFNGKWLEVLGCGMVHPNVLTNVNISSKKYSGFAFGLGIERLAMLQYGIKDLRMFYENDLSFLSQFKGLK

SEQ ID NO: 187930 - protein, 289 aa, Unknown
  Bacterial polypetide isolated from the Sargasso Sea
MSLSVDSVDIKKKIEDCKTLQEVEVIRLKYLGKKGLIPSEMKLLSKLSIEQKKIKGQELNKLKTFIEDVVNDHKILIENKKLEEKLKNESVDVTLPHNEEVTGKIHPISQTIFSIIEIFGNLNYSVEAGPDIESDFNNFSALNIPPHHPAREMQDTFYVNNPKGEDNVLRTHTSPVQVRTMLKSKPPIKIIVPGRTYRSDSDSTHTPMFHQVEGLLVNKDATMADLKSTLILFLKEFFEIDNLKYRFRPSYFPFTEPSAEMDVAYTKKNNVLKIGEGDDWLEILGCGMV

SEQ ID NO: 187931 - protein, 304 aa, Unknown
  Bacterial polypetide isolated from the Sargasso Sea
REKKFASDLNQVKDELQNLIISKINGIQIKKINEKLEKEKVDVTLPERPFVRGKVHPVSQTIDEISSIFSEIGFNVEEGPDVENEYNNFTALNTPDSHPARDMHDTFYLDENKKVLLRTHTSPVQIRTMLKDKPPFKIIAPGRAYRSDSDQTHSPMFHQVEGLHIDTNINMGHLKGCLNYFIKEFFEIEKIKMRFRPSHFPFTEPSAEVDIGYEVKDGKIIIGEGDQWLEILGCGMVHPNVLKNVKVDPTKYQGYAFGIGIDRLAMLKYGINDLRAFFDCDYRWLNHFGFDPLDVPSNYRGLSR

SEQ ID NO: 187932 - protein, 206 aa, Unknown
  Bacterial polypetide isolated from the Sargasso Sea
MHDLKKIKEEFISKLKEKLNLSEINQIKSDLFGKNGLISSQFKKIGTITESQRKEFATDLNVIKNELQDLINTKINEIEINEINEKLEKEKIDVTLPERTFIRGKIHPVSQTIDEISSIFSEIGFSVEEGPDVENEYNNFTALNTPDNHPARDLHDTFYLDVNKEKLLRTHTSPVQIRTMMKGKPPFKIIAPGRTYRSDSDQTHSP

SEQ ID NO: 187933 - protein, 201 aa, Unknown
  Bacterial polypetide isolated from the Sargasso Sea
HDTFYLDNKKEFLLRTHTSPVQVRTMLSSKPPFKIIAPGRTYRSDSDQTHAPMFHQVEGLHIDKNINMGHLKGCLNYFIKEFFEIDKIKMRFRPSHFPFTEPSAEVDIGYELKDGKIIIGEGDKWLEILGCGMVHPNVLKNVKVDPSKFQGYAFGMGIDRLAMLKYGINDLRAFFETDYRWLNHFGFDPLDVPSSYRGLSR

SEQ ID NO: 187934 - protein, 250 aa, Unknown
  Bacterial polypetide isolated from the Sargasso Sea
IHPVSQTIDEISSIFSEIGFSVEEGPDVENEYNNFTALNTPDNHPARDMHDTFYLDENKEVLLRTHTSPVQIRTMLKDKPPFKIIAPGRTYRSDSDQTHAPMFHQVEGLHIDKDINMGHLKGCLNYFIKEFFEVKKIKMRFRPSHFPFTEPSAEVDIGYEIKDGKIVIGEGDQWLEILGCGMVHPNVLKNVKVDPGKYQGYAFGIGIDRLAMLKYGINDLRAFFDCDYRWLNHFGFDPLDVPTNYRGLSR

SEQ ID NO: 187935 - protein, 136 aa, Unknown
  Bacterial polypetide isolated from the Sargasso Sea
KVYRKDDDSTHLPMFHQVEGIYVNKNVTFANLKDLIYQIVTSLFGNEVKLRFRPSYFPFTEPSAEVDILSENGDWLEILGCGIVNPIVLKNCDIDPESFSGLAFGLGVERIAMLKYGVSDIRDFYKSNLDFLSQFK

SEQ ID NO: 187936 - protein, 279 aa, Unknown
  Bacterial polypetide isolated from the Sargasso Sea
MAFAENKIDVLKKIKASKSFEDLEKLRLYYLGKKGLIPEALKGLGSLSIEEKKLKGQELNIIKKEIEEAIKNQRTAIENIEISNRINLESIDVTLPPNISEKGKIHPISQTIFNIIEIFGNLNYAVETGPDIETDFNNFTALNIPEHHPAREMQDTFYIQDNGDKNVLRTHTSPVQVRTMFNTKPPIKIIVPGRTYRSDSDATHAPMFHQVEGLVVDTSSTMVDLKSILVSFLEEFFEVKNLQYRFRPSYFPFTEPSAEMDVAYTKVNNKIKIGERDKW

SEQ ID NO: 187937 - protein, 244 aa, Unknown
  Bacterial polypetide isolated from the Sargasso Sea
MENFNQIEIDILEKIKKISDRSSYETIKTEIFGKKGIITELFKKIGSLDQSQRKEYASNLNSLKTKVNLILEKKLSDFNQSEINKKLKTEKVDVTLPGRTFFSGKIHPVSQVIDEVTSIFSEIGFSVEEGPDVENEYYNFSALNTPKNHPARDMHDTFYLNHSKDLLLRTHTSPVQIRTMLKGKPPFKIIAPGRTYRHDSDQTHSPMFHQLEGLHIDKNINMGHLKGCLYYFVKKFFEVEKAKI

SEQ ID NO: 187938 - protein, 226 aa, Unknown
  Bacterial polypetide isolated from the Sargasso Sea
MDINHTDLEKLLKEDLDSCNKEHDLLQIKSKYLGKKGHLTSLFTSLKNINPDKRKTFGAELNNIKNTLSSMIEIKLINLRSSNEVPEKIDLDVPARHHNNGSHHPISLIIKKIENIFLEYGFDIHDGPEIETEHYNFESLNIAKNHPARDMHDTFYFDSQLLLRTHTSSVQIHAMETSNAPFRVLAPGRVYRCDSDPTHSPMFHQIEGLCVDTDITFSNLKWILNN

SEQ ID NO: 187939 - protein, 249 aa, Unknown
  Bacterial polypetide isolated from the Sargasso Sea
MSDIIKLKDDYIDKLNTENNIDKVNKIKAELFGKNGIISNEFKKLVSISVEERKKLASDLNNIKDELQNKISIKIQEIETKEINLKLEKEKIDVTLPERDIEIGKIHPVSQVIDEISSIFSEIGFSVEEGPDVENEYNNFTALNTPDNHPARDMHDTFYLDNNKELLLRTHTSPVQVRTMLKGKPPFKIIAPGRTYRSDSDQTHAPMFHQVEGLHIDKNINMGHLKGCLNYFNKEFFEVDKIKMRFRPS

SEQ ID NO: 187940 - protein, 266 aa, Unknown
  Bacterial polypetide isolated from the Sargasso Sea
EKVDVTLPERTFSKGKIHPVSQVIDEISSIFSEIGFNVEEGPDVENEYNNFTALNTPENHPARDMHDTFYLDKNKKFLLRTHTSPVQVRTMLQGKPPFKIIAPGRTYRSDSDQTHAPMFHQVEGLHIDKNINMGHLKGCLNYFIKEFFEVEKIKMRFRPSHFPFTEPSAEVDIGYELKNGKIIIGEGDKWLEILGCGMVHPNVLKNVKVDPIKYQGYAFGMGIDRLAMLKYGINDLRAFFETDYRWLSHFGFDPLDVPSSYRGLSR

SEQ ID NO: 187941 - protein, 165 aa, Unknown
  Bacterial polypetide isolated from the Sargasso Sea
APGRTYRSDSDQTHSPMFHQVEGLHIDKDINMGHLKGCLNYFIKEFFEVDKIQMRFRPSHFPFTEPSAEVDIGYELKDGKIVIGQGDKWLEILGCGMVHPNVLKNVNVNTDKYQGYAFGIGIDRLGMLKYGINDLRAFFETDYRWINHFGFDPLDVPSNYRGLSR

SEQ ID NO: 187942 - protein, 124 aa, Unknown
  Bacterial polypetide isolated from the Sargasso Sea
MLKDKPPFKIIAPGRTYRSDSDQTHAPMFHQVEGLHIDTNINMGHLKGCLNYFIKEFFEVEKIKMRFRPSHFPFTEPSAEVDIGYEIKDGKIIIGEGDKWLEILGCGMVHPNVLKNVKVDPSKF

SEQ ID NO: 187943 - protein, 159 aa, Unknown
  Bacterial polypetide isolated from the Sargasso Sea
RCDSDQTHAPMFLFLEGLHIDKDITMGHLKGCLDYFVKEFFEVKKIQMRFRPSHFPFTEPSAEVDIGYRLENGRIIVGEGDKWLEILGCGMVHPNVLKNAKVDPKKFQGYAFGMGIDRLAMLKYGINDLRSFFEADFRWLNYFGFDPLDVPTNYRGLSR

SEQ ID NO: 187944 - protein, 107 aa, Unknown
  Bacterial polypetide isolated from the Sargasso Sea
INFSHLRGTVLTFLKTFFGDIPVRFRASYFPFTEPSAEVDVQWKGKWLEVMGCGMVDPMVLEKLGIDSEKWTGFAAGLGVERFCMVRHQIDDIRKFYTNDLRFLEQF

SEQ ID NO: 187945 - protein, 185 aa, Unknown
  Bacterial polypetide isolated from the Sargasso Sea
SCSIRTMESQNPPIRIIVPGRTYRSDHDATHSPMFHQCEGLVIGDGIHMGHLKGCLIDFCRAFFGVDDLPVRFRPSYFPFTEPSAEVDIGCTRQNGALKIGAGDNWLEILGSGMVNPRVLENCGYDSEKYQGFAFGMGIERIAMLKYGIPDLRTFYDSDMRWMRHYGFLPFDAPSIHAGLSGGGV

SEQ ID NO: 187946 - protein, 154 aa, Unknown
  Bacterial polypetide isolated from the Sargasso Sea
QTHTPMFHQLEGLHIDKNINMGHLKGCLNYFIKEFFEINKIKMRFRPSHFPFTEPSAEVDIGYRLENNKIVIGDGDKWLEILGCGMVHPNVLKNCKVDPKKYQGFAFGIGIDRLAMLKYGINDLRSFFDCDYRWLNHYGFDPLDVPTNYRGLSR

SEQ ID NO: 187947 - protein, 212 aa, Unknown
  Bacterial polypetide isolated from the Sargasso Sea
NTPDHHPARDMHDTFYLDNKKELLLRTHTSPVQVRTMLKGKPPFKIIAPGRTYRSDSDQTHSPMFHQVEGLHIDKDINMGHLKGCLNYFIKEFFELDKIQMRFRPSHFPFTEPSAEVDIGYELKDEKIIIGEGDKWLEILGCGMVHPNVLKNVNVNPDKYQGYAFGIGIDRLGMLKYGINDLRAFFDTDYRWLNHFGFDPLDVPSNYRGLSR

SEQ ID NO: 187948 - protein, 264 aa, Unknown
  Bacterial polypetide isolated from the Sargasso Sea
MKPSKIRGIVSEGMICSELELGLGEAHEGVLFLPDDAPVGGMLKDYLGDAVLEFDIKGGFAHLLSIYGLARETAAITRMQLKSEKLPDLSKLNLPKQNCSLSEASEVDFLKLRIENPDLCPRYSALLVRGITIGPSPFWMQQRLQRAGMRPINNIVDITNYVMLELGQPLHAFDYQALCKRVEGETPEIFVRCAVNGEVMTTLDGEERRLDDQMLMITDKAGLIAIAGVMGGEETEVGNETKDVLLESANFNFLNNRRTAQLLK

SEQ ID NO: 187949 - protein, 295 aa, Unknown
  Bacterial polypetide isolated from the Sargasso Sea
MSDIIKIKEEYLNKLKDDLDLNAVNQLKSELFGKNGIISNEFKKMGSISAEDRKKFASDLNSIKDELQSLIEKKIKNIEINEINLKLQNEKVDVTLPERSFNRGKIHPVSQVIDEISSIFSEIGFSVQEGPDVENEYNNFTALNTPDDHPARDMHDTFYLDNKKEFLLRTHTSPVQVRTMMNSKPPFKIIAPGRTYRSDSDQTHAPMFHQVEGLHIDKNINMGHLKGCLNYFIKEFFEVDKIKMRFRPSHFPFTEPSAEVDIGYELRDGKIIIGEGDKWLEILGCGMVHPNVPSK

SEQ ID NO: 187950 - protein, 210 aa, Unknown
  Bacterial polypetide isolated from the Sargasso Sea
NLITYKISEIEGKKINEKLEKEKVDITLPERPFVRGKVHPVSQTIDEISSIFSEIGFSVEDGPDVENEYNNFTALNTPDNHPARDMHDTFYLDENKEVLLRTHTSPVQIRTMLKDKPPFKIIAPGRTYRSDSDQTHAPMFHQVEGLHIDTNINMGHLKGCLNYFIKEFFEVEKIKMRFRPSHFPFTEPSAEVDIGYEIKDGKIIIGEGDN

SEQ ID NO: 187951 - protein, 256 aa, Unknown
  Bacterial polypetide isolated from the Sargasso Sea
SQNNGKIHPVSQVIDEISSIFSEIGFSVAEGPDVETEYNNFTALNTPEDHPARDMHDTFYLDKNKKTLLRTHTSPVQIRTMLNGKPPFKIIAPGRTYRCDSDQTHAPMFHQLEGLHIDKDITMAHLKGCLNYFIKEFFEVKNIKMRFRPSHFPFTEPSAEVDIRYNIENDKIVIGEGDKWLEILGCGMVHPNVLNTSGVNSKKYQGFAFGMGIDRLAMLKYGINDLRSFFDTDYRWLNHFGFDPLDIPTNYRGLSR

SEQ ID NO: 187952 - protein, 262 aa, Unknown
  Bacterial polypetide isolated from the Sargasso Sea
MAHLDELIQKVLNAKDKLSLQNLKSELLGKNSQINQDFKKLGSLSEEERKEKASSLNNQKQKITEAIDNKFKELEKLEINQKLKKDRVDVTLPVREQTNGKIHPVSQVIDEISSIFSEIGFSVAEGPDVETEYNNFTALNTPEDHPARDMHDTFYLDNNKKILLRTHTSPVQIRTMLNGKPPFKIIVPGRTYRCDSDQTHAPMFHQLEGLHIDKDINMGHLKGCLDYFIKEFFEVRKIQMRFRPSHFPFTEPSAEVDIWYRI

SEQ ID NO: 187953 - protein, 70 aa, Unknown
  Bacterial polypetide isolated from the Sargasso Sea
GMVHPNVLKNVKVNTSKYQGYAFGIGIDRLAMLKYGINDLRAFFETDYRWISHFGFDPLDVPSNYRGLSR

SEQ ID NO: 187954 - protein, 198 aa, Unknown
  Bacterial polypetide isolated from the Sargasso Sea
MVDLRELIQKVSQVKDKLELQNLKTQFLGKNSQINQEFKKLGSLSEDERKTRAASLNNEKQKITEAIGNRFKELEKLEINQKLQKDKVDVTLPARERPNGKIHPVSQVIDEISSIFSEIGFSVAEGPDVETEYNNFTALNTPEDHPARDMHDTFYLDDNKKILLRTHTSPVQIRAMLSGKPPFKIIVPGRTYRCDSDQ

SEQ ID NO: 187955 - protein, 307 aa, Unknown
  Bacterial polypetide isolated from the Sargasso Sea
NLKKMGSLNPEERKNFAKELNKIKDQLTSKIEKKFKDFENLEINQKLKDEKIDITLPIRSIHQGKIHPVSQVIDEISSIFSEVGFSVAEGPDIESEHNNFTALNTPEDHPARDMHDTFYLDKDKKTLLRTHTSPVQIRTMLNGKPPFKIIVPGRTYRCDSDQTHAPMFHQLEGLHIDKNITMGHLKGCLNYFIREFFEVKKIKMRFRPSHFPFTEPSAEVDIGYKIENGKIVIGEGDKWLEILGCGMVHPNVLKNTKVDPKKYQGFAFGMGIDRLAMLKYGINDLRAFFETDYRWLNHFGFDPIRCP

SEQ ID NO: 187956 - protein, 208 aa, Unknown
  Bacterial polypetide isolated from the Sargasso Sea
GATEQDTFYLPPDDTGVPRVLRTHTSPVQIRTMEKTAPPIKIIVPGRTFRSDHDATHSPMFHQVEGLVIDKKSHMGHLKGCLIDFCRAFFGVDDLPVRFRPSYFPFTEPSAEVDIGCTRAGGEFRIGKGDDWLEILGSGMVHPRVLAGCGIDPDEYQGFAFGMGIERIAMLKYGIPDLRPFYDSDIRWLKHYGFVPLDIPTVSKGINQ

SEQ ID NO: 187957 - protein, 88 aa, Unknown
  Bacterial polypetide isolated from the Sargasso Sea
NGKIIIGEGNKWLEILGCGMVHPNVLKNVKVDPSKYQGYAFGIGIDRLAMLKYGINDLRAFFECDYRWLNHFGFDPLDVPSSYRGLSR

SEQ ID NO: 187958 - protein, 214 aa, Unknown
  Bacterial polypetide isolated from the Sargasso Sea
MNIENVNQIKSELFGKNGKISNSFKNLGSLPAEERKKFASDLNFIKDVLQETINKKIQEIEIKEINSKLENEKVDVTLPERNIVQGKIHPVSQVIDEISSIFSEIGFSVEEGPDVENEHYNFTALNTPDNHPARDMHDTFYLDDKKELLLRTHTSPVQVRTMLKGKPPFKIIAPGRTYRSDSDQTHAPMFHQVEGLHIDKKINMGHLKGCLIIL

SEQ ID NO: 187959 - protein, 310 aa, Unknown
  Bacterial polypetide isolated from the Sargasso Sea
NLVEITSTPEDLSEKLSIGGFEVESLEDCSENLNGVVLGKVLSVLKHEGSDKLSICQVDIGTSTNLQIICGAQNIKPDIYVYIATVGAKLKAVNLTIKRSEIRGVMSEGMICSLQELGLEDYSEGIMIIDGDLALKHELGTPACNLLQLNDFIYDLAITANRPDGMSVIGIAREISALLESTLNFPELNHKYNIHLLKCFQHSPEAITSDCIYTITCIDGVNGEILSPKWIKDRIEKSGIKSINLLVDLTNYILLEQGQPLHAFDKDKLSNLIGKEVSPEDFSVRKAMDNESLVCLDGKKYELNENITVI

SEQ ID NO: 187960 - protein, 282 aa, Unknown
  Bacterial polypetide isolated from the Sargasso Sea
MPDIKKIKNEYLDKLSEDLNIENINQIKSELFGKNGKISNSFKILGSIPAEERKNFASDLNFIKDELQEKINKKIKEIEIKEINSKLENERVDVTLPEREIIQGKIHPVSQVIDEISSIFSEIGFSVEEGPDVENEYYNFTALNTPDNHPARDMHDTFYLDDKKELLLRTHTSPVQVRTMLKGKPPFKIIAPGRTYRSDSDQTHAPMFHQVEGLHIDKNINMGHLKGCLNYFIKSFFEVDKIKMRFRPSHFPFTEPSAEVDISYELKDGKIVFGEGDKWWKF

SEQ ID NO: 187961 - protein, 272 aa, Unknown
  Bacterial polypetide isolated from the Sargasso Sea
PRKSPKLGKDINLLKKHIENKINSKGTDLGSKSFKKSYEIFDTTLPGKKELPGTLHPITQIMEEITSIFFGLGFQIEEGPEIETDYYNFKALNIPEDHPARDMQDTFYVGDKTVLRTHTSPVQIHVMENREPPLRIIAPGKVYRCDSDVSHTPMFHQIEGLMVDDGISFSHLKGIMNIFLQEVFGKDTQTRFRPSFFPFTCPSAEVDIQCVICDGKGCRVCSQTGWLEILGAGMVDPAVFQFVDYDSEKWTGFAFGLGIERIAMLKFGINDI

SEQ ID NO: 187962 - protein, 327 aa, Unknown
  Bacterial polypetide isolated from the Sargasso Sea
GIKENSGEMGKFKIAKVLKADKHPNADKLKVCDVTIGGKEILKVVCGAPNAREGLITIYAPPGAVIPKTNFELKVAKIRGVESKGMLCSESELNLSNESDGIIELKNKDKEIGKSYFKKKSEKAIDISITPNRADCLGIRGIARDLSSSGIGKLIQLKRKKIKQSTKHKIKTSITKEKNQGCDIFGSCFIKNITNKESPDWLKNKLIALGLKPISAVVDITNYVMFDLNRPLHVYDADKINKEIIVRNAKEGEVFEALDNKKYKLKKDMCVISDKSGVLGLGGIIGGTTTSTELDTKNILLEAAYFSPSSIRKTARALNINTDAKYR

SEQ ID NO: 187963 - protein, 229 aa, Unknown
  Bacterial polypetide isolated from the Sargasso Sea
MIITLPWLKEHLQTKANQKEIIEKLTNIGLEVEGTKENYSEIGKFKIAKILKAEKHPNADKLKVCDVDIGGREILKVVCGAPNARDGLITIYAPPGAVIPKTKFQLKVAKIRGVESRGMLCSESELNLSNESDGIIELKNKETDIGKSYFKSKSEKTIDISITPNRADCLGIRGIARDLSSTGIGKLIPLKKKKFKQFIKNSIKTSIKKDPKQGCAVFGSCYIKNLSNK

SEQ ID NO: 187964 - protein, 176 aa, Unknown
  Bacterial polypetide isolated from the Sargasso Sea
DLEAIIGLTVSASEFSFRVATHSALHPGQCAEILRNDRVIGHIGAIHPSLEKPFGLNGKTIVFELELDALLHTSLPLAQAVSKFPANRRDIAVVVDESVSAGDVMKLIRKVGENQLVGINLFDVYLGKGVEPGKKSLAIALTLQDTTRTLEEKEIAETVDSVVSALKTEFNASLRD

SEQ ID NO: 187965 - protein, 187 aa, Unknown
  Bacterial polypetide isolated from the Sargasso Sea
MSDIIKIKDEYLLKLKDDLDLNNINQIKSELFGKTGKISNEFKKMGSMSPDSRKKFASDLNAIKDELQELIEKKIKDIEIKEINLKLQNEKVDVTLPERSFKRGKIHPVSQVIDEISSIFSEIGFSVAEGPDVENEYNNFTALNTPDNHPARDMHDTFYLDDNKEYLLRTHTSPVQVRTMIRRKTTF

SEQ ID NO: 187966 - protein, 222 aa, Unknown
  Bacterial polypetide isolated from the Sargasso Sea
ETEYNNFTALNTPEDHPARDMHDTFYLDKNKKLLLRTHTSPVQIRSMLNEKPPFKIIVPGRTYRSDSDQTHAPMFHQLEGLHIDKNITMGHLKGCLDYFIKEFFEVRNVKMRFRPSHFPFTEPSAEVDIGYRLENGKIVIGEGDKWLEVLGCGMVHPNVLKNVKVDTKKYQGYAFGIGIDRLAMLKYGINDLRALFETDYRWLSHFGFDPLDVPTNYRGLSK

SEQ ID NO: 187967 - protein, 197 aa, Unknown
  Bacterial polypetide isolated from the Sargasso Sea
YLDKNMKTLLRTHTSPVQVRTMLKGKPPFKIIAPGRTYRSDSDQTHTPMFHQLEGLHIDKEINMGHLKGCLNYFIKEFFEVKKIKMRFRPSHFPFTEPSAEVDIGYRIENNKIIIGEGDKWLEILGCGMVHPNVLKNCKVDSKIYQGFAFGIGIDRLAMLKYGINDLRSFFECDYRWLNYYGFDPLDVPTNYRGLSR

SEQ ID NO: 187968 - protein, 273 aa, Unknown
  Bacterial polypetide isolated from the Sargasso Sea
INKKLDKEKIDVTLPERPIIRGRIHPVSQTIDEISSIFSEIGFSVEEGPDVENEYNNFTALNTPIHHPARDMHDTFYLDEQKKKLLRTHTSPVQIRTMMKGKPPFKIIAPGRTYRSDSDQTHAPMFHQVEGLHIDKDISMGHLKGCLNYFIKEFFEIDKIKMRFRPSHFPFTEPSAEVDIGYDIKDGKIKIGEGNQWLEILGCGMVHPNVLRNVKVNPDKYQGYAFGIGIDRLAMLKYGINDLRAFFECDYRWLNHFGFDPIDVPTNYRGLSR

SEQ ID NO: 187969 - protein, 93 aa, Unknown
  Bacterial polypetide isolated from the Sargasso Sea
GYRIENNKIVIGEGDKWLEILGCGMVHPNVLINSKVDPKKYQGFAFGIGIDRLAMLKYGINDLRSFFECDFRWLNYYGFDPLDVPTNYRGLSK

SEQ ID NO: 187970 - protein, 129 aa, Unknown
  Bacterial polypetide isolated from the Sargasso Sea
DATHLPMFHQVEGIYVDKDITFSQLKDLIYKIIHELFDNDIKIRFRPSYFPFTEPSAEVDIQSDNKEWLEILGCGIVNPIVLENCKIDSKKYSGLAFGIGVERIAMLKYGVNDIREFYKSNLDFLEQFK

SEQ ID NO: 187971 - protein, 160 aa, Unknown
  Bacterial polypetide isolated from the Sargasso Sea
YRCDSDQTHAPMFHQLEGLHIDKNITMGHLKGCLNYFIREFFEVKKIKMRFRPSHFPFTEPSAEVDIGYKIENGKIIIGDGDKWLEILGCGMVHPNVLKNTKVDPKKYQGFAFGMGIDRLAMLKYGINDLRAFFETDYRWLNHFGFDPLDVPTNYRGLSR

SEQ ID NO: 187972 - protein, 290 aa, Unknown
  Bacterial polypetide isolated from the Sargasso Sea
ELIKLFSDKAIKLADCEIDEQVKKEKDDVTLPEKDFRIGKIHPVSQVIDEISSIFSEIGFSVEEGPDIESEYYNFTALNTPENHPAKDMHDTFYIEENMKTLLRTHTSPVQVRTMLKGRPPFKIIAPGRTYRSDSDQTHTPMFHQLEGLHIDKNINMGHLKGCLNYFIKEFFEVDKIKMRFRPSHFPFTEPSAEVDIGYRIENNKIIIGEGDKWLEILGCGMVHPNVLKNSKVDPNKFQGFAFGIGIDRLAMLKYGINDLRSFFECDYRWLNYYGFDPLDVPTNYRGLSK

SEQ ID NO: 187973 - protein, 293 aa, Unknown
  Bacterial polypetide isolated from the Sargasso Sea
KKGAITIALKSVSSVDPKDRPAYGKKINELKSLIQGTLSQKRASLQKKEINQSIDDKKIDVSLPGRSNFGGHRHPVTKTLLEIEEIFYGAGFAVEDGPEIEDEYHNFTALNISSNHPARAMHDTFYFNSEFLLRTHTSPIQIRSMEKEGVPIRVIAPGKVYRRDSDITHTPMFHQIEGLVIDKGINFSHLKGILHQFIDTFFEENTEVRFRPSYFPFTEPSAEVDILSKENKWLEILGCGMVHPKVLENLDINTEIYSGYAFGMGVERLAMLKYGIKDIRSFYENDFNFLNQF

SEQ ID NO: 187974 - protein, 329 aa, Unknown
  Bacterial polypetide isolated from the Sargasso Sea
MQNLDELSSEILSAVEPANTTDALEAVRIDALGKKGRISLMMRELGGMDPEERKAAGQTLNKVKDGIAAAIETRQAVLSRAALDARLAAEAVDVSLPSRPETEARLHPLSRTIEEVVAIFAEMGFTVAEGPDIESDYYNFTALNIPEEHPARQEHDTFYLPPDEEGRRKVLRTHTSPVQIRTMEATEPPVRIIVPGRTYRSDHDATHSPMFHQCEGLVIGDGIHMGHLKGCLIDFCRAFFGVDDLPVRFRPSYFPFTEPSAEVDIGCTRDDGGLKIGAGDDWLEILGSGMVNPRVLANCGYDPEKYQGFAFGMGIERIAMLKYGIPDLR

SEQ ID NO: 187975 - protein, 284 aa, Unknown
  Bacterial polypetide isolated from the Sargasso Sea
MTELERIQKEFLDKFSKISSKDELQNLKSAFFGKSGLISLQFKKIGALNENEKKNFAKDLNKIKNNLSNKIDEKFKEIENLIINEKLKDEKIDITLPIRSQQKGKIHPVSQVIDEISSIFSEVGFSVAEGPDVETEYNNFTALNTPEDHPARDMHDTFYLDQDKKILLRTHTSPVQIRTMLNGKPPFKIIVPGRTYRCDSDQTHAPMFHQLEGLHIDKDISMAHLKGCLNYFIKEFFEVKKIKMRFRPSHFPFTEPSAEVDIGYSLVDGKIVIGEGDKWLEILG

SEQ ID NO: 187976 - protein, 268 aa, Unknown
  Bacterial polypetide isolated from the Sargasso Sea
MSDIIKIKDDYIDKLNTENNIDKVNNIKSELFGKNGIISNEFKKLGSISVEERKKLASDLNNIKDELQNKISIKIQEIETKEINLKLEKEKIDVTLPERDIEIGKIHPVSQVIDEISSIFSEIGFSVEEGPDVENEYNNFTALNTPDNHPARDMHDTFYLDNNKELLLRTHTSPVQVRTMLKGKPPFKIIAPGRTYRSDSDQTHAPMFHQVEGLHIDKNINMGHLKGCLNYFIKEFFEVDKIKMRFRPSHFPFTEPSAEVDIGYEIKM

SEQ ID NO: 187977 - protein, 286 aa, Unknown
  Bacterial polypetide isolated from the Sargasso Sea
MSDLRELIQKVLQAKDKLELQNLKSQFLGKNSQINQEFKKLGSLSENDRKIRASSLNDEKQKITEAINNKFKELENLEINQKLQKNKVDVTLPARERPNGKIHPVSQVIDEISSIFSEIGFTVAEGPDVESEYNNFTALNTPEDHPARDMHDTFYLDKNKKILLRTHTSPVQIRTMLSGKAPFKIIVPGRTYRCDSDQTHAPMFHQLEGLHIDKDINMGHLKGCLDYFVKEFFEVKKIRMRFRPSHFPFTEPSAEVDIGYRLENGRIIVGEGDKWLEILGCGMVHP

SEQ ID NO: 187978 - protein, 237 aa, Unknown
  Bacterial polypetide isolated from the Sargasso Sea
MSDIKKIKEDYLGKLRSKLNLEEVNQIKTELFGKNGLISNSFKELGSMQSEDRKKFASDLNFIKDELQEKINSKLQEIEINEINSKLKNEKVDVTLPEREINLGKIHPVSQVIDEISSIFSEIGFSVEEGPDVENQHYNFTALNTPDDHPARDMHDTFYLDDKKELLLRTHTSPVQIRTMLKDKPPFKIIAPGRTYRSDSDQTHSPMFHQVEGLNIDKDINMGHLKDCLNYFIKRVF

SEQ ID NO: 187979 - protein, 307 aa, Unknown
  Bacterial polypetide isolated from the Sargasso Sea
IGTIAESEKKKFASDLNIIKDELQSLINSKINEAENTEINKKLEQERIDITLPERSFVRGKIHPVSQTIDEISSIFSEIGFSVEEGPDVENEYNNFTALNTPENHPARDMHDTFYLDEKKQNLLRTHTSPVQIRTMIKDKPPFKIIAPGRTYRSDSDQTHAPMFHQVEGLHIDKDINMGHLKGCLNYFIKEFFEVDKIKMRFRPSHFPFTEPSAEVDIGYEMKDGKIIVGEGDQWLEILGCGMVHPNVLKNVNVDAAKYQGYAFGIGIDRLAMLKYGINDLRAFFDCDYRWLSHFGFDPLDVPSNYR

SEQ ID NO: 187980 - protein, 250 aa, Unknown
  Bacterial polypetide isolated from the Sargasso Sea
SELNSIKDELQEKINFKLHEIEIKEINSKLVNEKVDVTLPEREINQGKIHPVSQVIDEISSIFSEIGFSVEEGPDIENEHYNFTALNTPDNHPARDMHDTFYLDDNKELLLRTHTSPVQVRTMLNGKPPFKIIAPGRTYRSDSDQTHSPMFHQVEGLHIDKNINMGHLKGCLNYFIKSFFEVDKIKMRFRPSHFPFTEPSAEVDIGYELKDGKIVIGEGDKWLEILGCGMVHPNVLKNVKVNPEKYQGYA

SEQ ID NO: 187981 - protein, 243 aa, Unknown
  Bacterial polypetide isolated from the Sargasso Sea
CQQKRKKEFASDLNRLKDSLSKQIEAKNLEIETQEINEKLKNEKIDVTLPIRSYRQGKIHPVSQVIDEISSIFSEIGFSVAEGPDVETEYNNFTALNTPEDHPARDMHDTFYLDKNKKLLLRTHTSPVQIRSMINEKPPFKIIVPGRTYRSDSDQTHSPMFHQLEGLHIDKNITMGHLKGCLDYFIKEFFEVKNVKMRFRPSHFPFTEPSAEVDIGYRLENGKIIIGEGDKWLEVLGCENGAP

SEQ ID NO: 187982 - protein, 263 aa, Unknown
  Bacterial polypetide isolated from the Sargasso Sea
RDVCAVNNLKLKLPKFKKQRQNLDSKKTVSIDKSACSSYLGQIIKLKNKGKTPQYIKKTLKAADIGQVNTIVDITNYVMLHTGQPLHAFDSKKIGKKIYVKFPSKRTKLKLLDGASHFITKDYLTICDEKGAIALAGIMGCANSEVDETTQEIFLESACFEPASIRGNARKLGFQSEASIRFERGVDKEIQEYAINFAGQLYAEIFGGDFSKIFRQSKNHKAKKILISKEFIDSRLGTEIPTTKVIKLLKALEFRVELKRNLM

SEQ ID NO: 187983 - protein, 180 aa, Unknown
  Bacterial polypetide isolated from the Sargasso Sea
PEEHPARDMQDTFYLPGDCLLRTHTSPVQIRHLESNPPPVRVIAPGRVYRRDAVDATHSPVFHQVEVLAIDEGLDFSHLRGTVSHFLKAFFGDLPVRFRASYFPFTEPSAEVDVQWRGRWLEVMGCGMVDPAVLEGMGLDPERWSGFAAGLGVERFCMVRHGIDDIRRLFTSDLRFLEQF

SEQ ID NO: 187984 - protein, 178 aa, Unknown
  Bacterial polypetide isolated from the Sargasso Sea
MSDIIKIKEEYLNKLKDNLDLNTINQLKSELFGKNGKISNEFKKMGSIPAEDRKKFASDLNSIKDELQSLIEKKIQDIEINEINLKLQIEQVDVTLPERSFNQGKIHPVSQVIDEISSIFSEIGFSVQEGPDVENEYNNFTALNTPDNHPARDMHDTFYLDNKKEFLLRTHTSPVQVR

SEQ ID NO: 187985 - protein, 264 aa, Unknown
  Bacterial polypetide isolated from the Sargasso Sea
ASLENEKARFLGKSGVLTDLLKGLGKLDPETRKSEGARINQAKSRVEEALNARRQALADALMNARLAAEAIDVTLPGRDVAEGSLHPVMNTWERVAKIFGSIGFDVADGPEIESDWMNFTALNNPDNHPARSMQDTFYIDGRDSEDKLLLLRTHTSPMQVRYARMHVEKYKHLDRIPPIKVIAPGRTYRVDSDATHSPMFHQVEGLWIADNISFADLKGVYTDFLRNFFERDDIQVRFRPSYFPFTEPSAEIDMAFGHGKWLGD

SEQ ID NO: 187986 - protein, 144 aa, Unknown
  Bacterial polypetide isolated from the Sargasso Sea
EGLHIDTNIYMGHLKGCLNYFIKEFFEVEKIKMRFRPSHFPFTEPSAEVDIGYEIKDGQIIIGEGDKWLEILGCGMVHPNVLRNVKVDPSKYQGYAFGIGIDRLAMLKYGINDLRAFFDCDYRWLNHFGFDPLDVPSNYRGLSR

SEQ ID NO: 187987 - protein, 196 aa, Unknown
  Bacterial polypetide isolated from the Sargasso Sea
LEKNKKLLLRTHTSPVQIRAMLDGKPPFKIIVPGRTYRCDSDQTHAPMFHQLEGLHIDKDITMGHLKGCLDYFIKEFFEVKNVKMRFRPSHFPFTEPSAEVDIGYKIENEKIVIGEGDKWLEILGCGMVHPNVLKNAKVDSKKYQGFAFGMGIDRLAMLKYGINDLRAFFETDFRWLSHFGFDPLDVPTNYRGLSK

SEQ ID NO: 187988 - protein, 197 aa, Unknown
  Bacterial polypetide isolated from the Sargasso Sea
MSDIIKIKTEYLNKLKEVSDLKEINQIKSELFGKSGKISNEFKKLGSQNSEERKKISSELNDTKSELQNSIEKKIKDIEINEINLKLKNERVDVTLPERTFNRGKIHPVSQVIDEISSIFSEIGFSVEEGPDVENEYNNFTALNTPESHPARDMHDTFYLDKNKKFLLRTHTSPVQVRTMLKGKPPFKIIAPGRTYR

SEQ ID NO: 187989 - protein, 128 aa, Unknown
  Bacterial polypetide isolated from the Sargasso Sea
CLNYFIKEFFEVKKIKMRFRPSHFPFTEPSAEVDIGYRIENNKIIIGEGDKWLEILGCGMVHPNVLKNCKVDPKIYQGFAFGIGIDRLAMLKYGINDIRSFFECDYRWLNYYGFDPLDVPTNYRGLSK

SEQ ID NO: 187990 - protein, 213 aa, Unknown
  Bacterial polypetide isolated from the Sargasso Sea
MPDTKDVSSPRLIKEIGAYHPINQMKDSLMNLLISFGFEIIDGPEIETEEFNFDMLNIKESHPARQMHDTFYVNKKSSVLRTHTSPVQIRGMLEKKPPLAFISGGKVYRKDDDATHLPMFHQIEGMYIDEGVNFANLKDLIYKIIQALFGEEIKIRFRPSYFPFTEPSAEVDILSPDGEWLEILGCGVINPIVLENCKINSNKYSGFAFGLGI

SEQ ID NO: 187991 - protein, 210 aa, Unknown
  Bacterial polypetide isolated from the Sargasso Sea
MENHPARDMHDTFYLSNSKDLLLRTHTSPVQIRTMLKSKPPFKIIAPGRTYRHDSDQTHSPMFHQLEGLHIDQNINMGHLKGCLYYFVKKFFEVEKVKIRFRPSHFPFTEPSAEVDIGYKIQDGKIKIGEGDKWLEILGCGMVHPQVLKNAKVNTKQYQGYAFGVGIDRLAMLKYGINDLRAFFESDIRWLEFYGFDPLDVPTNYRGLSR

SEQ ID NO: 187992 - protein, 210 aa, Unknown
  Bacterial polypetide isolated from the Sargasso Sea
PDNHPARDMHDTFYLDDKKERLLRTHTSPVQIRTMLKDKPPFKIIAPGRTYRSDSDQTHSPMFHQVEGLHIDKNINMGHLKGCLNYFIKEFFEVKKIKMRFRPSHFPFTEPSAEVDIGYEIKDGKIIIGEGDQWLEILGCGMVHPNVLKNVKVDPTNFQGYAFGIGIDRLAMLKYGINDLRAFFDCDYRWLNHFGFDPLDVPTNYRGLSR

SEQ ID NO: 187993 - protein, 255 aa, Unknown
  Bacterial polypetide isolated from the Sargasso Sea
MENLRNKYIEAIATVDDENALEAVRLAALGKKGEVSLKMRELGQMSPEERQVAGPALNDLKNEIISAISAKKEALEDLVLNDRLKSEWLDVTLPSRERPSGTIHPISQVTEEVISIFASMDFSVAEGPRIETDWYNFDALNIPSHHPARAEMDTFYMYRSENDDRAPHVLRTHTSPVQIRTMENTGAPVRVICPGGVYRADYDQTHTPMFHQVEGLAIDQSLSMANLKWVLEEFVKAYFEVSDVELRFRASHFPL

SEQ ID NO: 187994 - protein, 178 aa, Unknown
  Bacterial polypetide isolated from the Sargasso Sea
RTMLKDKPPFKIIAPGRTYRSDSDQTHSPMFHQVEGLHIDTNINMGHLKGCLNYFIKEFFEVEKIKMRFRPSHFPFTEPSAEVDIGYEIKDGKIIIGEGDKWLEILGCGMVHPNVLKNVKVDPSKYQGYAFGIGIDRLAMLKYGINDLRAFFDCDYRWLNHFGFDPLDVPSNYRGLSR

SEQ ID NO: 187995 - protein, 135 aa, Unknown
  Bacterial polypetide isolated from the Sargasso Sea
VFRKDDDATHLPMFHQVEGIYVDKDVNFSQLKDLIYKIIHDLFGNNVEVRFRPSYFPFTEPSAEVDILSDSGKWLEILGCGIVNPIVLENCNIDSEEFSGLAFGLGVERIAMLKYGVNDIRDFYKSNLDFLAQFK

SEQ ID NO: 187996 - protein, 171 aa, Unknown
  Bacterial polypetide isolated from the Sargasso Sea
PPFKIIVPGRTYRCDSDQTHAPMFHQLEGLHIDRNITMGHLKGCLDYFIKEFFEVKNVKMRFRPSHFPFTEPSAEVDIGYRIENEKIIIGEGDKWLEILGCGMVHPNVLNNAKVDPKKYQGFAFGMGIDRLAMLKYGINDLRAFFETDYRWLSHFGFDPLDVPTNYRGLSK

SEQ ID NO: 187997 - protein, 235 aa, Unknown
  Bacterial polypetide isolated from the Sargasso Sea
GTKEVSERKKFASDLNVIKNELQDLINMKINEIQNANINEKLEKEKIDVTLPERPFARGKIHPVSQTIDEISSIFSEIGFNVEEGPDVENEYNNFTALNTPDNHPARDMHDTFYLDDKKKKLLRTHTSPVQIRTMLKGKPPFKIIAPGRTYRSDSDQTHSPMFHQVEGLHIDKDINMGHLKGCLNYFIKEFFEIKKIKMRFRPSHFPFTEPSAEVDIGYEIKDEKIIYRGKVISG

SEQ ID NO: 187998 - protein, 214 aa, Unknown
  Bacterial polypetide isolated from the Sargasso Sea
MSDLDKISSVFNAKIDSVKTKDDLQNIKTEFFGKNGQITQQFKSLGSLDPEKRKEFASNLNKIKDDLSNQLEQKNIEIEATEINEKLKNEKVDVTLPIRPDRQGKIHPVSQVIDEISCIFSEIGFSVAEGPDVESEYNNFTALNTPEEHPARDMHDTFYLEENKKLLLRTHTSPVQIRTMQAGKPPFKIIVPGRTYRCDSDQTHAPMFHQLEGL

SEQ ID NO: 187999 - protein, 212 aa, Unknown
  Bacterial polypetide isolated from the Sargasso Sea
YFHILNYSSYFGNEIESDYYNFEALNFPQNHPARQMHDTFYLNKSLNDKCLLRTHTSNTQIHMMLNKSAPIYMLSPGRVYRCDHDMTHLPMFTQVEGLAVDQNISFSDLKGTIIGFIDYFFNQSVDVRFRPSYFPFTEPSAEVDIRFGKKGWLEILGCGMVHPNVLRNCNIDARKYRGFAFGVGVERLAMLYYGVEDIREFYASNSEFLNQI

SEQ ID NO: 188000 - protein, 185 aa, Unknown
  Bacterial polypetide isolated from the Sargasso Sea
MELDAIINQAQSQIDAAQDAATLDQVRVEFMGKKGKLTDLLKGLGKLSNEERPAAGQKINQAKQVIQQAISAKGEFLRTEELNKKLAEEAVDVTLPGRTEKPGNLHPVSRTIARIESFFGELGFSVKTGPEIEDGFHNFDALNIPANHPARADHDTFYFNPDMMLRTQTSGVQIRTMEAEKPPLR

SEQ ID NO: 188001 - protein, 229 aa, Unknown
  Bacterial polypetide isolated from the Sargasso Sea
MDLAQEKITFLNKFKEANSQDSLNSLKIEYLGKKGVLSSLMSQLSKAPAEKKPELGKSINEFKSLIEESISSSLEKIEQSALDEQLSNEAIDVTLPLSPDVGSYHPISLIANEISNYFKNKGYVLREGPEIESEYFNFSALNIPENHPARDMHDTFYFDNGNLLRTHTSPVQIRSMELESPPLKILCPGKVFRCDSDQTHTPMFHQVEGLVVDKDINFAHLKNEILEFV

SEQ ID NO: 188002 - protein, 265 aa, Unknown
  Bacterial polypetide isolated from the Sargasso Sea
KSELFGKNGKISNSFKNLGSLPAEERKKFASDLNFIKDELQEKINKKIQEIEITEINSKLESEKVDVTLPERDIVRGKIHPVSQVIDEISSIFSEIGFSVEEGPDVENEHFNFTALNTPDNHPARDMHDTFYLDDKKELLLRTHTSPVQVRTMLKGKPPFKIIAPGRTYRSDSDQTHAPMFHQVEGLHIDKNINMGHLKGCLNYFIKSFFEVDKIKMRFRPSHFPFTEPSAEVDIGYKVKDGKIIIGEGDKWLEILGCGMVHPNV

SEQ ID NO: 188003 - protein, 90 aa, Unknown
  Bacterial polypetide isolated from the Sargasso Sea
LENNKIIIGEGDRWLEILGCGMVHPNVLKNCKVDPIKFQGFAFGIGIDRLAMLKYGINDLRSFFECDYRWLNHYGFDPLDVPTNYRGLSR

SEQ ID NO: 188004 - protein, 182 aa, Unknown
  Bacterial polypetide isolated from the Sargasso Sea
MNKLDSDLNVEILNQIKTELFGKNGKISNSFKSLGSLPNDERKKFASDLNSIKEELQDKINFKLLEIETKEINSKLENEKLDVTLPEREFSRGKIHPVSQVIDEISSIFSEIGFSVEEGPDIENEHYNFTALNTPDNHPARDMHDTFYLDKNKELLLRTHTSPVQVRTMLNGKPPFKIIAPG

SEQ ID NO: 188005 - protein, 234 aa, Unknown
  Bacterial polypetide isolated from the Sargasso Sea
MSDLDKISSLFNAKIDTVKTKDDLQIVKTEFFGKKGQITQQFKSLGSLESEKRKEFASNLNRIKEDLTRQLEQKNIEIETSEINEKLKNEKVDVTLPIRPERQGKIHPVSQVIDEISSIFSEIGFSVAEGPDVETENYNFTALNTPEEHPARDMHDTFYLEENKKLLLRTHTSPVQIRTMLSSKPPFRIIAPGRTYRCDSDQTHAPMFHQLEGLHIDKGITMGHLKGCLDYFIK

SEQ ID NO: 188006 - protein, 275 aa, Unknown
  Bacterial polypetide isolated from the Sargasso Sea
MEKNITDIIKKAKELSLNLKQEINHIKDLKEIDLIKIKYTGKKGLFTLLLKSLADLNSDDRAKVGKAINLIKKDIEKIIISHKSLIENKILNESLEKEKIDISLPGRPVLRGGIHPISKTMDEIISILGALDFNVEEGPHIEDDYFNFTALNIPEDHPARQEHDTFYIKGSNKKKLLRTHTSPIQIRVMKEKKPPIKIIAPGNTYRCDDDATHSPMFHQIEGLVVDKNISMANLKWTIKELLASFFNVKDLPMRFRPSYFPFTEPSAEVDIGCEV

SEQ ID NO: 188007 - protein, 286 aa, Unknown
  Bacterial polypetide isolated from the Sargasso Sea
VKLKTEKINNEILDKQIKTESLDVTLSVNSPSGTIHPITQVIDEVIAIFADLDFCVAEGPEIETDYNNFTALNTSEHHPARQMHDTFYVNSETDGMQNVMRTHTSPVQIRSMLCQDPPIRLIAPGKTFRCDNDQTHTPMFHQVEGLVIDKESNMGHLKGCLEIFLKSFFETDSLNMRFRPSHFPFTEPSAEVDIGYKKKGNQLIIGEGSDWLEILGCGMVHPNVLRNVNIDPDVYQGYAFGMGIERLAMLKYGISDLRTFFENDIDWNQHYGFSPLNKPTIFGDLS

SEQ ID NO: 188008 - protein, 217 aa, Unknown
  Bacterial polypetide isolated from the Sargasso Sea
NFTALNTPENHPARDMHDTFYLDNDKKILLRTHTSPVQVRTMLNGKPPFKIIVPGRTYRCDSDQTHAPMFHQLEGLHIDKDITMGHLKGCLDYFVKEFFEVKKIKMRFRPSHFPFTEPSAEVDIGYKLENGRIIVGEGDKWLEILGCGMVHPNVLKNAKVDPNKFQGFAFGMGIDRLAMLKYGINDLRSFFESDYRWLNYFGFDPLDVPTNYRGLSR

SEQ ID NO: 188009 - protein, 76 aa, Unknown
  Bacterial polypetide isolated from the Sargasso Sea
GEGCNICKHTGWVEIGGCGMVDPNVLENCKIDPDKYTGFAFGMGVERIAMLKYKINDIRLFFDNDIRFLKQFSSII

SEQ ID NO: 188010 - protein, 325 aa, Unknown
  Bacterial polypetide isolated from the Sargasso Sea
VDGVVLGKVLSVLKHEGSDKLSICQVDIGTSKNLQIICGAHNIKPDIYVYVATVGAKLNAVNLTIKRSEIRGVMSEGMICSLHELGIEDYSEGIEIIDEDLALEHELGTPGSILLQLNDFIYDLAITANRPDGMSVIGIAREISALLESTFNFPELNHKYNIHLLNDIELCQEAITSDCIYTISCIDGVDGEILSPKWLKDRIEKSGIKSINLLVDLTNYILLEQGQPLHAFDKDKLSNLIGKQVSPEDFSVRKAKDNENLVCLDGKKYDLNENITVITCCDKPVAIAGVIGGLETSVTNTTSSIYLEGAVFNPVTIRKSSKAIG

SEQ ID NO: 188011 - protein, 191 aa, Unknown
  Bacterial polypetide isolated from the Sargasso Sea
EYNFDMLNIPASHPARDMHDTFYVDNKKKLLRTHTSPVQVRCMLKDKPPLAFISPGKVYRKDDDSTHLPMFHQIEGLYVDEDVSFAQLKDLMYKICHSLFGEATKLRFRPSYFPFTEPSAEVDVLFGNKWLEILGCGVVNPKVLENCKIDSSKYSGLAFGLGIERIAMLKYGVNDIRDFYKSNLDFLRQFK

SEQ ID NO: 188012 - protein, 275 aa, Unknown
  Bacterial polypetide isolated from the Sargasso Sea
NLRIENPDLCPRYSALLIRGITIGPSPFWMQQRLQRAGMRPINNIVDITNYVMLELGQPLHAFDYQALCQRAAGETPEIFVRCAVNGEVMTTLDGEERKLDEQMLMITDEAGLIAIAGVMGGEETEVGNETKDVLLESANFDFLNNRRTSQLLKLKTEASERFGKRLNADGTMTAALRAAELCVSIAGGTLELQAADLYPGKLADESVELDLEYLERVLGIKVEKNEVNRILEALGFTVQNKTDQLLEVTVPHHRLDIAIPADLVEEIARVYGYN

SEQ ID NO: 188013 - protein, 91 aa, Unknown
  Bacterial polypetide isolated from the Sargasso Sea
KIENEKIVIGDGDKWLEILGCGMVHPNVLKNAKINPKNYQGFAFGMGIDRLAMLKYGINDLRAFFETDYRWLSHFGFDPLDVPTNYRGLSK

SEQ ID NO: 188014 - protein, 279 aa, Unknown
  Bacterial polypetide isolated from the Sargasso Sea
ETQNQEINKKLKNDTIDVTLPGRTYYAGKIHPVSQVIDEVTSIFSEIGFSVEEGPDVESEYYNFSALNTPENHPARDMHDTFYLDQSKDLLLRTHTSPVQIRTMLKSKPPFKIIAPGRTYRHDSDQTHSPMFHQLEGLHIDKNINMGHLKGCLYYFVKKFFEVDKVKIRFRPSHFPFTEPSAEVDIGYKIKDGKIKIGEGDKWLEILGCGMVHPNVLKNAKVNPKQYQGYAFGVGIDRLAMLKYGINDLRAFFESDIRWLEFYGFDPLDIPTNYRGLSR

SEQ ID NO: 188015 - protein, 282 aa, Unknown
  Bacterial polypetide isolated from the Sargasso Sea
SEDQRKTRASSLNNEKQKISEAINDRFKELEKSEINQKLQKDKVDVTLPAPERPNGKIHPVSQVIDEISSIFSEIGFSVAEGPDVETEYNNFTALNTPEDHPARDMHDTFYLDSNKKILLRTHTSPVQIRAMLSGKPPFKIIVPGRTYRCDSDQTHAPMFHQLEGLHIDKNITMGHLKGCLDYFVKEFFEVKKLQMRFRPSHFPFTEPSAEVDIGYRLENGRIIVGEGDKWLEILGCGMVHPKVLKNAKVDTKKFQGFAFGMGIDRLAMLKYGINDLRSFFE

SEQ ID NO: 188016 - protein, 171 aa, Unknown
  Bacterial polypetide isolated from the Sargasso Sea
YILDNKLEKLLRTQTSTVQVRHMQNNKPPVYIVAPGRVYRSDQLDATHSPVFHQIEGLAVDENLTFSDLKGTLEYFVKEFFGKDLKTKFIPHFFPFTEPSAEVLVSWKDGEWLEILGCGMVDPNVFKHVGYDKDSQGFAFGVGVERLAMIRYGIDHIKNFYENDLRFLRQF

SEQ ID NO: 188017 - protein, 333 aa, Unknown
  Bacterial polypetide isolated from the Sargasso Sea
DLGDGNAPVQIVCGAPNVAAGQKVPVATIGTKLYDKDGNAFEIKKGKIRGQESYGMICAEDELGLGESHDGILILDENLKPGTLGKDVFNIETDEVFEIGLTPNRADAMSHWGVARDLKAGLIQSNVTSELMTPSVSSFRIDKRTLKIDIDVENKELVPRYCGVTISGVSVKTSPTWLQNRLKAIGLTPKNNIVDVTNYVMHELGQPTHAFDANKIKGNKVIVKTVKAGTKFTTLDGVERELDAEDVMICNAESPMCIAGVFGGIESGVTEHTTNIFLESAYFNPVSVRKTAKRHGLNTDASYRFERGIDPSITEYALKRAALLIQEVAGEKS

SEQ ID NO: 188018 - protein, 191 aa, Unknown
  Bacterial polypetide isolated from the Sargasso Sea
MSDIKKIKDEFLERLNEDLNIESVNEIKSELFGKNGKISTSFKNLGSLPAEERKKFASDLNFVKDELQEKINKKIQEIEIKEINSKLENEKIDVTLPERNIVQGKIHPVSQVIDELSSIFSEIGFSVEEGPDVENEHYNFTALNTPDNHPARDMHDTFYLDDKKELLLRTHTSPVQVRTMLKGKPPFKIIA

SEQ ID NO: 188019 - protein, 307 aa, Unknown
  Bacterial polypetide isolated from the Sargasso Sea
MERAGINRVNAVVDVTNVVMLEQGQPLHAFDADALEQLTGQPVDAASFALRQAHEGEAFTGLDDRELVLDPRAQVVTCHDRPVALAGVIGSRESGVTEATRRIWLESAMFTPSSVRETARSVGLRTDASARFEKGLPKDLTLACSVRAVELLEDLFRCRVTGRWVCGDVSPESKPVLLRREALQRLLGSLESQEEVRHLEDAEIERCLTALGCELTAMDEGWQVIAPPSRRQDLCREVDLIEEVARLVGFDRFGSHLPDPIVPGRLTPTQQAERRLRRLFSGCGLQEITTLSLVGPSETENPDPAHE

SEQ ID NO: 188020 - protein, 265 aa, Unknown
  Bacterial polypetide isolated from the Sargasso Sea
KIDITLPERPFVRGRIHPVSQTIDEISSIFSEIGFSVEEGPDVENEYNNFTALNTPDNHPARDMHDTFYLDEKKQKLLRTHTSPVQIRTMLKDKPPFKIIAPGRTYRSDSDQTHSPMFHQVEGLHIDTNINMGHLKGCLSYFIKEFFEVKKIKMRFRPSHFPFTEPSAEVDIGYEIKDGKIIIGEGDKWLEILGCGMVHPNVLRNVKVDPAKYQGYAFGIGIDRLAMLKYGINDLRAFFDCDYRWLNHFGFDPLDVPSNYRGLSR

SEQ ID NO: 188021 - protein, 182 aa, Unknown
  Bacterial polypetide isolated from the Sargasso Sea
PVQIRTMLSSKPPLKIIVPGRTYRCDSDQTHAPMFHQLEGLHIDTGITMGHLKGCLDYFIKEFFEVKNVKMRFRPSHFPFTEPSAEVDIGYKIEKGKIVIGEGDKWLEILGCGMVHPNVLRNVKIDSKKFQGFAFGIGIDRLAMLKYGINDLRAFFEADYRWLNHFGFDPLDVPTNYRGLSK

SEQ ID NO: 188022 - protein, 168 aa, Unknown
  Bacterial polypetide isolated from the Sargasso Sea
SNKKFVLRTHTSPVQIRSILQSKPPFAYISGGKVYRKDDDSTHLPMFHQIEGILVDKSVTFGNLKYLMHEILNELFGHEVKVRFRPSYFPFTEPSAEVDILSKNGKWLEILGCGIVNPIVLSNCNIDPHKFSGLAFGLGVERIAMLKYGVTDIREFYKSNLDFLEQFK

SEQ ID NO: 188023 - protein, 207 aa, Unknown
  Bacterial polypetide isolated from the Sargasso Sea
HPARDMHDTFYLDSNKELLLRTHTSPVQVRTMLNGKPPFKIIAPGRTYRSDSDQTHSPMFHQVEGLHIDKDINMGHLKGCLNYFIKSFFEVDKIKMRFRPSHFPFTEPSAEVDIGYEMKDGKIVIGEGDKWLEILGCGMVHPNVLKNVKVNPDKFQGYAFGIGIDRLGMLKYGINDLRAFFETDYRWLNHFGFDPLDVPSNYRGLSR

SEQ ID NO: 188024 - protein, 206 aa, Unknown
  Bacterial polypetide isolated from the Sargasso Sea
MSDLKKIKDEFLSKLSGKLDIPEINQIKSDLFGKSGLISTQFKKIGTIAESERKKFASDLNIIKDELQDLISSKIKEVESAEINKKLEKEKIDITLPERSFVRGKIHPVSQTIDEISSIFSEIGFSVEEGPDVENEYNNFTALNTPESHPARDMHDTFYLDEKKQKLLRTHTSPVQIRTMLKDKPPFKIIAPGRTYRSDSDQTHSP

SEQ ID NO: 188025 - protein, 284 aa, Unknown
  Bacterial polypetide isolated from the Sargasso Sea
SDLNFVKDELQEKINKKIQEIEIKEINSKLKNEKIDVTLPERNIIQGKIHPVSQVIDELSSIFSEIGFSVEEGPDVENEHYNFTALNTPDNHPARDMHDTFYLDDKKELLLRTHTSPVQVRTMLKGKPPFKIIAPGRTYRSDSDQTHAPMFHQVEGLHIDKNINMGHLKGCLDYFIKSFFEVDKIKMRFRPSHFPFTEPSAEVDIGYELKDGKIVIGEGDKWLEILGCGMVHPNVLKNVKINPEKYQGYAFGIGIDRLAMLKYGINDLRAFFETDYRWLNHFGF

SEQ ID NO: 188026 - protein, 278 aa, Unknown
  Bacterial polypetide isolated from the Sargasso Sea
KAKLRGMPSEGMLCSYSELGINVESDGIIELPLDAPLGTDLREYLKLDDAVIEVDLTANRADCLGMVGLAREVGVLNRQAVVEPQWQAVMPTIDAKVTINVKAPTACPRYLGRVVKNVNVKAATPLWMQEKLRRSGIRSIDPIVDITNFVLVEFGQPMHAFDLAKLTGDIQVRLGNGDEKITLLDGSEVTIPSDTLVIADDARPLALAGVFGGEYSGVSDTTQDILLECAFFAPLAIMGKSRRLGLHTDSSHRFERGVDPEMQHKVIDRATRLVLDIC

SEQ ID NO: 188027 - protein, 202 aa, Unknown
  Bacterial polypetide isolated from the Sargasso Sea
VASSWPPNDEHWAMESKTVDFFDLKGDLEAIIGLTVSASEFSFRVATHSALHPGQCAEILRNDRVIGHIGAIHPSLEKPFGLNGKTIVFELELDALLHTSLPLAQAVSKFPANRRDIAVVVDESVSAGDVMKLIRKVGENQLVGINLFDVYLGKGVEPGKKSLAIALTLQDTTRTLEEKEIAETVESVVSALKTEFNASLRD

SEQ ID NO: 188028 - protein, 139 aa, Unknown
  Bacterial polypetide isolated from the Sargasso Sea
THSPMFHQVEGLLIDEEVSFGQLKGIIQDFLHAFFEQDALAVRFRPSYFPFTEPSAEVDIQCVKCAGEGCRICSGTGWLEVMGCGMVHPRVLEMSGVDTERYQGFAFGMGVERLAMLRYGIGDLRLNFENDLRFLAQFR

SEQ ID NO: 188029 - protein, 280 aa, Unknown
  Bacterial polypetide isolated from the Sargasso Sea
DLTPNRSDCLSIKGLAREVGVLNSLLVNAPAIEPVEAVHSEVPDIRVEAPAGCPRYLGRVLRNVNLQAETPLWMQEKLRRSGIRSIDAAVDVTNYVMLELGQPMHAFDREEIQGGIVVRMAKPAEKLVLLDGQEVELTENTLVIADHEKPVAIAGVMGGEHSGVSAKTRDLVLESAYFDPITLAGKAREYGLHTDASHRFERGVDYELARDAMERATRLLMDIVGGEPGEIVEVYSQKHLPKAREIDLREQRLADVLGLAIDRTTVEEILTRLGLRMKSC

SEQ ID NO: 188030 - protein, 208 aa, Unknown
  Bacterial polypetide isolated from the Sargasso Sea
DHPAKDMHDTFYLDENMKTLLRTHTSPVQVRTMLKGKPPFKIIAPGRTYRSDSDQTHTPMFHQLEGLHIDKNINMGHLKGCLNYFIKEFFEVDKIKMRFRPSHFPFTEPSAEVDIGYRIENNKIIIGEGDKWLEILGCGMVHPNVLKNCKVDSKIYQGFAFGIGIDRLAMLKYGINDLRSFFECDYRWLNYYGFDPLDVPTNYRGLSK

SEQ ID NO: 188031 - protein, 255 aa, Unknown
  Bacterial polypetide isolated from the Sargasso Sea
MSLSVDSVDIKKKIENCKTLQEVEVIRLEYLGKKGLIPSEMKLLSNLTIDQKKIKGHELNKLKNFVEDTINNHKILIENKQLEEKLKNESVDVTLPHNEEVAGKIHPISQTIFSIIEIFGNLNYSVEAGPDIESDFNNFSALNIPPHHPAREMQDTFYVNNPNGEDNVLRTHTSPVQVRTMLKSRPPIKIIVPGRTYRSDSDSTHTPMFHQVEGLLVNKDATMADLKSTLILFLKEFFEIDNLKYRFRPKLFPFT

SEQ ID NO: 188032 - protein, 320 aa, Unknown
  Bacterial polypetide isolated from the Sargasso Sea
VLNNLDVNEPAISAVAATIDDSIDITLSAPEACPRYLGRVLRNVDVTAATPLWLSEKLRRCGIRSIDPIVDVTNFILLELGQPMHAFNLAAIEGNVNVRMANKGETLTLLDETEAKLNDDTLVIADDNKALAMAGIFGGLHSGVNSDTKDILLESAFFSRDAIMGRARQYGLHTDASHRYERGVDSQLQRNAMERATALILDICGGEAGPVVEACEESKLPQQASVLLRRDRLARVLGITIDDAQVLEMLERLGLDVVQTAQGWEAKAPSYRFDIAIEEDLIEEVARVYGYNNIPHVAPTASLSMLPSQEAVLPINTMKS

SEQ ID NO: 188033 - protein, 263 aa, Unknown
  Bacterial polypetide isolated from the Sargasso Sea
VLNDLKNEISKSLDKINPSSSSKMTQEDISLPGLEFPSGTIHPLQQTMNDIKRIFMNVGFSVAYGPEIDDDFHNFSALNFPPEHPARDMQDTFFIDPKTMLRTHTSNVQIHLMENEPPPLRYIVPGRVYRNEDISFKSYCLFHQVEGIYVDKNVSFADHKGILEFFVKRMFGDNTKMRFRPSFFPFTEPSAEVDIWSDKRQQWLEILGSGMVDPEVFKSVNIDPDIWHGFAFGMGIERICMLKYGIDDIRLLYQGDMRFLEQF

SEQ ID NO: 188034 - protein, 159 aa, Unknown
  Bacterial polypetide isolated from the Sargasso Sea
RHDSDQTHSPMFHQLEGLHIDKDINMGHLKGCLYYFVKKFFEVEKVKIRFRPSHFPFTEPSAEVDIGYKIQDGKIKIGEGDKWLEILGCGMVHPNVLKNAKVNPKQYQGYAFGVGIDRLAMLKYGINDLRAFFESDIRWLKFYGFDPLDVPTNYRGLSR

SEQ ID NO: 188035 - protein, 191 aa, Unknown
  Bacterial polypetide isolated from the Sargasso Sea
MSEFEKKIIELKDKIKSSLKIDEVEIIRSELFGKNGIINSEFKKIGSLSGEEKKEFAANINKVKQELLDIYKAKSDELLNKDLIEKVAKEKIDITLPEKEFRIGKIHPVSQVIDEISCIFSELGFSVEEGPDVENEYNNFTALNTPENHPAKDMHDTFYLDQDMKTLLRTHTSPVQVRTMLKGKPPFKIIA

SEQ ID NO: 188036 - protein, 208 aa, Unknown
  Bacterial polypetide isolated from the Sargasso Sea
NHPAKDMHDTFYLDEKKEKLLRTHTSPVQIRTMLKNKPPFKIIAPGRTYRSDSDQTHTPMFHQVEGLHIDKDINMGHLKGCLNYFIKEFFEVDKIRMRFRPSHFPFTEPSAEVDIGYEIKGGKIVIGEGDQWLEILGCGMVHPNVLKNVKVNPTKFQGYAFGIGIDRLAMLKYGINDLRAFFDCDYRWLNHFGFDPLDVPTNYRGLSR

SEQ ID NO: 188037 - protein, 286 aa, Unknown
  Bacterial polypetide isolated from the Sargasso Sea
ELSDEHDGIIELPSGDVGEAYGNWLLKNESEKVDAVVEIAITPNRPDALGVRGIARDLAARGLGTLKPMEVRPIPGKFECPISVSIDPDTLVNAPVFYGRLIRGVKNGPSPKWLQNRLRAIGLRPISTLVDITNFFTYDTNRPLHVFDADKLNGTSIRLHDALGGEKFSALDDKEYVLSKRMTVISDSEGIESLAGIMGGSASGCTDTTENVFIEAAYFNPIRTAYTGRELKINSDARYRFERGIDPEWTAFGIEAATKMIIELCGGEPSNVVQAGEIPNHGRAYK

SEQ ID NO: 188038 - protein, 292 aa, Unknown
  Bacterial polypetide isolated from the Sargasso Sea
ELCSNQRDLQDIKVAYLGKKGKITELLKSLKDLSLEEKKNTGAKLNFLRIEVDNLIRNKSDKLKIQEINTKLQNEAIDISFPPPNSINSKVHPISKTFDEVINIFGSMGYSVAEGPDIETDYFNFSALNIPENHPAREMQDTFYINDKDKNDKPYVLRTHTSPVQIRTLLDQKPPVKIIAPGRTYRCDSDSTHSPMFHQVEGLLINQNANMGDLKGTLIEFCKQFFNVQNLKVRFRPSYFPFTEPSAEMDIAYEIVNNKIKLGQGERWLEILGCGMVNPIVLKNCNVDTNIF

SEQ ID NO: 188039 - protein, 206 aa, Unknown
  Bacterial polypetide isolated from the Sargasso Sea
MSDLEKINSIFNAKIDSVKSKDELQNLKTEFFGKNGQITTQFKNLGSLSAEDKKEFASRLNKLKYSLSQQIEEKNLELETQEINEKLKSEKIDVTLPIRSYRKGKIHPVSQVIDEISSIFSEIGFSVAEGPDVETEYNNFTALNTPEDHPARDMHDTFYLDKSKKLLLRTHTSPVQIRTMLNEKPPFKIIVPGRTYRSDSDQTHAP

SEQ ID NO: 188040 - protein, 207 aa, Unknown
  Bacterial polypetide isolated from the Sargasso Sea
HPARDMHDTFYLSNSKDLLLRTHTSPVQIRTMLKSKPPFKIIAPGRTYRHDSDQTHSPMFHQLEGLHIDRNINMGHLKGCLYYFVKKFFEVEKVKIRFRPSHFPFTEPSAEVDIGYKIQDGKIKIGEGDKWLEILGCGMVHPQVLKNAKVNPKQYQGYAFGVGIDRLAMLKYGINDLRAFFESDIRWLEFYGFDPLDVPTNYRGLSR

SEQ ID NO: 188041 - protein, 288 aa, Unknown
  Bacterial polypetide isolated from the Sargasso Sea
MSLKDSIESVKNDFLTEFASINDSTGSELIRQKYLGRNGLVTNLFKELGRASNDDRPVLGQLLNQLKNELSEKINSIQAEDRTASDNEVVDIALPGKLYASGSTHILEQTFNDIKKIFSDIGFSISYGPEIDDEYHNFTALNVPEHHPARDMQDTFFVDKDIVLRTHTSNVQIHLMEEKAPPLRFIVPGRVYRNESISYKSYCLFHQVEGLFVDKNVSFSQLKGCLEYFVKKMFGSDRKMRWRPSYFPFTEPSAEVDIWDEQRNQWMEILGCGMVDPEVFNSVNYDPK

SEQ ID NO: 188042 - protein, 240 aa, Unknown
  Bacterial polypetide isolated from the Sargasso Sea
MSDFEKLKSQLKDKLTKAQSSQEVDIIKAEIFSKNGFINSEFKKLGSLSPEDKKKAASKINSAKQELTILFNEKALNLVDAEIDNRIKKEKDDVTLPEKDFRIGKIHPVSQVIDEISSIFSEIGFSVEEGPDVETEYYNFTALNTPENHPAKDMHDTFYIEENMKTLLRTHTSPVQVRTMLKGKPPFKIIAPGRTYRSDSDQTHTPMFHQLEGLHIDKNITMGHLKGCLNYFVKEFFEAD

SEQ ID NO: 188043 - protein, 199 aa, Unknown
  Bacterial polypetide isolated from the Sargasso Sea
HFLFRHNKEYLLRTHTSPVQVRTMLKGKPPFKIIAPGRTYRSDSDQTHSPMFHQVEGLHIDKNINMGHLKGCLNYFIKEFFEVNKIKMRFRPSHFPFTEPSAEVDIGYKIKDGKIIIGEGDKWLEILGCGMVHPNVLKNVKVDPSKYQGYAFGIGIDRLAMLKYGINDLRSFFETDYRWLNHFGFDPLDVPTNYRGLSR

SEQ ID NO: 188044 - protein, 243 aa, Unknown
  Bacterial polypetide isolated from the Sargasso Sea
IDEISCIFSEIGFSVEEGPDVENDYNNFTALNTPEDHPAKDMHDTFYLDENMKTLLRTHTSPVQVRTMLKGKPPFKIIAPGRTYRSDSDQTHTPMFHQLEGLHIDKNINMGHLKGCLNYFIKEFFEVDKIKMRFRPSHFPFTEPSAEVDIGYRIEKNKIIIGEGDKWLEVLGCGMVHPNVLKNCKVDPKIYQGFAFGIGIDRLAMLKYGINDLRSFFECDYRWLNYYGFDPLDVPTNYRGLSK

SEQ ID NO: 188045 - protein, 286 aa, Unknown
  Bacterial polypetide isolated from the Sargasso Sea
LKHLDTDKLLEEITEKLSMIGLEVEDVTDKSKKLKDFIIAKVIDEKPHPNADRLKILSVDDNSGDIHQVICGAPNAKKNLIGVFAKPGTYIPGIDLKLAVGKIRGENSFGMMCSERELEISDEHDGIIELDKSAKIGSNFLDWSGLGDPVITIGITPNRADCLGVRGIARDLAAAGFGNLKPLKIKEIEGSFESPKQFIISKELNDNKLVPTLSSRYFKKLNNCQSPKWMQQRLNAIGQRPISALVDITNYVMFDLNRPLHAYDGEKISGDKLEIRFAKENEVIQR

SEQ ID NO: 188046 - protein, 220 aa, Unknown
  Bacterial polypetide isolated from the Sargasso Sea
MVDLRELIQKVLQAKDKSELQGLKTEFLGKNSQINQEFKKLGSLSEDQRKVRASSLNNEKQKITEAINGRLKELEKLEINQKLQKNKVDVTLPARERPNGKIHPVSQVIDEISSIFSEIGFSVAEGPDVETEYNNFTALNTPEDHPARDMHDTFYLDNNQKILLRTHTSPVQIRTMLAGKPPFKIIVPGRTYRCDSDQTHAPMFHQLEGLHIDKDITMGH

SEQ ID NO: 188047 - protein, 294 aa, Unknown
  Bacterial polypetide isolated from the Sargasso Sea
LGKKGEVNILLKSLGSLPQEKRKEAGKLLNNLKSDLEKNYALTNSLLNDKANLSRLEKDKLDISLPGFSSRKGSIHPVTRTIRDVCNFFEQMGFDVEAGPEAEIDYYNFEALNVPEDHPAKDMHDTFYLNNEGLLRTHTSPVQIRTMEKSEAPHRIVCPGKVYRKDSDLTHTPMFHQIEGLVVEEGASFAQLKGLLNDFLTDFFGEEVELRFRPSYFPFTEPSAEVDIRWKKNWLEVLGCGMVHPNVLKNVGVDTKKYSGFAFGLGVERMAMLKYDIPDLRAFFENDIRFLDQF

SEQ ID NO: 188048 - protein, 130 aa, Unknown
  Bacterial polypetide isolated from the Sargasso Sea
KGCLYYFVQKFFEVEKVKIRFRPSHFPFTEPSAEVDIGYKIENGKIKIGEGDKWLEILGCGMVHPNVLKNAKVNPKQYQGYAFGVGIDRLAMLKYGINDLRAFFESDIRWLEFYGFDPLDVPTNYRGLSR

SEQ ID NO: 188049 - protein, 186 aa, Unknown
  Bacterial polypetide isolated from the Sargasso Sea
LNVPKHHPARDMQDTFFINPNAVLRTHTSNVQIHLMENQDPPLRHICCGRVFRNEAVSYKSFCLFNQVEGLVINETSSFAEMKGTLEYFVQEMFGKDTKMRFRPSYFPFTEPSAEVDIWNSKLNQWMEILGCGMVNPNVLSNVGYDNEKYQGFAFGMGIERIAMIKYGIKDIRLFYQNDKRFLEQF

SEQ ID NO: 188050 - protein, 247 aa, Unknown
  Bacterial polypetide isolated from the Sargasso Sea
MVDFTKLEQEITNSLSKVKDLESLNECRIKYLGKKGEISLLMKELANLSGEDRKKQAEILNTLKNKTLSLIEEKTEELNDRNLNEKLSSETLDVTLPVSSSLGSIHPITQVIEEVVTIFGDLDFYVAEGPEVETDYNNFTALNTSEHHPARQMHDTFYVETQTDSMQNVLRTHTSPVQIRSMLEHKPPIRLIAPGKTFRCDNDQTHSPMFHQVEGLVIDQESNMSHLKGCLEIFLKTFFETDKLKMR

SEQ ID NO: 188051 - protein, 91 aa, Unknown
  Bacterial polypetide isolated from the Sargasso Sea
KIENDKIIIGEGDKWLEILGCGMVHPNVLKNSKVDPNKYQGFAFGIGIDRLAMLKYGINDLRSFFECDYRWLNYYGFDPLDVPTNYRGLSK

SEQ ID NO: 188052 - protein, 157 aa, Unknown
  Bacterial polypetide isolated from the Sargasso Sea
DSDQTHAPMFHQVEGLHIDRNINMGHLKGCLNYFIKEFFEVEKIKMRFRPSHFPFTEPSAEVDIGYEIKDGKIIIGEGDKWLEILGCGMVHPNVLRNVKVNPSKYQGYAFGIGIDRLAMLKYGINDLRAFFDCDYRWLNHFGFDPLDVPSNYRGLSR

SEQ ID NO: 188053 - protein, 282 aa, Unknown
  Bacterial polypetide isolated from the Sargasso Sea
LTDLLKGLGKLSNEERPAAGQKINQAKQVIQQAISAKGEFLRTEELNKKLAEEAIDVTLPGRTEKPGNLHPVSRTIARIESFFGELGFSVKTGPEIEDGFHNFDALNIPANHPARADHDTFYFNPDMMLRTQTSGVQIRTMEAEKPPLRIISPGRVYRNDYDQTHTPMFHQVEGLMVDKNVSFTDLKGILHDFLHHFFEESLEIRFRPSYFPFTEPSAEVDVMGKNGQWLEVLGCGMVHPNVLKAVGIDPEEYTGFAFGMGVERLTMLRYGVNDLRAFFEND

SEQ ID NO: 188054 - protein, 197 aa, Unknown
  Bacterial polypetide isolated from the Sargasso Sea
MSDFEKLKEEYKNKLIKAQNSKELDIIRTEIFGKNGLINSQFKKLGSLSPEDKKKLASKINNSKLELTKLFNDKLLKLEEAEIDERVKKEKDDVTLPEKDFKIGKIHPVSQVIDEISSIFSEIGFSVEEGPDIESEYYNFTALNTPENHPAKDMHDTFYIEKNMKTLLRTHTSPVQVRTMLKGKPPFKIIAPGRTYR

SEQ ID NO: 188055 - protein, 275 aa, Unknown
  Bacterial polypetide isolated from the Sargasso Sea
IARELAALTGKTVGQPDLSFPTTDKLTKNIISIDVRDPDLCLRYTASVIEGVKIKESPQWLQDILVKSGQRPINNVVDITNYVMLELNQPLHAFDIDSINDHSIIVRKAISKEKLTTLDGEQRELEPPMLVIADTSGAIGLAGIMGGSNSEVSDKTNTILLEAANFEPINTRRTSSNLRLSTAASYRFERTLSPDLAEIGLRRATALIKQIAGGEVYDEIVDIRSKTAKVHNIPFERTRLNQVLGANIKYQDAIKVLESLGFVSDNAMDDDLNLI

SEQ ID NO: 188056 - protein, 205 aa, Unknown
  Bacterial polypetide isolated from the Sargasso Sea
MSDIKKIKNEYLEKLSSNLNIENINQIKTELFGKSGAITNSFKKLASLPSEERKKFASELNFIKDQLQQKINNKIQEIETKEINSKLENEKVDVTLPERDINQGKIHPVSQVIDEISSIFSEIGFSVEEGPDVESQYYNFSALNTPDDHPARDMHDTFYLDNNKELLLRTHTSPVQVRTMLKSKPPFKIIAPGRTYRSDSDQTHS

SEQ ID NO: 188057 - protein, 287 aa, Unknown
  Bacterial polypetide isolated from the Sargasso Sea
MSDIKKIKDDYLNKLNNDLNIESLNQIKTELFGKNGKISNSFKKLGSLPNDERKKFASDLNSIKNELQDKINSKLQEIETKEINSKLENEKVDVTLPEREFSRGKIHPVSQVIDEISSIFSEIGFSVEEGPDIENEHYNFTALNTPDNHPARDMHDTFYIDNNKELLLRTHTSPVQVRTMLNGKPPFKIIAPGRTYRSDSDQTHSPMFHQVEGLHIDKDINMGHLKGCLNYFIKSFFEVDKIKMRFRPSHFPFTEPSAEVDIGYEIKDGKIVIGEGDKWLEILGCGM

SEQ ID NO: 188058 - protein, 241 aa, Unknown
  Bacterial polypetide isolated from the Sargasso Sea
MSNLNDIKPPKVFRNSGSVHPINKTKNFIIKFLVEQGFEIIDGPEIETEEFNFDMLNIKESHPARQMHDTFYINKKSNLLRTHTSPVQIRGMLSRKPPISLVSGGKVYRKDDDATHLPMFHQIEGIYIDKNVNFANLKDMIFRIVKLLFGTKVKIRFRPSYFPFTEPSAEVDILSSDGKWLEILGCGIVNPVVIKNCNIDPEKYSGFAFGLGVERIAMLKYCVSDIRDFYKSNLDFLEQFK

SEQ ID NO: 188059 - protein, 276 aa, Unknown
  Bacterial polypetide isolated from the Sargasso Sea
QSEINKKLKNEKIDVTLPGRTYFAGKIHPVSQVIDEVISIFSEIGFSVEEGPDVENEYYNFSALNTPENHPARDMHDTFYLDRSKDLLLRTHTSPVQIRTMLKSKPPFKIIAPGKTYRHDSDQTHSPMFHQLEGLHIDKNVNMGHLKGCLYYFVKKFFEVEKVKIRFRPSHFPFTEPSAEVDIGYKIQNGKIKIGEGDKWLEILGCGMVHPNVLKNVKVNPKQYQGYAFGVGIDRLAMLKYGINDLRAFFESDIRWIEFYGFDPLDVSDKNYRRFK

SEQ ID NO: 188060 - protein, 134 aa, Unknown
  Bacterial polypetide isolated from the Sargasso Sea
MGHLKGCLNYFIKEFFEVDKIKMRFRPSHFPFTEPSAEVDIRYEIKNGKIVIGEGNQWLEILGCGMVHPNVLRNVKVDPSKFQGYAFGIGIDRLAMLKYGINDLRAFFDCDYRWLNHFGFDPLDVPSNYRGLSR

SEQ ID NO: 188061 - protein, 272 aa, Unknown
  Bacterial polypetide isolated from the Sargasso Sea
MQFPESWLRSFVNPSITTDELSHRLTMAGLEVEEVDPVAPPFSQIVVGHVVEVNKHPDADRLNVCKVDAGTGELLQIVCGAPNVSVGIKVPCALVGADLPPGEDGKPFKIKIGKLRGVESYGMLCSARELKLSEDHGGLLILPEDTPVGEDIRKVLDLDDQIFVIKLTPNKADCLSIHGVAREVSALTGAPITVPSMAPVAVTLADKLPVKVEAPDLCGRFSGRIIRGVNAHAKTPAWMVSRIERAGMRSVSALVDISNYVMLELGRPSHLP

SEQ ID NO: 188062 - protein, 251 aa, Unknown
  Bacterial polypetide isolated from the Sargasso Sea
MKLDKNGVIEEINKISSVEQIENLRIKYLGKKGLISLEMKSLASLSIEDKKIKGQELNNFKFFFEKELIGKKNAIEKKLINEKLQKEKIDTSLPPRDFSSGKIHPISQTMFKIIDTFGSMGFAVKSGPDIESDFNNFSALNIPDHHPAREMQDTFYIDDKVLRTHTSPVQVRTMLESKPPIRIIVPGRTYRSDSDSTHTPMFHQVEGLLIDNSSTMAHLKGCLIDFLQDYFEINELKYRFRPSYFPFTEPS

SEQ ID NO: 188063 - protein, 145 aa, Unknown
  Bacterial polypetide isolated from the Sargasso Sea
FHQVEGLVVNKDATMADLKSTLIIFLKEFFEIDNLKYRFRPSYFPFTEPSAEMDVAFTKKNNVLKIGEGDQWLEILGCGMVNPKVLENCNIDSSVYQGFAFGMGIERLSMLKYGITDMRGLFDLNIKWLDHYGFSPLDLRNRSEV

SEQ ID NO: 188064 - protein, 166 aa, Unknown
  Bacterial polypetide isolated from the Sargasso Sea
KLEKLLRTQTSTVQVRHMQNNKPPVYIVAPGRVYRSDQLDATHSPVFHQIEGLAVDENLTFSDLKGTLEYFVKEFFGKDLKTKFIPHFFPFTEPSAEVLVSWKDGEWLEILGCGMVDPNVFKHVGYNTDSQGFAFGVGVERLAMIRYGIDHIKNFYENDLRFLRQF

SEQ ID NO: 188065 - protein, 254 aa, Unknown
  Bacterial polypetide isolated from the Sargasso Sea
MSDIIKIKEEYLNKLKNNLDLNTVNQLKSELFGKNGKISSEFKKMSSIPDADRKKFASDLNSIKDELQSLIDKKIQDIEINEINLKLQNEKVDITLPERSFNRGKIHPVSQVIDEISSIFSEIGFSVEEGPDVENEYNNFTALNTPENHPARDMHDTFYLDNKKEFLLRTHTSPVQVRTMLNGKPPFKIIAPGRTYRSDSDQTHAPMFHQVEGLHIDKNINMGHLKGCLNYFIKEFFEVDKIKMRFRPSPLPFT

SEQ ID NO: 188066 - protein, 202 aa, Unknown
  Bacterial polypetide isolated from the Sargasso Sea
MHDTFYLDNNKELLLRTHTSPVQVRTMLKGKPPFKIIAPGRTYRSDSDQTHAPMFHQVEGLHIDKNINMGHLKGCLNYFIKEFFEVDKIKMRFRPSHFPFTEPSAEVDIGYEIKNGKIVIGEGNKWLEILGCGMVHPNVLKNVKVNPSKYQGYAFGIGIDRLGMLKYGINDLRAFFETDYRWLSHFGFDPLDVPSNYRGLSR

SEQ ID NO: 188067 - protein, 251 aa, Unknown
  Bacterial polypetide isolated from the Sargasso Sea
KIHPVSQVIDEISSIFSEIGFSVAEGPDVETEYHNFTALNTPENHPARDMHDTFYLDKNKKLLLRTHTSPVQIRTMLNEKPPFKIIVPGRTYRSDSDQTHSPMFHQLEGLHIDKNITMGHLKGCLNYFIKEFFEVKNVKMRFRPSHFPFTEPSAEVDIGYRLENGKIVIGEGDKWLEILGCGMVHPNVLKNVKVDVKKYQGYAFGIGIDRLAMLKYGINDLRAFFETDYRWLSHFGFDPLDVPTNYRGLSK

SEQ ID NO: 188068 - protein, 233 aa, Unknown
  Bacterial polypetide isolated from the Sargasso Sea
IGFSVKKGPDIETEYYIFTALNTPENHPAKDMHDTFYIEENMKTLLRTHTSPVQIRTMLKGKPPFKIIAPGRTYRSDSDQTHTPMFHQLEGLHIDKNITMGHLKGCLNYFVKEFFEVEKIKMRFRPSHFPFTEPSAEVDIGYRIENNKIIIGEGDKWLEILGCGMVHPNVLKNSKVDPNKYQGFAFGIGIDRLAMLKYSINDLRSFFECDYRWLNYYGFDPLDVPTNYRGLSK

SEQ ID NO: 188069 - protein, 203 aa, Unknown
  Bacterial polypetide isolated from the Sargasso Sea
MSDIKKIKDDYIDKLNTENNIEKVNNVKSELFGKNGIISNEFKKLGSISVEERKKLATDLNNIKDELQNKISIKIQEIETKEINLKLEKEKIDVTLPERNIEIGKIHPVSQVIDEISSIFSEIGFSVEEGPDVENEYNNFTALNTPDNHPARDMHDTFYLDNSKELLLRTHTSPVQVRTMLKGKPPFKIIAPGRTYRSDSDQT

SEQ ID NO: 188070 - protein, 142 aa, Unknown
  Bacterial polypetide isolated from the Sargasso Sea
LHIDKNINMGHLKGCLNYFIKEFFEVKKIKMRFRPSHFPFTEPSAEVDIGYEIKDGKIVIGEGDKWLEILGCGMVHPNVLKNVKVDPIKYQGYAFGIGIDRLAMLKYGINDLRAFFDCDYRWLNHFGFDPLDVPTNYRGLSR

SEQ ID NO: 188071 - protein, 133 aa, Unknown
  Bacterial polypetide isolated from the Sargasso Sea
VYRRDAVDATHSPVFNQVEVLCLDQDINFSHLRGTVLTFLKTFFGDIPVRFRASYFPFTEPSAEVDVKWKGKWLEVMGCGMVDPKVLTKLGIDSEKWTGFAAGLGVERFCMVRHQIDDIRRFYTNDLRFLEQF

SEQ ID NO: 188072 - protein, 223 aa, Unknown
  Bacterial polypetide isolated from the Sargasso Sea
VENEHYNFTALNTPDNHPARDMHDTFYLDNKKELLLRTHTSPVQVRTMLKGKPPFKIIAPGRTYRSDSDQTHAPMFHQVEGLHIDKNINMGHLKGCLNYFIKSFFEVDKIKMRFRPSHFPFTEPSAEVDIGYELKDGKIVIGEGDKWLEILGCGMVHPNVLKNVKINPDKYQGYAFGIGIDRLAMLKYGINDLRAFFETDYRWLNHFGFDPLDVPSNYRGLSR

SEQ ID NO: 188073 - protein, 211 aa, Unknown
  Bacterial polypetide isolated from the Sargasso Sea
MNLKSKFLGKKGLISELTSELKNLSIDEKKNRGAEINSTKKDIEIAIGKKLKDIEEAEINKKLNSEKIDITLPGKAPAFGSLHPITQVLENVIDIFEGYGFQTVEGPEVETNFYNFEALNIPENHPARDMQDTFYLDDNQLLRTHTSPMQVRIMENNNPPIKIISPGKVYRCDSDVTHTPMFHQVEGLFVDENVSFANLKSILNNFCIDFF

SEQ ID NO: 188074 - protein, 270 aa, Unknown
  Bacterial polypetide isolated from the Sargasso Sea
SLNNEKQKITETINNRFKELEKLEISKKLQKDKVDVTLPARERPNGKIHPVSQVIDEISSIFSEIGFSVAEGPDVETEYNNFTALNTPEDHPARDMHDTFYLDNDKKILLRTHTSPVQVRTMLNGKAPFKIIVPGRTYRCDSDQTHAPMFHQLEGLHIDKDITMGHLKGCLDYFVKEFFEVKKIRMRFRPSHFPFTEPSAEVDIGYKLENGRIIVGEGDKWLEILGCGMVHPNVLKNAKVDPNKFQGFAFGMGIDRLAMLKYGINDLRSF

SEQ ID NO: 188075 - protein, 222 aa, Unknown
  Bacterial polypetide isolated from the Sargasso Sea
MEILPENIKYLELVENAQSVNDLEQVRIKLLGKKGEISNLLRSLGQMDAKERQIKSPQYNNLKQSLDEAIKERRELLRNKEIEGRMDAEWLDISQDPREMNSGLMHPVSRVTEEIVSIFSDLGFSVAEGPQIESDWYNFDSLNIPPDHPARQEFDTFYIDPGDESIMENGSPDVLRTHTSPVQVRFMEKHGAPCRIIAPGRVYRSEYDLTHTPMFHQMKVSG

SEQ ID NO: 188076 - protein, 180 aa, Unknown
  Bacterial polypetide isolated from the Sargasso Sea
MKFSEQWLRTWVNPDVSRDELVARLSMTGLEVDSVTPAAGEFSGVVVGEILSAEQHPDADKLRVCRVSNGSEEFQVVCGAPNARAGIKIPFAMVGAVLGEDFKIKKAKLRGVESFGMLCSAAELQISEDHDGLYELPQDAPVGQSVREYLGLDDAIIEVDLTPNRGDCLSIAGLAREVGV

SEQ ID NO: 188077 - protein, 119 aa, Unknown
  Bacterial polypetide isolated from the Sargasso Sea
EGVSFADLKGTIEQFLREFFEADLEVRFRPSFFPFTEPSAEVDIRRRVVKNGEEKADWLEVLGCGMVHPDVLRMSGIDPEKYQGFAFGMGVERLTMLRYGVGDLRIFFDNDLRFLEQFR

SEQ ID NO: 188078 - protein, 290 aa, Unknown
  Bacterial polypetide isolated from the Sargasso Sea
MVEKLRRSGIRSIDAVVDVTNFVLLELGHPMHAFDLTKIEGDIDVRMAKEGEKLTLLDSNEVTLKANTLVIADSQKALAMAGIFGGLHSGVTKDSNHIFLESAFFSPVEMAGIARQYGLHTDASHRYERGVDPELQRTAMERATALLLAIVGGEAGPVVEAVSVTHLPKAAQIALTRTKLDRILGISIATETVTEIFQRLGMQVQTSADEWQVTVPSYRFDISIPEDLIEEVARVYGYNNIPNVAPQAALAMSKHQESRISVHSLRDLLVARGYQEAITYSFVDPKVQET

SEQ ID NO: 188079 - protein, 158 aa, Unknown
  Bacterial polypetide isolated from the Sargasso Sea
MSHLAELVASATAAINQASDVAALDNVRVEYLGKKGHLTLQMTTLRELPPEERPAAGAVINEAKEQVQQALNARKAELESVALNARLAEETIDISLPGRRIENGGLHPVTRTIDRIESFFGELGFTVATGPEIEDDYHNFDALNIPGHHPARADHDTF

SEQ ID NO: 188080 - protein, 202 aa, Unknown
  Bacterial polypetide isolated from the Sargasso Sea
MSDFEKLKGELKVKLNHAKTSQEVDIIRTNIFGKNGLINSEFKKLGSLSPEDKKKVASEINNAKQELTKLFNDKVLTLTNSEIDEQVKKEKDDVTLPEKDFRIGKIHPVSQVIDEISSIFSEIGFSVEEGPDVESEYYNFTALNTPENHPAKDMHDTFYLDKNMKTLLRTHTSPVQVRTMLNGKPPFKIIAPGRTYRSDSDQ

SEQ ID NO: 188081 - protein, 189 aa, Unknown
  Bacterial polypetide isolated from the Sargasso Sea
MESKTVDFFDLKGDLEAIIGLTVSASEFSFRVATHSALHPGQCAEILRNDRVIGHIGAIHPSLEKPFGLNGKTIVFELELDALLHTSLPLAQAVSKFPANRRDIAVVVDESVSAGDVMKLIRKVGENQLVGINLFDVYLGKGVEPGKKSLAIALTLQDTTRTLEEKEIAETVESVVSALKTEFNASLRD

SEQ ID NO: 188082 - protein, 188 aa, Unknown
  Bacterial polypetide isolated from the Sargasso Sea
MSDIKKIKDEYLGKLSGDLNLESVNHIKTELFGKNGAISNSFKKLGSMPSEERKKFASDLNFVKEELQEKINDKLQEIEIKEINSKLENEKVDVTLPERDINQGKIHPVSQVIDEISSIFSEIGFSVEEGPDVETENYNFTALNTPENHPARDMHDTFYLDNNKKLLLRTHTSPVQVRTMIKGKPPFK

SEQ ID NO: 188083 - protein, 148 aa, Unknown
  Bacterial polypetide isolated from the Sargasso Sea
FHQLEGLHIDKNITMGHLKGCLNYFIKEFFEVKSVKMRFRPSHFPFTEPSAEVDIGYRIENDKIIIGEGDKWLEILGCGMVHPNVLKNAKVDPKKYQGFAFGMGIDRLAMLKYGINDLRAFFETDYRWLSHFGFDPLDVPTNYRGLSK

SEQ ID NO: 188084 - protein, 227 aa, Unknown
  Bacterial polypetide isolated from the Sargasso Sea
GGPDVENEYNNFTALNTPDNHPARDMHDTFYLDENREVLLRTHTSPVQIRTMLKDKPPFKIIAPGRTYRSDSDQTHAPMFHQVEGLHIDVNINMGHLKGCLNYFIKEFFEVEKIKMRFRPSHFPFTEPSAEVDIGYEIKDSKIIIGEGDKWLEILGCGMVHPNVLRNVKVDPSKYQGYAFGIGIDRLAMLKYGIKDLRAFFDCDYRWLNHFGFDPLDVPSNYRGLSR

SEQ ID NO: 188085 - protein, 298 aa, Unknown
  Bacterial polypetide isolated from the Sargasso Sea
KEYTGKESLLSVERKNLSNLSNEDKKVYGETLNNVNKSIVSNIKKSKEEYINNKYASLENEENEDITIDWITQTGTHRHILSQVMDEVVNIFASIGYKVAYGPEVETSWHNFDALNTPDWHPARYESDTLYTDNNMETLLRTQTSTVQIRHMEENDPPVYIVAPGRVFRSDQLDATHSPVFHQLEGLAVDKNLKFTDLKGTLEYFVKQFFGENIETKFIPHFFPFTEPSAEVLVKWKNGDWLEILGCGMVDPNVIKHVGYSDEYQGFAWGVGIERLAMLKYQIDHIKNFYDNDFKILG

SEQ ID NO: 188086 - protein, 270 aa, Unknown
  Bacterial polypetide isolated from the Sargasso Sea
VENVKENSSDLSDFKVAKILKVEKHPNADKLKVCDVSLGDTKIIKVVCGASNARDGLVTIYAPPGAIILKTKFQLKIAKIRGVESRGMLCSENELNLSDESEGIIELNNKDKEIGKSYFKTKSEKALDISITPNRADCLGVRGIARDLASSGLGSFLKLKKKSLKQTFSQPIKVSIINDKNQGCLSFGSCYIKNIKNKESPDWLKNKILALGLKPISAVVDITNYVMFDLNRPLHAYDAKKIDKEIIVRNSREGEQFRGLDHETYKLKKG

SEQ ID NO: 188087 - protein, 241 aa, Unknown
  Bacterial polypetide isolated from the Sargasso Sea
MSSDKDVIFPKLDKSYGAYHPINHIKDLIMNLLISYGFEIAEGPEIETEEFNFDMLNIKESHPARQMHDTFYVENKSYLLRTHTSPVQIRGMLEKEPPIAFISGGKVYRKDDDATHLPMFHQVEAIYVDKDVNFANLKDLIFRIIYDLFGQDIKIRFRPSYFPFTEPSAEVDIFSENGKWLEVLGCGIVNPIVLDNCKISSKKYSGLALGIGIERIAMLKYGVNDIREFYKSNLNFLSQFK

SEQ ID NO: 188088 - protein, 210 aa, Unknown
  Bacterial polypetide isolated from the Sargasso Sea
MSDIKKIKDEYLDKLDGDLNLENVNQIKTELFGKNGAISNSFKKLGTLPPEDRKKFASDLNFIKDQLQEKINSKLNEIETKEINSKLENEKVDVTLPERDIHQGKIHPVSQVIDEISSIFSEIGFSVEEGPDVENQHYNFTALNTPDNHPARDMHDTFYLDDKKELLLRTHTSPVQVRTMLKGKPPFKIIAPGRTYRSDSDQTHSPMFIK

SEQ ID NO: 188089 - protein, 149 aa, Unknown
  Bacterial polypetide isolated from the Sargasso Sea
KNNPPIRVVVPEKCYRYEATDATHEWEFHQIEGLAIDKNISFSELKGTLYQMARKIFGSDQQVRFRCDFFPFVEPGVDMSILWKGRWIEILGAGMVHPKVLTGVGYDPNEYSGFAFGIGPERVSMLKNKIKDIRNFHANDLRFLSQFVN

SEQ ID NO: 188090 - protein, 263 aa, Unknown
  Bacterial polypetide isolated from the Sargasso Sea
MPDNLSDLSKSATQEINECSSTTELDSLRVKYLGKKGAITIALKSVSSIDPKDRPAYGKKINELKSLIQGTLSQKRASLQKKEINQSIDDKKIDVSLPGRSNFGGHRHPVTKTLLEIEEIFYGAGFAVEDGPEIEDEYHNFTALNIPSNHPARAMHDTFYFNSEFLLRTHTSPIQIRSMEKEGVPIRVIAPGKVYRRDSDITHTPMFHQIEGLVIDKGINFSHLKGILHQFIDTFFEENTEVRFRPSYFPFTEPSAEVDILSK

SEQ ID NO: 188091 - protein, 188 aa, Unknown
  Bacterial polypetide isolated from the Sargasso Sea
MALSFDKNGILKKIKNVKSFDELEKIRLEFLGKKGIISIEMKSLSQLSIEEKKLKGQELNLLKQTLEEAINNQKSLLENNELTKRIEGEKLDATLPPNLIQQGKIHPISQTIFSVIEIFGNLNFSVQTGPDIETDFNNFTALNIPAHHPAREMQDTFYVKGEEKENNILRTHTSPVQVRTMLNTNHLL

SEQ ID NO: 188092 - protein, 256 aa, Unknown
  Bacterial polypetide isolated from the Sargasso Sea
NQVKDELQNLITSKISEIEGKKINEKLEKEKVDITLPERPFVRGKVHPVSQTIDEISSIFSEIGFSVEEGPDVENEYNNFTALNTPYNHPARDMHDTFYLDENKEVLLRTHTSPVQIRTMLKDKPPFKIIAPGRTYRSDSDQTHAPMFHQVEGLHVDTNINMGHLKGCLNYFIKEFFEVEKIKMRFRPSHFPFTEPSAEVDIGYEIKDGKIIIGEGDKWLEILGCGMVHPNVLRNVKVDPSKYQGYAFGIGIDLIS

SEQ ID NO: 188093 - protein, 53 aa, Unknown
  Bacterial polypetide isolated from the Sargasso Sea
MSIQKSWENCNIDSSNYSGFAFGLGVERIAMLKYGITDIREFYKSNLDFLKQF

SEQ ID NO: 188094 - protein, 289 aa, Unknown
  Bacterial polypetide isolated from the Sargasso Sea
MKISYNWLKEYLDFKEDHESIAEKLTSLGLEVEGITKFQSIPGGLEGVVIGKTKSIKKHPNADRLKITTVDIGQDELLQIICGAPNVDKNQTVAVATAGTTLYPNNEKLKIKKSKIRGEVSNGMICGQDELNLGEFDQGIMIFDDKYKAGIPLSEIYNIESDWIYDIGLTPNRADAMSHYGTARDLRARLLHEGNKIELKTSSVSNFIVDNRTKNIKINIDDDGSTTRYCGIVMDNITVQESPKWLQNKIISIGLTPINNIVDITNYILHDIGQPLHAFDYDKIEIKQS

SEQ ID NO: 188095 - protein, 224 aa, Unknown
  Bacterial polypetide isolated from the Sargasso Sea
MSDIKKIKNDYIDKLNTENNIEKVNNLKSELFGKNGIISNEFKKLGSISVVERKKLASDLNNIKDELQNKISTKIQEIETKEINLKLEKEKIDVTLPERNIEIGKIHPVSQVIDEISSIFSEIGFSVEEGPDVENEYNNFTALNTPDNHPARDMHDTFYLDNNKELLLRTHTSPVQVRTMLKGKPPFKIIAPGRTYRSDSDQTHAPMFHQVEGLHIDKNINMGH

SEQ ID NO: 188096 - protein, 204 aa, Unknown
  Bacterial polypetide isolated from the Sargasso Sea
MAFAENKIDVLKKIKASKSFEDLEKLRLYYLGKKGLIPEALKGLGSLSIEEKKSKGQELNIIKKEIEEGIKIQRTEIENIEISNKINLESIDVTLPPNISEKGKIHPISQTIFNIIEIFGNLNYAVETGPDIETDFNNFTALNIPEHHPAREMQDTFYVQDNGDKNVLRTHTSPVQVRTMLNTKPPIKIIVPGRTYRSDSDATQ

SEQ ID NO: 188097 - protein, 192 aa, Unknown
  Bacterial polypetide isolated from the Sargasso Sea
MSDILKLKEEYLKKLSENISLENINQIKSELFGKNGKITNEFKKISNISADEKKKFASEVNSAKDEIQTVIEKKIKNFEIEQINSKLQSEKVDVTLPARSFVQGKIHPVSQVIDEISSIFSEIGFSVEEGPDVENEYNNFTALNTPDNHPARDMHDTFYLDHKKEFLLRTHTSPVQVRTMLKGKPPFKIIAP

SEQ ID NO: 188098 - protein, 305 aa, Unknown
  Bacterial polypetide isolated from the Sargasso Sea
AKILKAEKHPNADKLRVCDVDIGKENPVKVVCGAPNAKEGLFTIYAPPGSVIPKNQMKLVVSKIRGVSSYGMLCSESELKLSDESDGITELSSNDFKDKIGENYFPKKNSNVIDISITPNRADCLGVRGIARDLAAAGSGKLKDLKENKLKKDGKQTVNVKIENEDNQACTIFGSCLITGVKNIESPDWLKEKIISIGQKPISAIVDITNYVMFDLNRPLHAYDVEKIDKGIIVRNSKKNETFTALDNKEYKLDEGMCVISDASGVLGLGGIIGGTRSGTELDTKNVLIESAYFLPRSIRKSSKI

SEQ ID NO: 188099 - protein, 278 aa, Unknown
  Bacterial polypetide isolated from the Sargasso Sea
MGLEVDHSKKEKNYLLIKLDLTPNRGDCFSLIGIARDVCAVNNLKLKLPKFKKQHQSLDSKKTVSIDKIACSSYLGLIIKLKSKGKTPQYIKKTLKAADIGQVNPIVDITNYVMLHTGQPLHAFDNKKIGKKIYVKFPSKRTKLKLLDGASYEINKDFLTISDEKEEIALAGIMGCANSEVDETTQEIFLESACFEPESIRGNARKLGFQSEASLRFERGVDKEIQEYALNFAAQLYAEIFGGDFSKIFKESKNHKAKKISISKEFIDSRLGTEIPAA

SEQ ID NO: 188100 - protein, 272 aa, Unknown
  Bacterial polypetide isolated from the Sargasso Sea
AVSRDTTDVFLECAFFSPLAIAGKARSYGMHTDASHRYERGVDYELQRKAMERATKILTSIVGGEAGPITEEIGNLPEFPAVDLLFENVGSVLGIDIPVDEIRDILVRLGFTVTNETPQGLTVAVPTYRFDVSLEADLIEELVRIYGYENVPTTAGLFKQSLEPISEENVPLRRIRHSLVDLGYQEVITYSFVDPIKSDSISMVSDSAKIVLQNPISNEMSVMRNSLLPGLIDAFRYNANRHQERIRLFESGLVFKRRDGEIVQESWLAGLI

SEQ ID NO: 188101 - protein, 272 aa, Unknown
  Bacterial polypetide isolated from the Sargasso Sea
YGKELNKLKVAVTAKVKKLQIISKNVSENSIINDSSRTAFPIETGNRHPLSIVKNRIINIFSQIGFTISEGPEIEDDWHNFTALNLPHYHPARDMQDTFFIQTDPEMLLRTHTSSVQVRHMENNPPPIRTISPGRVFRNESISSRSHCIFHQIEGLYITKNVSFIDLKETLKYFTEALFGKSKIRFRPSYFPFTEPSAEVDIYWGLETESDYRITKGTGWLEIMGCGMVDPNVLENCSIDPNKFSGFAFGMGIERIAMLLYQVSDIRLFFEN

SEQ ID NO: 188102 - protein, 85 aa, Unknown
  Bacterial polypetide isolated from the Sargasso Sea
IIIGEGDKWLEILGCGMVHPNVLKNSKVDPNKFQGFAFGIGIDRLAMLKYGINDLRSFFECDYRWLNYYGFDPLDVPTNYRGLSK

SEQ ID NO: 188103 - protein, 213 aa, Unknown
  Bacterial polypetide isolated from the Sargasso Sea
GHHPARAEMDTFYMNRAEGDERPPHVLRTHTSPVQIRSMEAQGAPLRIICPGRVYRADYDQTHTPMFHQVEGLAIDKNISMANLKWVLEEFFSAYFGTTVKTRFRASHFPFTEPSAEVDIQCQWKDGSVVVGEGDDWLEVLGSGMVHPKVLAAGGIDPDEWQGFAFGMGIDRIAMLKYGIPDLRAFFDSDLRWLRHYGFASLDVPTIRGGLSR

SEQ ID NO: 188104 - protein, 185 aa, Unknown
  Bacterial polypetide isolated from the Sargasso Sea
MAFAEDKIDVLTKIKASRSFEELEKLRLYYLGKKGLIPEALKGLGSLSIEEKKSKGQELNIIKKEIEEGIKNQRTEIENIEISDRINLESIDVTLPPNISAKGKIHPISQTIFNIIEIFGNLNYALETGPDIETDFNNFTALNIPEHHPAREMQDTFYVQDNGDKNVLRTHTSPVQVRTMLNTKP

SEQ ID NO: 188105 - protein, 110 aa, Unknown
  Bacterial polypetide isolated from the Sargasso Sea
FRPSHFPFTEPSAEVDIGYRMENGRIIVGEGNKWLEILGCGMVHPNVLKNAKVDTKKFQGYAFGMGIDRLAMLKYGINDLRSFFEADYRWLNYFGFDPLDVPTNYRGLSR

SEQ ID NO: 188106 - protein, 286 aa, Unknown
  Bacterial polypetide isolated from the Sargasso Sea
ELGLEEQSQGLLLLDPELSPGAQLNDHLQLPDRLLEVELTPNRGDCLSILGVAREVAALTGGRLKEPKLPRVRITESETRSISLDEDGRCARYVGRSITGVRPGARTPDRIRERVTRAGLRSIDALVDVSNYIMLELGQPMHAFDGERLKGNIQVRPAKSKEKIKLLDGERLTLDAESLLITDQKGAVALAGIKGGASTMIHPKTRTIFIEAAFFDPDGVARTARKYGLNTDASHRFERGVDFTLPAKAIDRASALIIQICGGRCGPQIESSEKSFLPKRTWVPLR

SEQ ID NO: 188107 - protein, 206 aa, Unknown
  Bacterial polypetide isolated from the Sargasso Sea
FCGLGYSVESGPEIETDFYNFESLNIPKNHPARDMQDTFYLDENRLLRTHTSPVQIRYLEKNPPPVRIIAPGRVYRRDAVDATHSPVFNQVEVLCIDQDINFSHLRGTVLTFLKTFFGDIPVRFRASYFPFTEPSAEVDVQWKGKWLEVMGCGMVDPKVLEKLGIDSEKWTGFAAGLGVERFCMVRHQIDDIRKFYTNDLRFLEQF

SEQ ID NO: 188108 - protein, 215 aa, Unknown
  Bacterial polypetide isolated from the Sargasso Sea
MSDIKKIKDEFLERLNEDLNIESVNEIKSELFGKNGKISTSFKNLGSLPAEERKKFASDLNFVKDELQEKINKKIQEIEIKEINSKLENEKIDVTLPERNIVQGKIHPVSQVIDELSSIFSEIGFSVEEGPDVENEHYNFTALNTPDNHPARDMHDTFYLDDKKELLLRTHTSPVQVRTMLKGKPPFKIIAPGRTYRSDSDQTHAPMFHHYQTCM

SEQ ID NO: 188109 - protein, 241 aa, Unknown
  Bacterial polypetide isolated from the Sargasso Sea
MENLNQIESEILKKIGNAKDRNAYETIKSEIFGKKGIITDLFKKIGNLDQDQRKDYASKLNSLKLKVTEILEKKLTDFDQIEINKRLKNEKIDITLPGRTYFAGKIHPVSQVIDEVTSIFSEIGFSVEEGPDIENEYYNFSALNTPADHPARDMHDTFYLDHSKDLLLRTHTSPVQIRTMLKGKPPFKIIAPGRTYRHDSDQTHSPMFHPLEGLHIDKNISMGHLKGLLYYFVKNFLKVKG

SEQ ID NO: 188110 - protein, 156 aa, Unknown
  Bacterial polypetide isolated from the Sargasso Sea
SPIQIRSMEKEGVPIRVIAPGKVYRRDSDITHTPMFHQIEGLVIDKGINFSHLKGILHQFIDTFFEENTEVRFRPSYFPFTEPSAEVDILSKENKWLEILGCGMVHPKVLENLDINTEIYSGYAFGMGVERLAMLKYGIKDIRSFYENDFNFLNQF

SEQ ID NO: 188111 - protein, 188 aa, Unknown
  Bacterial polypetide isolated from the Sargasso Sea
MGRARQYGLHTDASHRYERGVDPKLQRKAMERATALVLEICGGEAGPVIEAVSEDKLPKQATVTLRRDRLTRVLGISIDDAKVSEMLSRLGLDVTATIEGWKAIAPSYRFDISIEEDLIEEIARVYGYNNIPNVAPAATLAMLPSQEAQLPLGTMKSLLLSRGYNEAITYSFVDPKIQNALFPDVKGM

SEQ ID NO: 188112 - protein, 176 aa, Unknown
  Bacterial polypetide isolated from the Sargasso Sea
MLSGKPPFKIIVPGRTYRCDSDQTHAPMFHQLEGLHIDKDITMGHLKGCLDYFVKEFFEVKKLKMRFRPSHFPFTEPSAEVDIGYRLENGRIIVGEGDKWLEILGCGMVHPNVLKNTKVDPKKFQGFAFGMGIDRLAMLKYGINDLRSFFEADYRWLNYFGFDPLDVPTNYRGLSR

SEQ ID NO: 188113 - protein, 115 aa, Unknown
  Bacterial polypetide isolated from the Sargasso Sea
KIKMRFRPSHFPFTEPSAEVDIGYEIKEGKIIIGEGDKWLEILGCGMVHPNVLRNVKVDPSKYQGYAFGIGIDRLAMLKYGINDLRAFFDCDYRWLNHFGFDPLDVPSNYRGLSR

SEQ ID NO: 188114 - protein, 301 aa, Unknown
  Bacterial polypetide isolated from the Sargasso Sea
RAGMRPINNIVDITNYVMLELGQPLHAFDYQALCQRAGGETPEIFVRCAVNGEVMTTLDGEERKLDEQMLMITDEGGLIAIAGVMGGEETEVGNETKDVLLESANFDFLNNRRTSQILKLKTEASERFGKRLNADGTMTAALRAAELCVSIAGGTLEHQAADLYPGKLADESVDLDLEYLERVLGIKVEKNEVNRILEALEFTVQNKTDQLLEVTVPHHRLDIAIPADLVEEIARVYGYNRMPSTLIRDALPPQRENFQLQGVEAIRDILVASGIDEVITYTMTNPLDESNLMLQEGLTRR

SEQ ID NO: 188115 - protein, 231 aa, Unknown
  Bacterial polypetide isolated from the Sargasso Sea
MSEIKNIRDQYISKLENDLSIDQINEIKTELFGKNGLISSKFKTIGSIPETDRKKFASDLNQAKDELQNLITSKIIEIEAKKINEKLEKEKVDITLPERPFVRGKVHPVSQTIDEISSIFSEIGFSVEEGPDIENEYNNFTALNTPDNHPARDMHDTFYLDENKEVLLRTHTSPVQIRTMLKDKPPFKIIAPGRTYRSDSDQTHSPMFHQVEGLHIDTNINMGHLKGCLNY

SEQ ID NO: 188116 - protein, 318 aa, Unknown
  Bacterial polypetide isolated from the Sargasso Sea
YLGRVVKGINVKAPTPLWMKEKLRRCGIRSIDAVVDVTNYVLLELGQPMHAFDKDRIEGGIVVRMAKEGETLVLLDGSEAKLNADTLVIADHNKALAMGGIFGGEHSGVNDETQNVLLECAFFSPLSITGRARRHGLHTDASHRYERGVDPALQHKAMERATRLLIDICGGEAGPVIDVTNEDTLPKRATITLRRSKLDRLIGHHIADEQVSDILRRLGCDVTEGQDEWKAVAPSWRFDMEIEEDLVEEVARVYGYDNIPNTPIQAGLIMGTHREADLSLRRVKTMLNDKGYQEVITYSFVDPKVQSLLHPGEEALLL

SEQ ID NO: 188117 - protein, 182 aa, Unknown
  Bacterial polypetide isolated from the Sargasso Sea
KIDLKNFDEIRYIIPGRTYRSDHDATHSPMFHQCEGLVLGKNINMGHLKGCLIEFCRTYFNEDNLPVRFRPSYFPFTEPSAEVDIGCKKENDGSLVIGEGEDWLEILGSGMVHPRVLQGVGIDPSKYQGFAFGMGLERLTMLKYGIPDLRPFYDSDLRWLKHYGFIPVDNPSLHSGLNGVFS

SEQ ID NO: 188118 - protein, 219 aa, Unknown
  Bacterial polypetide isolated from the Sargasso Sea
YYNFSALNTPENHPARDMHDTFYLNNSKELLLRTHTSPVQIRTMLKGKPPFKIIAPGRTYRHDSDQTHSPMFHQLEGLHIDKNVNMGHLKGCLYYFVKKFFEVEKVKIRFRPSHFPFTEPSAEVDIGYKIQDGKIKIGEGDKWLEILGCGMVHPNVLKNAKVNPKLYQGYAFGVGIDRLAMLKYGINDLRAFFESDIRWLEFYGFDPLDVPTNYRGLSR

SEQ ID NO: 188119 - protein, 213 aa, Unknown
  Bacterial polypetide isolated from the Sargasso Sea
MELDAIINQAQSQIDAAQDAATLDQVRVEFMGKKGKLTDLLKGLGKLSNEERPAAGQKINQAKQVIQQAISAKGEFLRTEELNKKLAEEAVDVTLPGRTEKPGNLHPVSRTIARIESFFGELGFSVKTGPEIEDGFHNFDALNIPANHPARADHDTFYFNPDMMLRTQTSGVQIRTMEAEKPPLRIISPGRVYRNDYDQTHTPMFPPVERLMV

SEQ ID NO: 188120 - protein, 204 aa, Unknown
  Bacterial polypetide isolated from the Sargasso Sea
MSEFEKKIAEYKSKIKSSSKIEEIDLLRSEVFGKNGIINLEFKKLVELPLEEKKSFAANLNKIKQELQDIYKTKSTEILDKDIIEKVEKEKIDITLPEKEFKIGKVHPVSQVIDEISCIFSEIGFSVEEGPDVENEYNNFTALNTPENHPAKDMHDTFYLDKDMKTMLRTHTSPVQVRTMLKGKPPFKIIAPGRTYRSDSDQTH

SEQ ID NO: 188121 - protein, 202 aa, Unknown
  Bacterial polypetide isolated from the Sargasso Sea
MHDTFYLDDNQKILLRTHTSPVQIRTMLGSKPPFKIIVPGRTYRCDSDQTHSPMFHQLEGLHIDKDITMGHLKGCLDYFVKEFFEVKKLQMRFRPSHFPFTEPSAEVDIGYRLENGRIIVGEGDKWLEILGCGMVHPNVLKNAKVDSKKFQGFAFGMGIDRLAMLKYGINDLRSFFEADFRWLNHFGFDPLDVPTNYRGLSR

SEQ ID NO: 188122 - protein, 306 aa, Unknown
  Bacterial polypetide isolated from the Sargasso Sea
DYQVNYPIEKKASIIAIEDKDICFRYTGIQIESVNIKESPDWLKKRLISIGERPINNIVDITNYVMFELGQPLHAFDQDKIDGSKIYVRKSKSKEKMLTLDGENRELPKDSIVIADQKSPIGLAGIMGGKSSEITSDTTNVFLEAANFNSSMIRSTSKQLGLSTEASIRFERNLDPKLAIYGLSRAADLIVELAGGKINQKIQDNYPSRIKDQKIILNKDKLRNHLGLDISNNQIDQTLDNLNFHFTFDQINQIWEIEKPFWRTDIQIPEDIHEEIARIIGYDEIPLAYLSGSVPKWEPNKSLDIK

SEQ ID NO: 188123 - protein, 300 aa, Unknown
  Bacterial polypetide isolated from the Sargasso Sea
MSNNLIDNLKVELSQVNSENDLMNLKSNYLGKKGEITKLAASIKNLSVEEKKEVGSKLNLLKKEAELLISEKFKFLKNEIINKKLESEKIDITLPQRESNLGSIHPITQILDEVLDIFESYGFQIVEGPEIENDYYNFEALNIPKDHPARDMQDTFYLEDEKVLRTHTSPMQVRIMENNLPPIKIISPGKVYRCDSDVTHTPMFHQVEGLLVNHDVSFSNLKSILSSFCSDFFGKKIKTRFRPSYFPFTEPSAELDIEWVDKSGEKRWMEVLGCGIVNPKVFEFAKYDLDEVSGFAFGMG

SEQ ID NO: 188124 - protein, 280 aa, Unknown
  Bacterial polypetide isolated from the Sargasso Sea
MEKNIIDIIKKAKELSLNLKQEINHIKDLKEIDLIKIKYTGKKGLVTLLMKSLAELNNDDRAKAGRAINIIKRDIEKMIISHKSLIENKILNESLEKEKIDITLPGRPTLRGGIHPISKTMDEIISILSLLGFNVEEGPHIEDEYFNFTALNIPEDHPARQEHDTFYMQGSNKKKLLRTHTSPIQIRVMKEKKPPIKIIAPGNTYRCDDDATHSPMFHQIEGLVVDKNISMAHLKWTIKELLASFFNVKDLVMRFRPSYFPFTEPSAEVDIGCEVEDGKL

SEQ ID NO: 188125 - protein, 186 aa, Unknown
  Bacterial polypetide isolated from the Sargasso Sea
MSDIKKIKEEYLDKLSDDLNLDNVNQIKTELFGKNGVISNSFKKLGSMPSEDRKKFASDLNSIKDELQEKINSKLQEIETKEINSKLDNEKIDVTLPERDINQGKIHPVSQVIDEISSIFSEIGFSVEEGPDVESQHYNFTALNTPDNHPARDMHDTFYLDNKKELLLRTHTSPVQVRTMLKGKPP

SEQ ID NO: 188126 - protein, 206 aa, Unknown
  Bacterial polypetide isolated from the Sargasso Sea
MSEIKNIRDQFISKLENDLSIDQINDIKTELFGKNGLISSKFKIIGSIPENDRKKFASDLNKVKDELQNLIISKINEIEGKKINEKLEKEKVDITLPERPFVRGKVHPVSQTIDEISSIFSEIGFSVEEGPDVENEYNNFTALNTPDNHPARDMHDTFYLDENKEILLRTHTSPVQIRTMLKDKPPFKIIAPGRTYRSDSDQTHAP

SEQ ID NO: 188127 - protein, 162 aa, Unknown
  Bacterial polypetide isolated from the Sargasso Sea
RTYRSDSDQTHTPMFHQLEGLHIDKDINMGHLKGCLNYFIKEFFEVEKIKMRFRPSHFPFTEPSAEVDIGYRIENNKIIIGEGDKWLEILGCGMVHPNVLKNCKVDPNKFQGFAFGIGIDRLAMLKYGINDLRSFFECDYRWLNHYGFDPLDVPTNYRGLSR

SEQ ID NO: 188128 - protein, 256 aa, Unknown
  Bacterial polypetide isolated from the Sargasso Sea
MPDNLSDLSKSATQEINECSSTTELDSLRVKYLGKKGAITIALKSVSSVDPKDRPAYGKKINELKSLIQGTLSQKRASLQKKEINQSINDKKIDVSLPGRSNFGGHRHPVTKTLLEIEEIFYGAGFAVVDGPEIEDEYHNFTALNIPSNHPARAMHDTFYFNSEFLLRTHTSPIQIRSMEKEGVPIRVIAPGKVYRRDSDITHTPMFHQIEGLVIDKGINFSHLKGILHQFIDTFFEENTEVRFRPSYFPFTEPSA

SEQ ID NO: 188129 - protein, 283 aa, Unknown
  Bacterial polypetide isolated from the Sargasso Sea
NLNYFGKNGIISNEFLKLGSISVEERKKLASDLNSIKDELQNKISIKIQEIETKEINIKLEKEKIDVTLPERNIEIGKIHPVSQVIDEISSIFSEIGFSVEEGPDVENEYNNFTALNTPDNHPARDMHDTFYLDNNKELLLRTHTSPVQVRTMLKGKPPFKIIAPGRTYRSDSDQTHAPMFHQVEGLHIDKNINMGHLKGCLNYFIKEFFEVDKIKMRFRPSHFPFTEPSAEVDIGYEIKNGKIVIGEGNKWLEILGCGMVHPNVLKNVNVNPSKYQGYAFGI

SEQ ID NO: 188130 - protein, 141 aa, Unknown
  Bacterial polypetide isolated from the Sargasso Sea
RAHCFFHQVEGLYIDKGVSFADLKQTLLYFAQELFGSKTKIRLRPSYFPFTEPSAEVDISCSICSAKGCSVCKYTGWLEILGCGMVDPNVLESCGIDSNLFSGFAFGMGIERIAQLKYKVSDLRYYSENDIRFLDQFKSAL

SEQ ID NO: 188131 - protein, 284 aa, Unknown
  Bacterial polypetide isolated from the Sargasso Sea
MQFSRNWLKDFIDLNISTEDICSQLTMAGIEVDGYDSFHSKITGKDSIIKLDITPNRGDCFSVFGVARELAVINNIRLKNPKIKAIKGSFKEDLKIQVCQEAPRYVGRSITNIDIKAQTLPLVAERLVISDQKLIDPVVDITNYVLLELGQPLHAFDRDKLEGDIYVRKAKRDEGLTLLDDKEINLNQDYIVISDEKKAIALAGIMGGKNTCVASNTKSIFLESAFFKPTAIRGRARRLGFQTDASIRFERGVDYEIQLLAVDRASEILHETVGGEFGTIEKVN

SEQ ID NO: 188132 - protein, 164 aa, Unknown
  Bacterial polypetide isolated from the Sargasso Sea
CYLRTHTSPVQIRTMTHSKPPFAFSSAGKVYRKDDDSTHLPMFHQIEGIYVDKDVNFANLKDLIHKIIYTIFDDSTKIRFRPSYFPFTEPSAEVDILSEDGKWLEILGCGIVNPKVLQNCKIDSKEFSGLAFGLGIERIAMLKFGVTDIREFYKSNLDFLNQFK

SEQ ID NO: 188133 - protein, 207 aa, Unknown
  Bacterial polypetide isolated from the Sargasso Sea
MSDLDKINSIFNAKIDSVKTKEDLQNVKTEFFGKNGQITKQFKTLGSLEPDKRRDFASNLNKIKDDLTNQIEQKDFEISNAEIIEKLKNEKVDVTLPIRPYQQGKIHPVSQVIDEISSIFSEIGFTVAEGPDVETEYNNFTALNTPEDHPARDMHDTFYLEKNKKILLRTHTSPVQIRAMLDGKPPFKIIVPGRTYRCDSDQTHAPM

SEQ ID NO: 188134 - protein, 279 aa, Unknown
  Bacterial polypetide isolated from the Sargasso Sea
MIITLPWLKEHLKTKANQTEIINKLTNIGLEVEGVKENNNQLKELKIAQIIKAEKHPNADKLKVCDVNIGGNKILKVVCGAPNAKDGLITVYAPPGTIIPKTKLELKIVKIRGVESTGMLCSESELNISNESDGIIELSNKENEIGKSFFKSKSEKSIDISITPNRADCLGVRGIARDLSSTGIGKLIPLKKKKFNQSLKNLIKISVKNDPNQGCKIFGSCYIKNISNKESPEWLKNKLIAIGLKPISAVVDITNYVMFDLNRPLHAYDADKIDSEIIV

SEQ ID NO: 188135 - protein, 246 aa, Unknown
  Bacterial polypetide isolated from the Sargasso Sea
MSDLEKINSIFNAKIDTVKNKEDLQNLKTEFFGKNGQITQQFKTLVNLNPEKRKEFASDLNKIKDDFTNQIEEKSFELDNLEINEKLKNEKVDITLPIRPFQKGKIHPVSQVIDEISSIFSEIGFSVAEGPDVETEYNNFTALNTPEDHPARDMHDTFYLEKNKKLLLRTHTSPVQIRTMLNGKPPFKIIVPGRTYRCDSDQTHAPMFHQLEGLHIDKNITMGHLKGCLDYFIKEFFEVKNVKMRF

SEQ ID NO: 188136 - protein, 179 aa, Unknown
  Bacterial polypetide isolated from the Sargasso Sea
MLGLEVDGYEKLKSKITGDDSIIKLDITPNRGDCFSILGIARELSALNGVKVILPSRQKITETIDSPINVDICDESPRYVGRYIEGINLSKKVSPLIVERLKLSDIRSIDPIVDITNYVLLETGQPLHAFDAEKISNGLSVRLAKDKEKIKLLDEQVLKLSKDCLVITDKSQPSCFSQE

SEQ ID NO: 188137 - protein, 89 aa, Unknown
  Bacterial polypetide isolated from the Sargasso Sea
SDTDIRFRPSYFPFTEPSAEVDIKWKKGWLEILGCGMVHPNVLEMAGIDSKKFTGFAFGLGPERIAMLKHDIPDLRAFFENDIRFIKQF

SEQ ID NO: 188138 - protein, 300 aa, Unknown
  Bacterial polypetide isolated from the Sargasso Sea
IRSTEIPGVVIGKVKTAEKHPDADKLKLCTVNDGKHVHQVVCGAPNVDAGQTIAFAKVGSVLPGKLKIKKANIRGVESSGMICSERELNLSDEHEGIMVLPNHLKPGDDFVSSYGYKYISVELDITPNRPDAFSHQGVARDIACKTNRDFKQISVEPITVKGNESIDISMEDHHDCPRYIGGIVKNVKVGPSPDWLVERLKAGGQRSINNIVDISNYVLMEMGHPTHIFDHDSLKNKSIYVRRAEKGETLTTLDDQKHKLDKTHLLITDGREPLALAGVMGGANTAVSDDTSIVQVESAY

SEQ ID NO: 188139 - protein, 124 aa, Unknown
  Bacterial polypetide isolated from the Sargasso Sea
HTPMFHQIEGLVVEEDASFSQLKGLLNDFLEDFFGEEVELRFRPSYFPFTEPSAEADIRWNKNWLEVLGCGMVHPNVLEGVGVDTNKYTGFAFGLGVERMAMLKYDIPDLRAFFENDIRFLDQF

SEQ ID NO: 188140 - protein, 145 aa, Unknown
  Bacterial polypetide isolated from the Sargasso Sea
MAGLEVDGFENINSKITGKDSIIKLDITPNRGDCFSILGVARELAVINNLKLHLPEIPKVQDTFKDSIKIKVCPEGPSYFGRTLKNISVDSKTQPLIAERLKLSDQKLIDPVVDITNYILLELGQPLHAFDRDTLNGNISVRTAQ

SEQ ID NO: 188141 - protein, 282 aa, Unknown
  Bacterial polypetide isolated from the Sargasso Sea
DNDLNIESVNQIKTQLFGKNGQISNFFKTLGSLPTDDRKKFASELNSIKDELQEKINSKLREIETKEINSKLVNEKVDVTLPEREINQGKIHPVSQVIDEISSIFSEIGFSVEEGPDIENEHYNFTALNTPDNHPARDMHDTFYLDNNKELLLRTHTSPVQVRTMLNGKPPFKIIAPGRTYRSDSDQTHSPMFHQVEGLHIDKDINMGHLKGCLNYFIKSFFEVDKIKMRFRPSHFPFTEPSAEVDIGYEIKNGKIVIGEGDKWLEILGCGMVHPNVLKNVK

SEQ ID NO: 188142 - protein, 265 aa, Unknown
  Bacterial polypetide isolated from the Sargasso Sea
KLEKEKIDVTLPERNIEIGKIHPVSQVIDEISSIFSEIGFSVEEGPDVENEYNNFTALNTPDNHPARDMHDTFYLDNNKELLLRTHTSPVQVRTMLKGKPPFKIIAPGRTYRSDSDQTHAPMFHQVEGLHIDKNINMGHLKGCLNYFIKEFFEVDKIKMRFRPSHFPFTEPSAEVDIGYEIKNGKIVIGEGNKWLEILGCGMVHPNVLKNVNVNPSKYQGYAFGIGIDRLGMLKYGINDLRAFFETDYRWLSHFGFDPIRCPIKL

SEQ ID NO: 188143 - protein, 265 aa, Unknown
  Bacterial polypetide isolated from the Sargasso Sea
MENFNQIESEILNKIKSIKDRSSYESTKSEIFGKKGIITELFKKIGSLDQSKRKDYASKLNSLKTKVTEILEKKLENFDQSEINKKLNNEKIDVTLPGRTYFTGKIHPVSQVIDEVTSIFSEIGFSVEEGPDVENEYYNFSALNTPENHPARDMHDTFYLSNSKDLLLRTHTSPVQIRTMLKSKPPFKIIAPGRTYRHDSDQTHSPMFHQLEGLHIDRNINMGHLKGCLYYFVKKFFEVEKVKIRFRPSHFPFTEPSAEVDIGYK

SEQ ID NO: 188144 - protein, 93 aa, Unknown
  Bacterial polypetide isolated from the Sargasso Sea
CYRIENEKIIIGEGNKWLEILGCGMVHPTVLKNVKVNPKKYQGFAFGMGIDRLAMLKYGINDLRAFFETDYRWLNYFGFDPLDVPTNYRGLSK

SEQ ID NO: 188145 - protein, 306 aa, Unknown
  Bacterial polypetide isolated from the Sargasso Sea
EVEGVKENSGETGKFKIAKVLKAEKHPNADKLKVCDVSIGGKEILQVVCGAPNVREGLVTVYATPGAIIPKTKFELKVAKIRGVESKGMLCSEHELNLSENSEGIIELKNKERDIGKSYFQSNLEKAIDISITPNRADCLGMRGIARDLSSVGVGKLIGIKRKKIKQVVKHSIKTSIAKDKNQGCETFGSCYIKNITNRESPDWLKNKLVTLGLKPISAVVDITNYVMFDLNRPLHAYDADKINKEIIVRNSKEGEIFEGLDNKKYKLKKDMCVISDKSGVLGLGGIIGGTTTSTEFKTKNILLEA

SEQ ID NO: 188146 - protein, 269 aa, Unknown
  Bacterial polypetide isolated from the Sargasso Sea
KINQAKQVIQQAISAKGEFLRTEELNKKLAEEAVDVTLPGRTEKPGNLHPVSRTIARIESFFGELGFSVKTGPEIEDGFHNFDALNIPANHPARADHDTFYFNPDMMLRTQTSGVQIRTMEAEKPPLRIISPGRVYRNDYDQTHTPMFHQVEGLMVDKNVSFTDLKGILHDFLHHFFEESLEIRFRPSYFPFTEPSAEVDVMGKNGQWLEVLGCGMVHPNVLKAVGIDPEEYTGFAFGMGVERLTMLRYGVNDLRAFFENDLRFLKQFN

SEQ ID NO: 188147 - protein, 298 aa, Unknown
  Bacterial polypetide isolated from the Sargasso Sea
DLGQDDDGILELPDDAPVGEDLGAYLNLPDNILNLDLTPNRGDCFSLIGIARDLNTEPKSKLNYCFKIKNNITSKVKCKVKTPHPDICPRFASQTIEGIDNRARTPIHLTEKLRKSGIRTINPVVDITNYVMLELGQPLHAYDLNKITGVVSPRFAKNNETLQLLDGNTIKLNKNTIVVSDESGSIGLAGIMGGNSTSVSDKTTSVFFEAAFWPPKFMAGKAREYGMQTDASLRFERGVDPDIQAFAIERATQLLLSITGGKAGPIDDIRNKKYLPKSKSIRLRKSRLYKILGKKIPK

SEQ ID NO: 188148 - protein, 272 aa, Unknown
  Bacterial polypetide isolated from the Sargasso Sea
MENFNKIESDILNKIKNVSNRSSYDAIKTEIFGKKGIITELFKKIGSLDQNQRKEYASKLNFLKTKVTEILEKKLTDFDQLEIDKKLKNEKIDVTLPGRTYFAGKIHPVSQVIDEVTSIFSEIGFSVEEGPDVENEYYNFSALNTPEDHPAKDMHDTFYLDHSKELLLRTHTSPVQIRTMLKGKPPFKIIAPGRTYRHDSDQTHSPMFHQLEGLHIDKNVNMGHLKGCLYYFVKKFFEVEKVKIRFRPSHFPFTEPSAEVDIGYKIQDGRIK

SEQ ID NO: 188149 - protein, 220 aa, Unknown
  Bacterial polypetide isolated from the Sargasso Sea
SDFNNFTALNIPPHHPAREMQDTFYVNNLNGEDNVLRTHTSPVQVRTMLKSKPPIKIIVPGRTYRSDSDSTHTPMFHQVEGLVVNKDATMADLKSTLILFLKEFFEIDNLKYRFRPSYFPFTEPSAEMDVAYTKKNNVLKIGEGDDWLEILGCGMVNPKVLENCNIDSSVYQGFAFGMGIERLSMLKYGITDMRGLFDLNIKWLDHYGFSPLDLKTRSEI

SEQ ID NO: 188150 - protein, 228 aa, Unknown
  Bacterial polypetide isolated from the Sargasso Sea
NFTALNIPKEHPARQEHDTFYLQPDMKGARKVLRTHTSPVQIRTMERIDLDNFDEIRYIIPGRTYRSDHDATHSPMFHQCEGLVLGKNINMSHLKGCLIEFCRSYFNEENLPVRFRPSYFPFTEPSAEVDIGCKKETDGSLSIGESEEWLEILGSGMVHPRVLQGVGIDPNIYQGFAFGMGLERLTMLKYGIPDLRPFYDSDLRWLKHYGFIPVDNPSLHYGLNGVFT

SEQ ID NO: 188151 - protein, 276 aa, Unknown
  Bacterial polypetide isolated from the Sargasso Sea
EERITLLDGEERALASDTLVIADHQKALAMAGIMGGEGSGISGETRHLFLEAAFFAPELMAGRARHYGLHTDASHRYERGVDPELAYQAVERATQLFIGCVGGEAGPVTDVTSSADLPQREPVTLKAASIRRMLGIDLSADQVTRIFTGLGFAVDPDTDSGSWLCTAPSWRFDMGREADLLEEIARIYGYDNIPVEPVLGAASANAAAESATPQSVIKQRLVARGFNEAISFSFLSPELQQLIDPEIEPVALKNPISNDLAVMRTSLIPGLLSAAA

SEQ ID NO: 188152 - protein, 220 aa, Unknown
  Bacterial polypetide isolated from the Sargasso Sea
KHPLISTQDEIIDIFCGLGYSVESGPEIETDFYNFESLNIPKNHPARDMQDTFYLGENRLLRTHTSPVQIRYLEKNPPPVRIIAPGRVYRRDAVDATHSPVFNQVEVLCIDQDINFSHLRGTVLTFLKTFFGDIPVRFRASYFPFTEPSAEVDVQWKGKWLEVMGCGMVDPKVLEKLGIDSEKWTGFAAGLGVERFCMVRHQIDDIRKFYTNDLRFLEQF

SEQ ID NO: 188153 - protein, 218 aa, Unknown
  Bacterial polypetide isolated from the Sargasso Sea
PINKVKFSLEKLLCSFGFEIAEGPEIESEKYNFDMLNIPSTHPAREMHDTFYVNNKKSVLRTHTSPVQVRCMLSNKMPIAFISPGKVYRKDDDSTHLPMFHQIEGIYVDENVNFAHLKDLIYKICFSLFGDKIKLRFRPSFFPFTEPSAEVDILFGDKWLEILGCGIVNPKVLKNCSIDTKKYSGLAFGLGIERIAMLKYGVKDIRDFYKSNLDFLRQ

SEQ ID NO: 188154 - protein, 213 aa, Unknown
  Bacterial polypetide isolated from the Sargasso Sea
ILEELSSLGFEIIDGPEIETEEFNFDMLNIKESHPARQMHDTFYCNAKKNVLRTHTSPVQIRGLLEDGPPRAFISAGKVYRKDDDSTHLPMFHQIEGMFVDKEVTFANLKMLIHKILFQIFNTNVKLRFRPSYFPFTEPSAEVDIMSKDGKWLEILGCGIVNPIVLENCKIDSNIFSGLAFGLGVERIAMLKYEVNDIRDFYKSNLDFLEQFK

SEQ ID NO: 188155 - protein, 265 aa, Unknown
  Bacterial polypetide isolated from the Sargasso Sea
KDDVTLPEKDFRLGKIHPVSQVIDEISSIFSEIGFSVEEGPDVETEYYNFTALNTPENHPAKDMHDTFYLEENMKTLLRTHTSPVQVRTMLNGKPPFKIIAPGRTYRSDSDQTHTPMFHQLEGLHIDKNITMGHLKGCLNYFIKEFFELDKIKMRFRPSHFPFTEPSAEVDIGYRIENNKIIIGEGDKWLEILGCGMVHPNVLKNAKVDPNKFQGFAFGIGIDRLAMLKYGINDLRSFFESDYRWLNYYGFDPLDVPTNYRGLSK

SEQ ID NO: 188156 - protein, 312 aa, Unknown
  Bacterial polypetide isolated from the Sargasso Sea
QSGYWYFNSLQIVCGANNVQANLHVFVAPIGVHLKAINLTIKRSEIRGVSSEGMICSLEELGIEDNSDGIAIVNDELALKHKLGSSCSLLLDLDDYIYDLAITANRPDGMSVVGISREISALLGTKLTFPELKNIYKIDLHKKFDLCNEAITTNCLYSISLIESVSGKELSPQWLKDRLNKSGIKSINLVVDITNYILLEQGQPLHAFDKGKLTKLIGRDVLPEDFSVRKAKENESLLCLNGEKYELNENITIVTCDGIPVAIAGVIGGLETAVDDETSSIYLEGAVFNPVTIRKSSKELGIRTESSSRFEK

SEQ ID NO: 188157 - protein, 196 aa, Unknown
  Bacterial polypetide isolated from the Sargasso Sea
VETEKYNFDMLNIKKTHPARQMHDTFYVNHKSGVLRTHTSPVQIRAMLKNKPPLAYFSGGKVYRKDDDSTHLPMFHQIEGLLVDKDVSFIHLKDLIYEIVTSLFGADVKLRFRPSYFPFTEPSAEVDILFKDQNKWLEILGCGIVNPKVLENCNINPNDFSGLAFGLGIERIAMLRHGVSDIREFYKSNLDFLDQF

SEQ ID NO: 188158 - protein, 253 aa, Unknown
  Bacterial polypetide isolated from the Sargasso Sea
RGKVHPVSQTIDEISSIFSEIGFSVEEGPDVENEYNNFTALNTPDNHPARDMHDTFYLDESKEVLLRTHTSPVQIRTMLKDKPPFKIIAPGRTYRSDSDQTHAPMFHQVEGLHIDTNINMGHLKGCLNYFIKEFFEVEKIKMRFRPSHFPFTEPSAEVDIGYEIKDGKIIIGEGNKWLEILGCGMVHPNVLRNVKVDPSKYQGYAFGIGIDRLAMLKYGINDLRAFFDCDYRWLNHFGFDPLDVPSNYRGLSR

SEQ ID NO: 188159 - protein, 247 aa, Unknown
  Bacterial polypetide isolated from the Sargasso Sea
MSEIKNIRDQFISKLENDLSIDQINDIKTELFGKNGLISSKFKIIGSIPENDRKKFASDLNKVKDELQNLIISKINEIEGKKINEKLEKEKVDITLPERPFVRGKVHPVSQTIDEISSIFSEIGFSVEEGPDVENEYNNFTALNTPDNHPARDMHDTFYLDENKEILLRTHTSPVQIRTMLKDKPPFKIIAPGRTYRSDSDQTHAPMFHQVEGLHIDTNINMGHLKGCLNYFIKEFFEVEKIKMRLR

SEQ ID NO: 188160 - protein, 165 aa, Unknown
  Bacterial polypetide isolated from the Sargasso Sea
APGRTYRSDSDQTHAPMFHQVEGLHIDNNINMGHLKGCLNYFIKEFFEVDKIKMRFRPSHFPFTEPSAEVDIGYELKDGKIIIGEGDKWLEILGCGMVHPNVLKNVKVDPLKFQGYAFGIGIDRLAMLKYGINDLRSFFETDYRWLNHFGFDPLDVPSSYRGLSR

SEQ ID NO: 188161 - protein, 183 aa, Unknown
  Bacterial polypetide isolated from the Sargasso Sea
SPVQIRTMLKNKPPIKIIVPGRTYRCDSDMTHTPMFHQLEGLYVDKNINMGDLKGCLEYFLKKFFEDNKLKMRLRPSHFPFTEPSAEVDISYKIENEKIVVGEGDKWLEVLGCGMVHPNVLKNVKIDSSKFQGYAFGVGIDRLAMLKYGITDLRSFFEGDIRWLDHYGFDSNDVPTNYRGLSK

SEQ ID NO: 188162 - protein, 290 aa, Unknown
  Bacterial polypetide isolated from the Sargasso Sea
NGFINSEFKKLGSLTEEEKKKVASEINKAKQELTKLFGEKSLKLKDIEIEEQIKKEKDDVTLPEKDFRIGKIHPVSQVIDEISSIFSEIGFSVEEGPDIESEYYNFTALNTPENHPAKDMHDTFYIEENMKTLLRTHTSPVQVRTMLKGKPPFKIIAPGRTYRSDSDQTHTPMFHQLEGLHIDKNINMGHLKGCLNYFVKEFFEVEKIKMRFRPSHFPFTEPSAEVDIGYRIQNNKIVIGEGDKWLEILGCGMVHPNVLKNSKVDPKKYQGFAFGIGIDRLAMLKYGIND

SEQ ID NO: 188163 - protein, 78 aa, Unknown
  Bacterial polypetide isolated from the Sargasso Sea
KWLEILGCGMVHPNVLKNAKVDPKKYQGFAFGMGIDRLAMLKYGINDLRAFFETDYRWLSHFGFDPLDVPTNYRGLSK

SEQ ID NO: 188164 - protein, 299 aa, Unknown
  Bacterial polypetide isolated from the Sargasso Sea
SECKEPELYPAQIKHKTELPIDIFAQDQCPRYLGRIVKNIDLNQTSPLWLREKLRRSGLRSIDPVVDVTNYVLLELGQPMHAFDYEKLHGGIRVRMAEKNEKLTLLDGKEVTLKPDILVISDHEKAVAMAGIMGGLATSVSEKTKNVFLECAFFSPLAIAGKARAYGLHTDASHRYERGVDYELQHLAMERATEILISIVGGEAGPITETLGNLPEDSSVDLLFANVKSILGIEIPAVEIKDILTRLGFLIEKEDQDGLTVGVPTYRFDISLEADLVEELVRVYGYDNVPKTSGFFHRH

SEQ ID NO: 188165 - protein, 163 aa, Unknown
  Bacterial polypetide isolated from the Sargasso Sea
MLLRTHTSPMQARIMEKNDPPIRVVIPGKCYRYEATDSTHEWHFNQIEGLAIDTNLNFTDLKGTLYDFARKIFGSERKIRFRCDYFPFVEPGVDMSIDWNNDWIEILGAGMVHPKVLESVGYDPEKYSGFAFGVGVERIAMIRHGINDIRHFYGNDMRFLSQF

SEQ ID NO: 188166 - protein, 127 aa, Unknown
  Bacterial polypetide isolated from the Sargasso Sea
SYCLFHQVEGIYINEKVSFAELKGCLEYFVKQMFGPKKKMRFRPSYFPFTEPSAEVDIWDEKRNQWMEILGCGMVDPAVLKNVGYDPEKWHGYAFGMGVERIAMLKYKIDDIRNFYSGDIRVLEQFI

SEQ ID NO: 188167 - protein, 277 aa, Unknown
  Bacterial polypetide isolated from the Sargasso Sea
MGKDSIINLDITPNRGDCFSILGVARELSVINNLKLSLPNISSIDGSFKDEMKVKACPEGPSYFGRTIRDISVNSKTLPIIAERLKFSDQKLIDPVVDITNYILLELGQPLHAFDRDKLRGNITVRTALNEEKIKLLDDQELVLDDSCLVISDQESAVAFAGIMGGKESAVSASTNSIFLESAFFKPSVIRGKARRYGFQTDASLRFERGVDYKIQEIAIDRASILLRDTVGGRFSEITSSTLKNQLPKQKKITLDLERSNDLLGTKISKQVALRYF

SEQ ID NO: 188168 - protein, 269 aa, Unknown
  Bacterial polypetide isolated from the Sargasso Sea
EDTVNDQKIIIENKDLEKKLKHESVDITLPHNEEVIGKIHPISQTIFSIIEIFGNLNYSVQAGPDIESDFNNFSALNIPPHHPAREMQDTFYVNNSNGEDNVLRTHTSPVQVRTMLKSKPPIKIIVPGRTYRSDSDSTHTPMFHQVEGLVVNKDATMADLKSTLILFLKEFFEIDNLKYRFRPSYFPFTEPSAEMDVAYTKKNNVLKIGEGDDWLEILGCGMVNPKVLENCNIDSTVYQGFAFGMGIERLSMLKYGITDMRGLFDLNVK

SEQ ID NO: 188169 - protein, 119 aa, Unknown
  Bacterial polypetide isolated from the Sargasso Sea
FEVDKIKMRFRPSHFPFTEPSAEVDIGYEMKDGKIIIGEGNQWLEILGCGMVHPNVLKNVKIDPTKFQGYAFGIGIDRLAMLKYGINDLRAFFDCDYRWLNHFGFDPLDVPTNYRGLSR

SEQ ID NO: 188170 - protein, 169 aa, Unknown
  Bacterial polypetide isolated from the Sargasso Sea
FKIIVPGRTYRCDSDQTHAPMFHQLEGLHIDKGITMGHLKGCLDYFIKEFFEVKNVKMRFRPSHFPFTEPSAEVDIGYKIEKGKIVIGEGNQWLEVLGCGMVHPNVLKNVKVDSKKYQGYAFGIGIDRLAMLKYGINDLRAFFEADYRWLSHFGFDPLDVPTNYRGLSK

SEQ ID NO: 188171 - protein, 158 aa, Unknown
  Bacterial polypetide isolated from the Sargasso Sea
SDSDQTHSPMFHQVEGLHIDKDINMGHLKGCLNYFIKEFFEVDSIKMRFRPSHFPFTEPSAEVDIGYKIKDGKIIIGEGDKWLEILGCGMVHPNVLKNVKVDPSKFQGYAFGIGIDRLAMLKYGINDLRSFFDCDYRWLNHFGFDPLDVPTNYRGLSR

SEQ ID NO: 188172 - protein, 117 aa, Unknown
  Bacterial polypetide isolated from the Sargasso Sea
QVEVLCIDQDINFSHLRGTVLTFLKTFFGDIPVRFRASYFPFTEPSAEVDVQWKGKWLEVMGCGMVDPKVLEKLEIDSEKWTGFAAGLGVERFCMVRHQIDDIRKFYTNDLRFLEQF

SEQ ID NO: 188173 - protein, 290 aa, Unknown
  Bacterial polypetide isolated from the Sargasso Sea
MSLVVKIKSVKSDFLTDLDTFHKQDADLPALRQKYLARNGLVADLFKMLGQVSSEDRPQYGQLLNELKNNIASKIDSLSTDLEDSESLGNIDIALPGRDYDIGTIHILEQTLNDIKRIFNDIGFCVEYGPEVDDDYHNFGALNFPEHHPARDMQDTFFIDKDIVLRTHTSNVQIHLMEENEPPLRFIVPGRVYRNEAISYKSYCLFHQVEGLYVDKNVSFGQLKGCLEYFVKKMFGEKCKMRWRPSYFPFTEPSAEVDIWDDQRKQWMEILGCGMVDPDVFNNVGYDSNI

SEQ ID NO: 188174 - protein, 258 aa, Unknown
  Bacterial polypetide isolated from the Sargasso Sea
ITSKISKIEGKKINEKLEKEKVDITLPERPFVRGKVHPVSQTIDEISSIFSEIGFSVEEGPDVENEYNNFTALNTPDNHPARDMHDTFYLDENKEVLLRTHTSPVQIRTMLKDKPPFKIIAPGRTYRSDSDQTHAPMFHQVEGLHIDTNINMGHLKGCLNYFIKEFFEVEKIKMRFRPSHFPFTEPSAEVDIGYEIKDGKIIIGEGDKWLEILGCGMVHPNVLRNVKVDPSKYQGYAFGIGIDRLAMLKYGINDLRAF

SEQ ID NO: 188175 - protein, 295 aa, Unknown
  Bacterial polypetide isolated from the Sargasso Sea
ELSLDEINSIKTELFGKNGQISSLFKTVGSIPESDRKTFAADLNKIKDELQSLILEKIKEIETKEVNQKLEKEKVDITLPERPFVRGKIHPVSQTIDEISSIFSEIGFSVEEGPDVENEYNNFTALNTPDNHPARDMHDTFYLDENKEVLLRTHTSPVQIRTMLKDKPPFKIIAPGRTYRSDSDQTHAPMFHQVEGLHIDKDINMGHLKGCLNYFIKEFFEVEKIKMRFRPSHFPFTEPSAEVDIGYEIKDGKIVIGEGDQWLEILGCGMVHPNVLKNVKVDPNKYQGYAFGIGI

SEQ ID NO: 188176 - protein, 199 aa, Unknown
  Bacterial polypetide isolated from the Sargasso Sea
MSDIKKIKDEFLERLNEDLNIESVNEIKSELFGKNGKISTSFKNLGSLPAEERKKFASDLNFVKDELQEKINKKIQEIEIKEINSKLENEKIDVTLPERNIVQGKIHPVSQVIDELSSIFSEIGFSVEEGPDVENEHYNFTALNTPDNHPARDMHDTFYLDDKKELLLRTHTSPVQVRTMLKGKPPFKIIAPGRTYRSD

SEQ ID NO: 188177 - protein, 142 aa, Unknown
  Bacterial polypetide isolated from the Sargasso Sea
LHIDKNITMGHLKGCLNYFVKEFFELEKIKMRFRPSHFPFTEPSAEVDIGYRIENNKIIIGEGDKWLEILGCGMVHPNVLKNSKVDPNKYQGFAFGIGIDRLAMLKYGINDLRSFFECDYRWLNYYGFDPLDVPTNYRGLSK

SEQ ID NO: 188178 - protein, 286 aa, Unknown
  Bacterial polypetide isolated from the Sargasso Sea
AGEFSGVVVGYVVECGRHPEADKLQVTKVDIGTGELLDIVCGAANCRQGLKVAVATVGAVLPGDFKIKAAKLRGQPSNGMLCSLSELGMAESSEGIIELPADAPLGQNIRQYLTLDDQAIEVDLTPNRADCLGLKGLAREVGVLNNLDVCQPDIAAVAATISDVKGIQLSAPQACPRYLGRVIRNINTAAVTPLWMVEKLRRSGIRSIDAVVDVTNFVLLELGHPMHAFDLAKIEGDIDVRMAKEGEKLTLLDSNEVTLNANTLLIADSQKALAMAGIFGGLHSGV

SEQ ID NO: 188179 - protein, 121 aa, Unknown
  Bacterial polypetide isolated from the Sargasso Sea
MEKLKPPLRVIVPGRTYRSDHDATHSPMFHQCEGLVIGDKLNMSHLKGCLIDFCRIFFGVDDLPVRFRPSYFPFTEPSAEVDIGCSRKSGELIIGEGDEWLEILGSGMVNPRVLQNCGLDP

SEQ ID NO: 188180 - protein, 187 aa, Unknown
  Bacterial polypetide isolated from the Sargasso Sea
FTALNIPSNHPARAMHDTFYFNSEFLLRTHTSPIQIRSMEKEGVPIRVIAPGKVYRRDSDITHTPMFHQIEGLVIDKGINFSHLKGILHQFIDTFFEENTEVRFRPSYFPFTEPSAEVDILSKEKNWLEILGCGMVHPKVLENLGINTEIYSGYAFGMGVERLAMLKYGIKDIRSFYENDFNFLNQF

SEQ ID NO: 188181 - protein, 235 aa, Unknown
  Bacterial polypetide isolated from the Sargasso Sea
KLDISLPGFSSRKGSIHPVTRTIRDVCDFFERMGFDIEAGPEAEIDYYNFEALNIPEDHPAKDMHDTFYLKNEGLLRTHTSPVQIRTMEKSEAPHRIICPGKVYRKDSDLTHTPMFHQIEGLVVEEGASFAQLKGLLNDFLTDLFGEEVELRFRPSYFPFTEPSAEVDIRWKKNWLEVLGCGMVHPNVLKSVGVDTKQYSGFAFGLGVERMAMLKYDIPDLRAFFENDIRFLNQF

SEQ ID NO: 188182 - protein, 302 aa, Unknown
  Bacterial polypetide isolated from the Sargasso Sea
LGLKKHLNTKNSLDHIVSALTNIGLEVEEVIKPNTNLKLFKIAKILKTEKHPNADRLKVCDVDIGGKVEKVVCGAPNARNGLSTVYAPPGAIIPKSGIKLVVAQIRGVESRGMLCSESELGISNASEGIIEIDEKKVGDNFFKKSDEVIDISITPNRSDCLGVKGIARDLSAYGFGKLIEAKKISLKEQSKKKVKVEIKKNSGCNTFGSLCIEGIKNCESPKWLKKDLESLGLKPISAVVDVTNYVMFDLNRPMHAYDTDKINGNIIVRQSKNGESFEALDEKKYNVPEQACLITDEKKILG

SEQ ID NO: 188183 - protein, 277 aa, Unknown
  Bacterial polypetide isolated from the Sargasso Sea
VGAVVPVALPKSEIKDGFKIDKRDIRGVESNGMICSASELDLWDDHTGILKLSNDTKLGSDFSKIYSSTDTLWEVGVTPNRGDCMSHLGIARELSNYFNLTLKENSSALKSNIENIIKVNSGKIKACNSYQSIEIENFTLGDSNLNIRYRLSSIGVRVINNVVDYTNYVLHDIGQPLHAFDRDKLFGTISVRFAKDNENLKTLDEYERKLTSEDLIITDDDKPIALAGVMGGYDTEVTDSTINLLIESAYFDKVSIMKTSRRLNLMSDASIRFERGI

SEQ ID NO: 188184 - protein, 261 aa, Unknown
  Bacterial polypetide isolated from the Sargasso Sea
TLPEREFSRGKIHPVSQVIDEISSIFSEIGFSVEEGPDIENEHYNFTALNTPYNHPARDMHDTFYLDNNKELLLRTHTSPVQVRTMLNGKPPFKIIAPGRTYRSDSDQTHSPMFHQVEGLHIDKDINMGHLKGCLNYFIKSFFEVDKIKMRLRPSHFPFTEPSAEVDIGYEIKDGKIVIGEGDKWLEILGCGMVHPNVLKNVKVNPDKYQGYAFGIGIDRLGMLKYGINDLRAFFETDYRWLNHFGFDPLDVPSNYRGISR

SEQ ID NO: 188185 - protein, 176 aa, Unknown
  Bacterial polypetide isolated from the Sargasso Sea
MLKGKPPFKIIAPGRTYRSDSDQTHTPMFHQLEGLHIDKDINMGHLKGCLNYFIKEFFEVDKIKMRFRPSHFPFTEPSAEVDIGYRLENNKIIIGEGDKWLEILGCGMVHPNVLKNCKVDPNKFQGFAFGIGIDRLAMLKYGINDLRSFFECDYRWLNHYGFDPLDVPTNYRGLSR

SEQ ID NO: 188186 - protein, 161 aa, Unknown
  Bacterial polypetide isolated from the Sargasso Sea
TYRCDSDQTHASMFHQLEGLHIDKGITMGHLKGCLDYFIKEFFEVKNVKMRFRPSHFPFTEPSAEVDIGYKIEKGKIVIGEGDKWLEVLGCGMVHPNVLKNVKIDTKKYQGFAFGIGIDRLAMLKYGINDLRAFFEADYRWLSHFGFDPLDVPTNYRGLSK

SEQ ID NO: 188187 - protein, 264 aa, Unknown
  Bacterial polypetide isolated from the Sargasso Sea
DCLGVRGIARDLASAGFGELKPLNIKNIKGTFKSTKRFVISDELLEKKLVPIVTSRYFKNLNNSKSPKWMQQRLEAIGQRSISALVDITNYIMFDLNRPLHAYDGSKIEGDKLEIRFAKNNEKISTLNEKDYFLSNEDIIISDAKGADDLAGIMGGMRTGVSDETTEMFLEIAVFDPISVSKTGRKINLISDARYRFERGLDQDCPEWVHNYISDLVIDICGGEVSFLEKTGSGPNWSREIIFEIQQVFNLTGVNVKEKTIEKI

SEQ ID NO: 188188 - protein, 169 aa, Unknown
  Bacterial polypetide isolated from the Sargasso Sea
FKIIAPGRTYRSDSDQTHAPMFHQVEGLHIDKNINMGHLKGCLNYFIKEFFEVDKIKMRFRPSHFPFTEPSAEVDIGYKLKDGKIIIGEGDKWLEILGCGMVHPNVLKNVKVDPSKFQGYAFGIGIDRLAMLKYGINDLRAFFETDYRWLNHFGFDPLDVPSSYRGLSR

SEQ ID NO: 188189 - protein, 290 aa, Unknown
  Bacterial polypetide isolated from the Sargasso Sea
MSDIKKIKDDYLNKLNSDLNIESLNQIKTELFGKNGKISNSFKKLGSLSTDERKKFASDLNSIKNELQDKIDSKLQEIETKEINSKLENEKVDVTLPEREFSRGKIHPVSQVIDEISSIFSEIGFSVEEGPDIENEHYNFTALNTPDNHPARDMHDTFYIDNNKELLLRTHTSPVQVRTMLNGKPPFKIIAPGRTYRSDSDQTHSPMFHQVEGLHIDKDINMGHLKGCLNYFIKSFFEVDKIKMRFRPSHFPFTEPSAEVDIGYEIKDGKIVIGEGDKWLEILGCGMVHP

SEQ ID NO: 188190 - protein, 171 aa, Unknown
  Bacterial polypetide isolated from the Sargasso Sea
FYVNEKSNVLRTHTSPVQIRGMLDRKPPLAFISGGKVYRKDDDSTHLPMFHQVEGIYVDTEVSFSNLKELIYKIIYELFGDDVKIRFRPSYFPFTEPSAEVDILSEDNKWLEVLGCGIVNPVVLENCGIDANKYSGLAFGIGIERIAMLKYNVNDIREFYKSNLDFLNQFK

SEQ ID NO: 188191 - protein, 222 aa, Unknown
  Bacterial polypetide isolated from the Sargasso Sea
MPDNLSDLSKSATQEINECSSTTELDSLRVKYLGKKGAITIALKSVSSVDPKDRPAYGKKINELKSLIQDTLSQKRASLQKKEINQSIDDKKIDVSLPGRSNFAGHRHPVTKTLLEIEEIFYGAGFAVEDGPEIEDEYHNFTALNIPSNHPARAMHDTFYFNSEFLLRTHTSPIQIRSMEKEGVPIRVIAPGKVYRRDSDITHTPMFHQIEGLVIDKGINFS

SEQ ID NO: 188192 - protein, 275 aa, Unknown
  Bacterial polypetide isolated from the Sargasso Sea
DYLGKKGKVSQLFNNFKSVPLNKKKEFGQHLNILKTNTQNKIKALIQTASEKNQNINSNTDFTIPGQPIENGSRHPISIIRDRVISVFSNIGFSVSEGPEIEDDWHNFTALNFPEEHPARDMQDTFFINKDISLRTHTSSVQVRVMENNTPPIRTISPGRVYRNETISARAHCFFHQVEGLYIDDDVSFADMKQTLLYFTKSIFGNDIEIRLRPSYFPFTEPSAEVDVSCSICKQKGCNVCKYSGWLEIMGCGMIDPNVLENCNIDSSKYSGYAF

SEQ ID NO: 188193 - protein, 296 aa, Unknown
  Bacterial polypetide isolated from the Sargasso Sea
ERLRITYMGRKEGSLSVLLRELSTLDSSERPAIGAEVNRVKDIIQNALKEKKSELTPADLIADSIEDLTLPGRFRWMGGIHPVNQVIDEIWQIFRGLGFTRVRGPEVDDEWHNFEALNTPLDHPAADEQDTIYLNNVSAEYLTFPLLRSHTSPVQIRVMESYEPPIRILAPGMVYRRDTSDATHTPAFAQIEGLVIDEGITFLDFKATLAEFARRFWGPDTKIRFRPSFFPFTEPSAEVDVKRQLTMRDGTKVESDWIEIMGAGMVDPNVLENVGYDAERYTGFAFGMGPSRIALL

SEQ ID NO: 188194 - protein, 255 aa, Unknown
  Bacterial polypetide isolated from the Sargasso Sea
SSLNNEKQKITETINSRFKELEKSEINQKLQKNKVDVTLPARELPNGKIHPVSQVIDEISSIFSEIGFSVAEGPDVETEYNNFTALNTPEDHPARDMHDTFYLDNNKKILLRTHTSPVQIRAMLSGKPPFKIIVPGRTYRCDSDQTHAPMFHQLEGLHIDKNITMGHLKGCLDYFVKEFFEVKKLQMRFRPSHFPFTEPSAEVDIGYRLENGRIIVGEGDKWLEILGCGMVHPNVLKNAKVDSKNFQGFAFGMGI

SEQ ID NO: 188195 - protein, 158 aa, Unknown
  Bacterial polypetide isolated from the Sargasso Sea
THTSPVQIRYLENNPPPVRIIAPGRVYRRDAVDATHSPVFNQVEVLCIDQDINFSHLRGTVLTFLKTFFGDIPVRFRASYFPFTEPSAEVDVQWKGKWLEVMGCGMVDPKVLEKLGIDSEKWTGFAAGLGVERFCMVRHQIDDIRKFYTNDIRFLEQF

SEQ ID NO: 188196 - protein, 215 aa, Unknown
  Bacterial polypetide isolated from the Sargasso Sea
TALNTPEDHPARDMHDTFYLEKNKKLLLRTHTSPVQIRTMLGSKPPFKIIVPGRTYRCDSDQTHAPMFHQLEGLHIDKNITMGHLKGCLDYFIKEFFEVKNVKMRFRPSHFPFTEPSAEVDIGYKIENEKIVIGDGDKWLEILGCGMVHPNVLKNAKVDPKKYQGFAFGMGIDRLAMLKYGINDLRAFFETDYRWLNHFGFDPLDVPTNYRGLSK

SEQ ID NO: 188197 - protein, 45 aa, Unknown
  Bacterial polypetide isolated from the Sargasso Sea
SGIDPERYSGFAFGMGVERLAMLRYGVNDLRLFFDNDLRFLAQFR

SEQ ID NO: 188198 - protein, 198 aa, Unknown
  Bacterial polypetide isolated from the Sargasso Sea
MKFSEQWLRSWVNPQVSREELVARLSMVGLEVDAVTPVAGSFSGVVVGEVLETVQHPDADKLRVCQVSNGSETFQVVCGAPNVRPGLKIPFAMIGAQLPGDFKIKKAKLRGIESNGMLCSETELQVGSDDSGLMELAGDAPVGTDFREYLGLDDASIEIGLTPNRGDCLSIAGLAREVGAIYGSLVSPVQFTVAPLHH

SEQ ID NO: 188199 - protein, 241 aa, Unknown
  Bacterial polypetide isolated from the Sargasso Sea
MNSQEKINTKLQEIEIKEINSKLENEKVDVTLPERDINQGKIHPVSQVIDEISSIFSEIGFSVEEGPDVENEHYNFTALNTPYDHPARDMHDTFYLDNNKELLLRTHTSPVQVRTMLKGKPPFKIIAPGRTYRSDSDQTHSPMFHQVEGLHIDKDINMGHLKGCLNYFIKSFFEVDKIKMRFRPSHFPFTEPSAEVDIGYEIKDGKIVIGEGDKWLEILGCGMVHPNVLKNVNVNPDKYQG

SEQ ID NO: 188200 - protein, 182 aa, Unknown
  Bacterial polypetide isolated from the Sargasso Sea
PVQVRTMLNGKPPFKIIAPGRTYRSDSDQTHSPMFHQVEGLHIDKDINMGHLKGCLNYFIKSFFEVDKIKMRFRPSHFPFTEPSAEVDIGYEIKNGKIVIGEGDKWLEILGCGMVHPNVLKNVKVNPDKYQGYAFGIGIDRLGMLKYGINDLRAFFETDYRWLKHFGFDPLDVPSNYRGLSR

SEQ ID NO: 188201 - protein, 242 aa, Unknown
  Bacterial polypetide isolated from the Sargasso Sea
MDKYKDIHSSVSLKKENVNDLESLESFRQEFLGKKGSISLAMKELGKLEPDERKKHAEELNIIKDTVLTFVKVKTEEINNKILDKQIKTESLDVTLPVSSSSGTIHPITQVIDEVIAIFADLDFCVAEGPEIETDYNNFTALNTSEHHPARQMHDTFYVNSETDGMQNVMRTHTSPVQIRSMLSQEPPIRLIAPGKTFRCDNDQTHTPMFHQVEGLVIDKESNMGHLKGCLEIFLKSFFETE

SEQ ID NO: 188202 - protein, 167 aa, Unknown
  Bacterial polypetide isolated from the Sargasso Sea
IIAPGRTYRSDSDQTHSPMFHQVEGLHIDKEINMGHLKGCLNYFIKEFFEVDKIRMRFRPSHFPFTEPSAEVDIGYELKDGKIVIGEGDKWLEILGCGMVHPNVLQNVNVNPDKYQGYAFGIGIDRLGMLKYGINDLRAFFETDYRWLNHFGFDPLDVPSNYRGLSR

SEQ ID NO: 188203 - protein, 267 aa, Unknown
  Bacterial polypetide isolated from the Sargasso Sea
SICQVDIGNSRNLQIICGARNIKPNIYVYVATVGAKLNAVDLTIKRSEIRGVMSEGMICSLQELGLEDSSEGIEIIDEEFALKHELGTPGSDLLQLNDFIYDLAITANRPDGMSVIGIAREISALLESTLNFPELNHKYNIHLLKGIKLCPEAIESNCIYTISCIDGVNGEKLSPNWLKDRIEKSGIKSINLLVDLTNYILLEQGQPLHAFDKDKLSNLIGKEVSPEDFSVRKGKDYESLICLDGKEYDLNDNITVITCCDKPVAIA

SEQ ID NO: 188204 - protein, 203 aa, Unknown
  Bacterial polypetide isolated from the Sargasso Sea
MSDIKKIKNDYIQKLDEKLSFENINKIRSELFGKSGIISLEFKKLGSVSAIERKKFASELNTLKDELTEKINNKIKLIEIEEINLKLKTEKVDVTLPERGFDSGKIHPVSQVIDEISSIFSEIGFSVEEGPDIENEYNNFTALNTPDNHPARDMHDTFYLDNKKEFLLRTHTSPVQVRTMLKGKPPFKIIAPGRTYRSDSDQT

SEQ ID NO: 188205 - protein, 285 aa, Unknown
  Bacterial polypetide isolated from the Sargasso Sea
KNLDQELKKVVGSLGNKTRIELEEQLKTSKSRILGTKDSNKPSHDYSLPSRDISIGKLHPVTLTLREIKKAFVSLGFQVEEGPEIELDKYNFDMLNIPEDHPARDMWDTMWIDEKINNNGEKMLLRTHTSPVQARIMENQDPPIRVIVPGKCYRYEATDSTHEWHFYQVEGLAVDKNLTFSDLKGTLYEFAKKMFGSETKIRFRCDYFPFVEPGVDMSIYWEGKWLEILGAGMVHPKVFEKVGYEDKDLSGFAFGMGPERIAMIKHNIDDIRLFYSNDLRFLEQF

SEQ ID NO: 188206 - protein, 109 aa, Unknown
  Bacterial polypetide isolated from the Sargasso Sea
THTSPVQIRTMLKDKPPFKIIAPGRTYRSDSDQTHAPMFHQVEGLHIDTNINMGHLKGCLNYFIKEFFEVEKIKMRFRPSHFPFTEPSAEVDIGYEIKDGKIIIGEGDK

SEQ ID NO: 188207 - protein, 207 aa, Unknown
  Bacterial polypetide isolated from the Sargasso Sea
MSLSVDTVDITEKIKSCKTLQDVEVIRLEYLGKKGLIPSQMKLLGELSIEQKKIKGQELNNLKTLIEEVINDQKILIENTNIEKKLKTENIDVTLPHSEEVKGKVHPISQTIFNIIEIFGNLNYSVEAGPDIESDFNNFSALNIPPHHPAREMQDTFYINSNNEEDNVLRTHTSPVQVRTMLKSKPPIKIIVPGRTYRSDSDSTHTP

SEQ ID NO: 188208 - protein, 294 aa, Unknown
  Bacterial polypetide isolated from the Sargasso Sea
MAEKLNKIKEYVLEIIDSKTEEFNNEELEKKLNSETLDITLSTPKSYGTIHPISQVIEEVITIFGDLDFFVAEGPEVETDYNNFTALNTSEHHPARQMHDTFYVETETDGMPNVLRTHTSPVQIRSMLKQKPPIRLIAPGKTFRCDNDQTHSPMFHQVEGLVIDQESNMSHLKGCLEIFLKTFFETDKLNMRFRPSHFPFTEPSAEVDIGYTKKGNQLIIGEGEEWLEILGCGMVHPNVLENVNINSNEYQGYAFGMGIERLAMLKYGISDLRTFFDSDLRWNKHYGFSPLNIP

SEQ ID NO: 188209 - protein, 201 aa, Unknown
  Bacterial polypetide isolated from the Sargasso Sea
EMQDTFYIEDNGDKNVLRTHTSPVQVRTMLNKKPPIKIIVPGRTYRSDSDATHAPMFHQVEGLVVDTSSTMVDLKSTLVSFLEEFFEVKNLQYRFRPSYFPFTEPSAEMDVAYTKVNNKIKIGEGDKWLEILGCGMVNPVVLDNCNIDSKQYQGFAFGMGIERLSMLKYGITDLRSFFDPNYRWLDHYGFSILDNQTRSGL

SEQ ID NO: 188210 - protein, 299 aa, Unknown
  Bacterial polypetide isolated from the Sargasso Sea
ASQLNSLKINVTEILKKKLADFNQLEINKKIKNEKIDVTLPGRSFFEGKIHPVSQVIDEVTSIFSEIGFSVEEGPDVENEYYNFSALNTPENHPARDMHDTFYLDHSKNLLLRTHTSPVQIRTMLKSKPPFKIIAPGRTYRHDSDQTHSPMFHQLEGLHIDTNINMGHLKGCLYYFVKKFFEVEKVKIRFRPSHFPFTEPSAEVDIGYKIQDGKIKIGEGDKWLEILGCGMVHPNVLKNVKVNPKQYQGYAFGVGIDRLAMLKYGINDLRAFFESDIRWLEFYGFDPLDVPTNYRGLSR

SEQ ID NO: 188211 - protein, 281 aa, Unknown
  Bacterial polypetide isolated from the Sargasso Sea
CSESELNLSDESEGIIELKNNEKKIGKSYFKSSSQNVIDISITPNRADCLGVRGIARDLSSAGVGKLIQTKRKKIKQNTKHQIKTSITKEKNQGCDIFGSCYIKNITNKESPEWLKNKLIALGLKPISAVVDITNYVMFDLNRPLHAYDADKINKEIIVRNAKEGEMFEALDNKKYKLSKDMCVISDKSGVLGLGGIIGGITTSTEFDTRNILLEAAYFKPSSIRQTAKKLNINTDAKYRFERGVDPNSVKDGLELATELILKICGGEASKFQISGKTSKK

SEQ ID NO: 188212 - protein, 145 aa, Unknown
  Bacterial polypetide isolated from the Sargasso Sea
LEGLHIDKDITLGHLKGCLDYFVKEFFEVKKIQMRFRPSHFPFTEPSAEVDIGYRLENGRIIVGEGDKWLEILGCGMVHPNVLKNAKVDPKKFQGFAFGMGIDRLAMLKYGINDLRSFFEADFRWLNYFGFDPLDVPTSYRGLSR

SEQ ID NO: 188213 - protein, 240 aa, Unknown
  Bacterial polypetide isolated from the Sargasso Sea
IKSSKSFEDLEKLRLYYLGKKGLIPEALKRLGSLSIEEKKSKGQELNIIKKEIEVAIKNQRTDIENIEISNRINLESIDVTLPPNISEKGKIHPISQTIFNIIEIFGNLNYGVETGPDIETDFNNFTALNIPEHHPAREMQDTFYVQDNGDKNVLRTHTSPAQVRTMLNTKPPIKIIVPGRTYRSDSDATHAPMFHQVEGLVVDTSSTMVDLKSTLVSFLEEFFEVKNLQYRFRPSYFPF

SEQ ID NO: 188214 - protein, 313 aa, Unknown
  Bacterial polypetide isolated from the Sargasso Sea
DAIRVNYLGKKGSITALLKSLGQLPEQERPAAGESINLAKRKVQEAIELRKASLLDENLAEQLESESLDVSLPGRRQNAGGLHPITTTINRITDIFSSAGYEIAIGPEIEDDYHNFEALNIPAHHPARAMHDTFYVNNNHVLRTHTSPVQIRVMEAGTPPFKMICPGKVYRCDSDLTHTPMFHQVEGLVVDPNVTFADLKGTVEGFLHAFFEEEMPVRFRPSYFPFTEPSAEADMGCVACKGQGCRICSHTGWLEVMGCGMVHPKVLEMSGVDTSKFKGFAFGMGVERLAMLRYEVSDLRTYFENDIRFLKPI

SEQ ID NO: 188215 - protein, 280 aa, Unknown
  Bacterial polypetide isolated from the Sargasso Sea
ARKGLITINAPPGAVIPKTKFELKVAKIRGVESRGMLCSESELNLSNESEGIIELKNKEKEVGKSYFKSSSQKVIDISITPNRADCLGVRGIARDLSSTGVGKLIQTKRKKIKQNIKHQIKTSITKEKNQGCDIFGSCYIKNISNKESPEWLKNKLIALGLKPISAVVDITNYVMFDLNRPLHAYDADKINKEIIVRNAKEGEIFQALDNKKYKLKKDMCVISDKSGVLGLGGIIGGMTTSTELDTKNILLEAAYFSPSSIRKTARALNINTDAKYRFER

SEQ ID NO: 188216 - protein, 203 aa, Unknown
  Bacterial polypetide isolated from the Sargasso Sea
MAREEKDSFYLTNQKSKVKYLMRTHTSPVQIRTMLNNKPPLAIIVPGKVYRPDSDQTHSPIFHQIEGLFLAPNIHMGHLKYTLLNLCKQFFQIKNLKLRFRPSYFPFTEPSAEVDIGYNTKEKKIELGGNKNWLEVLGSGMIHQNILINCNIDPEKYQGFAFGIGVERFAMLKYGISDLREFYESNLRWIYNHGFNIINSISK

SEQ ID NO: 188217 - protein, 198 aa, Unknown
  Bacterial polypetide isolated from the Sargasso Sea
FYLDEKKQKLLRTHTSPVQIRTMLKDKPPFKIIAPGRAYRSDSDQTHAPMFHQVEGLHIDKDINMGHLKGCLNYFIKEFFEVDKIKMRFRPSHFPFTEPSAEVDIGYEIKDGKIIIGEGDQWLEILGCGMVHPNVLKNVKVDPTKFQGYAFGIGIDRLAMLKYGINDLRAFFDCDYRWLNHFGFDPLDVPTNYRGLSR

SEQ ID NO: 188218 - protein, 271 aa, Unknown
  Bacterial polypetide isolated from the Sargasso Sea
MPASDRPLFGQEINKAKNVFLTNLSSAKNQLEGKLLVDSLNVKPIDVSLAGSNSSKGSRHPISLVRSKIEQIFKNSGYKIKEGPEIEDDYHNFTALNVPENHPARAMHDTFYFEGKKLLRTHTSPVQIRSMIADGAPIRIIAPGKCYRCDSDLTHTPMFHQVEGLVIDENISFANLKAVLHEFVESFFEREVKLRFRPSYFPFTEPSAEVDILWENDEWLEILGCGMVHPNVLTNSAIDPEKYSGYAFGMGVERLAMLYYGVRDLRTFYDN

SEQ ID NO: 188219 - protein, 271 aa, Unknown
  Bacterial polypetide isolated from the Sargasso Sea
KGDLSIILKTMGQLSATDRPIIGQKANLIKINLQDLITERKNKLNSEALDKKIKQEKIDVTIPSIGTPPGNKHPLISTQDEIIDIFCGLGYSVESGPEIETDFYNFESLNIPKNHPARDMQDTFYLDENRLLRTHTSPVQIRYLEKNPPPVRIIAPGRVYRRDAVDATHSPVFNQVEVLCIDQDINFSHLRGTVLTFLKTFFGDIPVRFRASYFPFTEPSAEVDVQWKGKWLEVMGCGMVDPKVLEKLGIDSEKWTGFAAGLGVERFCMVR

SEQ ID NO: 188220 - protein, 273 aa, Unknown
  Bacterial polypetide isolated from the Sargasso Sea
GLEVEGIKENSGEMGKFKIAKVLKTEKHPNADKLKVCDVTIGGKEILKVVCGAPNAREGLITIYAPPGAVIPKNNFELKVAKIRGVESKGMLCSESELNLSDESDGIIELKNKEREIGKSYFKKNSQKAIDISITPNRADCLGVRGIARDLASAGVGKLIQTKRKKIKTNTKHQIKISITKEKNQGCDTFGSCYIKNITNRESPEWLKEKLIALGLKPISAVVDVTNYVMFDLNRPLHAYDADKINKEIIVRNAKEGELFKALDNKEYKLQKD

SEQ ID NO: 188221 - protein, 205 aa, Unknown
  Bacterial polypetide isolated from the Sargasso Sea
MGLGYSVAEGPEVERDHYNFTALNIPEDHPARDMQDTFYLGGDLLMRTHTSPVQIRHLEENPPPVRIVAPGRVYRRDAVDATHSPVFHQVEVLAIDEGLDFSHLRGTVMAFLKAFFGDLPVRFRASYFPFTEPSAEVDVQWRGRWLEVMGCGMVDPAVLEGLGLDPERYSGFAAGLGVERFCMVRHGIDDIRRLYTSDLRFLEQF

SEQ ID NO: 188222 - protein, 76 aa, Unknown
  Bacterial polypetide isolated from the Sargasso Sea
LEILGCGMVHPNVLKNVKVNPDKFQGYAFGIGIDRLAMLKYGIKDLRAFFECDYRWLNHFGFDPLDVPTNYRGLSR

SEQ ID NO: 188223 - protein, 186 aa, Unknown
  Bacterial polypetide isolated from the Sargasso Sea
FESLNIPKNHPARDMQDTFYLDESRLLRTHTSPVQIRYLEENPPPVRIIAPGRVYRRDAVDATHSPVFNQVEVLCIDQDINFSHLRGTVLTFLKTFFGDIPVRFRASYFPFTEPSAEVDVQWKGKWLEVMGCGMVDPKVLEKLGIDSEKWTGFAAGLGVERFCMVRHQIDDIRKFYTNDLRFLEQF

SEQ ID NO: 188224 - protein, 143 aa, Unknown
  Bacterial polypetide isolated from the Sargasso Sea
GLHIDKNINMGHLKGCLNYFIKEFFEVDKIKMRFRPSHFPFTEPSAEVDIGYEIKDGKIIIGEGNQWLEILGCGMVHPNVLKNVKVDPIKYQGYAFGIGIDRLAMLKYGINDLRAFFDTDYRWLNHFGFDPLDVPTNYRGLSR

SEQ ID NO: 188225 - protein, 206 aa, Unknown
  Bacterial polypetide isolated from the Sargasso Sea
PARDMHDTFYLDNKKELLLRTHTSPVQVRTMLKGKPPFKIIAPGRTYRSDSDQTHSPMFHQVEGLHIDKYINMGHLKGCLNYFIKEFFEIDKIRMRFRPSHFPFTEPSAEVDIGYELKDGKIIIGEGDKWLEVLGCGMVHPNVLKNVNVNPDKYQGYAFGIGIDRLAMLKYGINDLRAFFETDFRWLSHFGFDPLDVPSNYRGLSR

SEQ ID NO: 188226 - protein, 209 aa, Unknown
  Bacterial polypetide isolated from the Sargasso Sea
KDYYNFSALNIPESHPARDMQDTFFIKGSSDTVLRTHTSNTQIHAMLSEKPPLRFVAPGRVYRVDSDATHTPMFHQIECVVVDEGISFADLKGIIQTFTRELFGGEGRTRFRPSFFPFVEPGAEVDAECFFCKGSGCRVCKKTGWLEIGGCGMIHPNVFEACGIDSEKYTGFAFGFGLDRMAMLYYGVQDLRILFEGDSAFQSQFSIFS

SEQ ID NO: 188227 - protein, 184 aa, Unknown
  Bacterial polypetide isolated from the Sargasso Sea
LNIPSNHPARAMHDTFYFNSEFLLRTHTSPIQIRSMEKEGVPIRVIAPGKVYRRDSDITHTPMFHQIEGLVIDKGINFSHLKGILHQFIDTFFEENTEVRFRPSYFPFTEPSAEVDILSKEKNWLEILGCGMVHPKVLENLGINTEIYSGYAFGMGVERLAMLKYGIKDIRSFYENDFNFLNQF

SEQ ID NO: 188228 - protein, 235 aa, Unknown
  Bacterial polypetide isolated from the Sargasso Sea
ADGPDIEDDWHNFTALNIPPEHPARQMHDTFYIEKRDNKKTSDSIDVLRTHTSPVQVRTMISSIPPINIIVPGRTYRSDSDQTHTPMFHQVEGLVIDEKSHMGHLKGCLVEFVKRFFNLDEVNYRFRPSYFPFTEPSAEMDIGCIREGNKIVLKGDQDWLEILGCGMVNPIVLENCGVDSNKYQGFAFGVGIDRIAMLKYGMPDLRSFFESDLRWLRHYGFSQFDFPPNARKGSF

SEQ ID NO: 188229 - protein, 240 aa, Unknown
  Bacterial polypetide isolated from the Sargasso Sea
MVDLRELIQKVTKAQDKLELQNLKSQFLGKNSQINQEFKKIGSLPEEERKTRAASLNNEKQKITEAISNRLKELERSEISKKLQKDKVDVTLPARERPNGKIHPVSQVIDEITSIFSEIGFSVAEGPDVETEYNNFTALNTPADHPARDMHDTFYLDGNKKVLLRTHTSPVQIRAMLSDKPPFKIIVPGRTYRCDSDQTHAPMFHQLEGLHIDKDITMGHLKGCLDYFIKEFFEVKKIRM

SEQ ID NO: 188230 - protein, 100 aa, Unknown
  Bacterial polypetide isolated from the Sargasso Sea
PSAEVDIGYRLENGRIIVGEGDKWLEILGCGMVHPNVLINAKVDPKKFQGFAFGMGIDRLAMLKYGINDLRSFFEADYRWLNYFGFDPLDIPTNYRGLSR

SEQ ID NO: 188231 - protein, 299 aa, Unknown
  Bacterial polypetide isolated from the Sargasso Sea
SRITSTPEDLAEKLSIGGFEVESLEDCSQNVNGVVLGKVLSVLKHEGSEKLSICQVDIGTSKNLQIICGARNIKPNIYVYVATVGAKLNAVDLTIKRSEIRGVMSEGMICSLQELGLEDSSEGIEIIDEDLALKHELGTQASDLLQLNDFIYDLAITANRPDGMSVIGIAREISALLESTLNFPELHHKYKIHLLKGMNFCPEAIDSNCIYTISFIDGVNGDKLSPKWLKDRIEKSGIKSINLLVDLTNYILLEQGQPLHAFDKEKLSNLIGKEVSPEDFSVRKAKDNESLVCLDGKKY

SEQ ID NO: 188232 - protein, 266 aa, Unknown
  Bacterial polypetide isolated from the Sargasso Sea
MLSSERKNLSNLSNDDKKIYGETLNNVNNSIISNIKKAKEEFINKKYTSLESEENDDITIDWYAKTGTHRHILSQVMDEVVNIFGSIGYKVAYGPEVETSWHNFDALNTPDWHPARYESDTLYIDNDLETLLRTQTSTVQIRHMEENEPPVYIVAPGRVFRSDQLDATHSPVFHQLEGLAVDKNLKFTDLKGTLEYFVKQFFGEDVETKFIPHFFPFTEPSAEVLVKWNNGEWLEILGCGMVDPNVLNQVGYSDEYQGFAWGVGIE

SEQ ID NO: 188233 - protein, 267 aa, Unknown
  Bacterial polypetide isolated from the Sargasso Sea
SEKIDVTLPIRLYQQGKIHPVSQVIDEISSIFSEIGFSVAEGPDVETEYNNFTALNTPDDHPARDMHDTFYLDKNKKLLLRTHTSPVQIRAMLDGKAPFKIIVPGRTYRCDSDQTHAPMFHQLEGLHIDKDITMGHLKGCLDYFIKEFFEVKNVKMRFRPSHFPFTEPSAEVDIGYKIVNGKIVIGEGDKWLEILGCGMVHPNVLRNAKVDPKKYQGFAFGMGIDRLAMLKYGINDLRAFFETDYRWLSHFGFDPLDVPTNYRGLSK

SEQ ID NO: 188234 - protein, 237 aa, Unknown
  Bacterial polypetide isolated from the Sargasso Sea
MSDLDKISSVFNAKIDAVKTKDDLQNIKTEFFGKNGQITLQFKSLGSLDPEKRKEFASNLNKIKDDITHQLEQKNIEIETIEINEKLKNEKVDVTLPIRPERQGKIHPVSQVIDEISSIFSEIGFSVAEGPDVETEYNNFTALNTPEEHPARDMHDTFYLEENKKLLLRTHTSPVQIRTMLSSKPPFKIIVPGRTYRCDSDQTHAPMFHQLEGLHIDKGITMGHLKGCLDYFIKEFF

SEQ ID NO: 188235 - protein, 267 aa, Unknown
  Bacterial polypetide isolated from the Sargasso Sea
MEEKLKSVKNDFLADVDAFQKQGIDHTSLHQKYLARNGLVADLFKMLGKESVQDRPRYGQLLNELKNNITSKIESFSTDFEDLVSLQDFDISLPGREYSIGSMHILEQTLNEIKRIFNDIGFCVEYGPEVDDDYHNFGALNFPEHHPARDMQDTFFINKDIVLRTHTSNVQIHLMEENEPPLRFIVPGRVYRNEAISYKSYCLFHQVEGLYVDEKVSFGQLKGCLEYFVKRMFGEKCKMRWRPSYFPFTEPSAEVDIWDDQREQWME

SEQ ID NO: 188236 - protein, 232 aa, Unknown
  Bacterial polypetide isolated from the Sargasso Sea
MELNQSSGSFHPITTTLKEISLLLQDLGFTQASGPEIESEKFNFDMLNIKESHPARQMHDTFYVNNKSGVLRTHTSPVQIRAMLENKPPFAFFSGGKVYRKDDDSTHLPMFHQIEGLYVNQNVSFVELKDLIFKIVHSLFGENACLRFRPSFFPFTEPSAEVDILFEDQNKWLEILGCGIVNPKVLENCNIDPDKFQGLAFGLGIERIAMLKYGVNDIREFYKSNLDFISQF

SEQ ID NO: 188237 - protein, 180 aa, Unknown
  Bacterial polypetide isolated from the Sargasso Sea
MSDIKKIKDEYLKKLDNNLDIESVNQIKTELFGKNGQISNSFKTLGSLPNDERKKFASDLNSIKDELQEKINSKLQEIEIKEINSKLENEKLDVTLPEREIKQGKIHPVSQVIDEISSIFSEIGFSVEEGPDVENEYYNFTALNTPDNHPARDMHDTFYLNNNKEILLRTHTSPVQVRTM

SEQ ID NO: 188238 - protein, 266 aa, Unknown
  Bacterial polypetide isolated from the Sargasso Sea
MSDIKKIKDEYLEKLNQDIDLNNINQIKTELFGKNGKISNEFKKMGSIPSDERKKFASDLNTIKEEFQNIISNKIQNIEIKEINLKLQNEKVDVTLPERSFNQGKIHPVSQVIDEISSIFSEIGFSVEDGPDVENEHNNFTALNTPDNHPARDMHDTFYLDKNKKYLLRTHTSPVQVRTMLNGKPPFKIIAPGRTYRSDSDQTHSPMFHQVEGLHIDKNITMAHLKGCLNYFIKEYFEVKKIKMRFRPSHFPFTEPSAEVDIGYEI

SEQ ID NO: 188239 - protein, 300 aa, Unknown
  Bacterial polypetide isolated from the Sargasso Sea
SGKKGIITELFKKIGKLDQNQRKDFASKLNYLKTKVTELLENRLESFDQLEINKKLKNEKIDVTLPGRTYFTGKIHPVSQVIDEVTSIFSEIGFSVEEGPDVENEYYNFSALNTPENHPARDMHDTFYLNKSKDLLLRTHTSPVQIRTMLKSKPPFKIIAPGRTYRHDSDQTHSPMFHQLEGLHIDQNINMGHLKGCLYYFLKKFFEVEKVKIRFRPSHFPFTEPSAEVDIGYKIQDGKIKIGEGDKWLEILGCGMVHPQVLKNAKVNPKQYQGYAFGVGIDRLAMLKYGINDLRAFFES

SEQ ID NO: 188240 - protein, 271 aa, Unknown
  Bacterial polypetide isolated from the Sargasso Sea
NTENNIEKVNNIKSELFGKNGIISNEFKKLGSISVEERKKLASDLNNIKDELQNKISIKIQEIETKEINLKLEKEKIDVTLPERNIEIGKIHPVSQVIDEISSIFSEIGFSVEEGPDVENEYNNFTALNTPDNHPARDMHDTFYLDNNKELLLRTHTSPVQVRTMLKGKPPFKIIAPGRTYRSDSDQTHAPMFHQVEGLHIDKNINMGHLKGCLNYFIKEFFEVDKIKMRFRPSHFPFTEPSAEVDIGYEINNGKIVIGEGNKWLEILGCG

SEQ ID NO: 188241 - protein, 177 aa, Unknown
  Bacterial polypetide isolated from the Sargasso Sea
DMQDTFFINKDIVLRTHTSNVQIHLMEENDPPLRFIVPGRVYRNEAISYKSYCLFHQVEGLYVDKNVSFGQLKGCLEYFVKKMFGEKCKMRWRPSYFPFTEPSAEVDIWDEQRNQWMEILGCGMVDPEVFNNVGYDSKIWHGYAFGMGVERIAMLKHNIDDIRLFYNGDIRFLRQFK

SEQ ID NO: 188242 - protein, 202 aa, Unknown
  Bacterial polypetide isolated from the Sargasso Sea
MHDTFYLDNNKKILLRTHTSPVQIRTMLNGKPPFKIIVPGRTYRCDSDQTHAPMFHQLEGLHIDKDITMGHLKGCLDYFIKEFFEVKKIKMRFRPSHFPFTEPSAEVDIGYRLENGRIIVGEGDKWLEILGCGMVHPNVLKNVKVDTKKFQGYAFGMGIDRLAMLKYGINDLRSFFEADFRWLNYFGFDPLDVPTNYRGLSR

SEQ ID NO: 188243 - protein, 80 aa, Unknown
  Bacterial polypetide isolated from the Sargasso Sea
KEINVGDLGCGMVHPNVLKNTKVDPSKYQGFAFGMGIDRLAMLKYGINDLRAFFETDYRWLNHFGFDPLDVPTNYRGLSR

SEQ ID NO: 188244 - protein, 78 aa, Unknown
  Bacterial polypetide isolated from the Sargasso Sea
QWLEILGCGMVHPNVLKNVKVNPSKYQGYAFGIGIDRLAMLKYGINDLRAFFETDYRWLSHFGFDPLDVPSSYRGLSR

SEQ ID NO: 188245 - protein, 290 aa, Unknown
  Bacterial polypetide isolated from the Sargasso Sea
MSDIIKIKEEYLVKLKGNLDLNTVNQLKSELFGKNGKISNEFKKMSSISANERKKFASDLNSIKDELQSLIEKKIQDIEINEINLKLKNEKVDVTLPERSFNLGKIHPVSQVIDEISSIFSEIGFSVEEGPDVENEYNNFTALNTPDYHPARDMHDTFYLDNNKEYLLRTHTSPVQVRTMLKGKPPFKIIAPGRTYRSDSDQTHAPMFHQVEGLHIDKKINMGHLKGCLNYFIKEFFEIDKIKMRFRPSHFPFTEPSAEVDIGYEIKEGKIIIGEGDKWLEILGCGMVTQ

SEQ ID NO: 188246 - protein, 249 aa, Unknown
  Bacterial polypetide isolated from the Sargasso Sea
HPVSQVIDEISSIFSEIGFSVAEGPDVETEYNNFTALNTPEDHPARDMHDTFYLDKNKKILLRTHTSPVQIRTMLSGKPPFKIIVPGRTYRCDSDQTHAPMFHQLEGLHIDKDITMGHLKGCLDYFIKEFFEVKKIQMRFRPSHFPFTEPSAEVDIGYRLENGRIIVGEGDKWLEILGCGMVHPNVLKNSKVDSKKFQGFAFGMGIDRLAMLKYGINDLRSFFEADYRWINYFGFDPLDVPTSYRGLSR

SEQ ID NO: 188247 - protein, 201 aa, Unknown
  Bacterial polypetide isolated from the Sargasso Sea
MKFSEKWLREIVDPAIDSKKLSHQLTMAGLEVDSVTKACPEFDGLFVAEVRSVKKHPNADKLQICEVDCSDKDLYTIVCGAPNVKEGMRTILAKVGAQLSGKPKLKSIKLKGVESFGMLCSASEIGLGDDSDGIIELSLTEPIGTPLKNIIDIMDNIIDLSLTPNRGDCLSIYGIAREVMALNKIDKGNFNTTQTNLPKIT

SEQ ID NO: 188248 - protein, 282 aa, Unknown
  Bacterial polypetide isolated from the Sargasso Sea
KLQEIETKEINSKLENEKVDVTLPEREFSRGKIHPVSQVIDEISSIFSEIGFSVEEGPDIENQHNNFTALNTPDNHPARDMHDTFYLDNNKELLLRTHTSPVQVRTMLNGKPPFKIIAPGRTYRSDSDQTHSPMFHQVEGLHIDKDINMGHLKGCLNYFIKSFFEVDKIKMRFRPSHFPFTEPSAEVDIGYKMKDGKIVIGEGDKWLEILGCGMVHPNVLKNVKVNPDIYQGYAFGIGIDRLGMLKYGINDLRAFFETDYRWLNHFGFDPLDVPSNYRGLSR

SEQ ID NO: 188249 - protein, 267 aa, Unknown
  Bacterial polypetide isolated from the Sargasso Sea
MICSAGELGLGEGLDPAGGILELPADAPVGKDFREYYDLDDHVVDVELTPNRGDCACLLGIARELAVANELSISSPRGKGVSETTEDVVSVTVKAEQACPRYALRVMKNVNLSALTPLWMAERLRRSGLRAINPVVDVLNYVMLELGQPMHAFDRSKVHGAVMVRLADPKERLKLLDEHIADLDEETLVIADLKGPLAVAGIMGGLDSGVTTDTRDIVLEAAFFDPIGIRRSAASLGIQSDSSYRFERGVDPELPLVAMARASELLQ

SEQ ID NO: 188250 - protein, 211 aa, Unknown
  Bacterial polypetide isolated from the Sargasso Sea
RVINNVVDYTNYVLHDIGQPLHAFDRDKLYGTISVRFAKDNEILKTLDEQERNLSSNDLIITDDDKPIALAGVMGGYDTEVTNSTKNLLIESAYFDKVSIMKTSRRLNLISDASIRFERGIDFNLQQQGLQRFVNLFESDQDINYSSIADSSKNGISYDKISFQKSEIEQILGVELDDEFIKNTLLKLNIDSQISENKISFTSPSWRYDLE

SEQ ID NO: 188251 - protein, 300 aa, Unknown
  Bacterial polypetide isolated from the Sargasso Sea
KRRITKLLSELGKLDQDERKKLGPEINDLKNKVLEKIQEKKEFFLDQVLNKKLLEEKIDVTLPVKSSQNTNGRIHPVSQVLDEITEIFGSLGYEIADGPDIETEYYNFNALNIPESHPARQMHDTFYFDEFDKDQGQSVLRTHTSPVQVRTMEEGEPPFRFISPGRTYRCDSDQTHTPMFHQIEGLSVDKETNLGHLKWTLETFLSSFFEIKNTKIQMRPSYFPFTEPSLEIDVLCDRSGPVLKIGEGSDWLEVAGAGMVHPNVLKSANIDSDIYQGFAFGFGLDRLAQLKYGIPDLRTF

SEQ ID NO: 188252 - protein, 253 aa, Unknown
  Bacterial polypetide isolated from the Sargasso Sea
IEEKHPVSQVIDEISSIFSEIGFSVEEGPDIENEHYNFTALNTPDNHPARDMHDTFYLDNNKELLLRTHTSPVQVRTMLNGKPPFKIIAPGRTYRSDSDQTHSPMFHQVEGLHIDKDINMGHLKGCLNYFIKSFFEVDKIKMRFRPSHFPFTEPSAEVDIGYELKNGKIVIGEGDKWLEILGCGMVHPNVLKNVKVNPDKYQGYAFGIGIDRLGMLKYGINDLRAFFETDYRWLNHFGFDPLDVPSNYRGLSR

SEQ ID NO: 188253 - protein, 286 aa, Unknown
  Bacterial polypetide isolated from the Sargasso Sea
KNGLLNSEFKKLGSLSPEDKKKVASEINNTKQELLKLFHNKVLKLANSEIDEQVKKEKDDVTLPEKDFRIGKIHPVSQVIDEISSIFSEIGFSVEEGPDVESEYYNFTSLNTPENHPAKDMHDTFYLDENMKTLLRTHTSPVQVRTMLKGKPPFKIIAPGRTYRSDSDQTHTPMFHQLEGLHIDKNINMGHLKGCLNYFVKEFFEVDKIKMRFRPSHFPFTEPSAEVDIGYRIEKNKIVIGEGDRWLEILGCGMVHPNVLINSKVDPKKYQGFAFGIGIDRLAMLK

SEQ ID NO: 188254 - protein, 216 aa, Unknown
  Bacterial polypetide isolated from the Sargasso Sea
NDRKIRASSLNNEKQKITEAIYNKLKELEILEINKKLQKNKVDVTLPARERPNGKIHPVSQVIDEISSIFSEIGFSVAEGPDVESEYNNFTALNTPEDHPARDMHDTFYLDKNKKILLRTHTSPVQIRTMLSGKAPFKIIVPGRTYRCDSDQTHAPMFHQLEGLHIDKDITMGHLKGCLDYFVKEFFEVKKIRMRFRPSHFPFTEPSAEVDIGYRH

SEQ ID NO: 188255 - protein, 150 aa, Unknown
  Bacterial polypetide isolated from the Sargasso Sea
PMFHQLEGLHIDKDITMGHLKGCLDYFVKEFFEVKKIRMRFRPSHFPFTEPSAEVDIGYKLENGRIIVGEGDKWLEILGCGMVHPNVLKNAKVDPNKFQGFAFGMGIDRLAMLKYGINDLRSFFESDYRWLNYFGFDPLDVPTNYRGLSR

SEQ ID NO: 188256 - protein, 279 aa, Unknown
  Bacterial polypetide isolated from the Sargasso Sea
EIDTNEINEKLKNEKVDVTLPIRPKRQGKIHPVSQVIDEISSIFSEIGFSVAEGPDVESEYNNFTALNTPEEHPARDMHDTFYLEENKKLLLRTHTSPVQIRTMLSSKPPFKIIVPGRTYRCDSDQTHAPMFHQLEGLHIDKGITMGHLKGCLDYFIKEFFEVKNVKMRFRPSHFPFTEPSAEVDIGYKIEKGKIVIGEGDKWLEVLGCGMVHPNVLKNVKIDLKKYQGFAFGIGIDRLAMLKYGINDLRAFFEADYRWLSHFGFDPLDVPTNYRGLSK

SEQ ID NO: 188257 - protein, 168 aa, Unknown
  Bacterial polypetide isolated from the Sargasso Sea
KIIAPGRTYRSDSDQTHTPMFHQLEGLHIDKNITMSHLKGCLNYFVKEFFEVEKIKMRFRPSHFPFTEPSAEVDIGYRIENNKIVIGEGDKWLEILGCGMVHPNVLKNSKVDPNKYQGFAFGIGIDRLAMLKYGINDLRSFFECDYRWLNYYGFDPLDVPTNYRGLSK

SEQ ID NO: 188258 - protein, 255 aa, Unknown
  Bacterial polypetide isolated from the Sargasso Sea
MIITIPWLKEHLKTSAKENEIIDQLTNIGLEVESVKENSGEMSKFKIAKVLKAEKHPNADKLKVCEVNIGGKEILKVVCGAPNAREGLITIYAPPGAIIPKTNFELKVAKIRGVESKGMLCSESELNLSEESEGIIELKNKEKEIGKSYFKSSSQKAIDISITPNRADCLGVRGIARDLSSTGVGKLISINRKKIKQNTKQQIKTSITKEKNQGCDIFGSCYIKNITNKESPKWLKNKLIALGLKPISAVVDVTN

SEQ ID NO: 188259 - protein, 159 aa, Unknown
  Bacterial polypetide isolated from the Sargasso Sea
RCDSDQTHAPMFHQLEGLHIDKNITMGHLKGCLDYFIKEFFEVKNVKMRFRPSHFPFTEPSAEVDIGYKIENEKIVIGDGDKWLEILGCGMVHPNVLRNAKVDSKKYQGFAFGMGIDRLAMLKYGINDLRAFFETDYRWLSHFGFDPLDVPTNYRGLSK

SEQ ID NO: 188260 - protein, 188 aa, Unknown
  Bacterial polypetide isolated from the Sargasso Sea
MRTHTSPVQVRTMLKGKPPFKIIAPGRTYRSDSDQTHAPMFHQVEGLHIDKNINMGHLKGCLNYFIKEFFEVDKIKMRFRPSHFPFTEPSAEVDIGYEIKNGKIVIGEGDKWLEILGCGMVHPNVLKNVKVNPSKYQGYAFGIGIDRLGMLKYGINDLRAFFETDYRWLSHFGFDPLDVPSNYRGLSR

SEQ ID NO: 188261 - protein, 263 aa, Unknown
  Bacterial polypetide isolated from the Sargasso Sea
RFCAFAFIYGLARETAAITRMRLKSEKLPDLSKLNLPKQSSSPAETSEVDFLKLRIENPNLCPRYSALLVRGITIGPSPFWMQQRLQRSGMRPINNIVDITNYVMLELGQPLHAFDYQALSQRAAGETPEIFVRCAVNGEVMTTLDGEERKLDDQMLMITDEAGLIAIAGVMGGEETEVGNETKDVLLESANFDFLNNRRTSQLLKLKTEASERFGKRLNADGTMTAALRAAELCVSIAGGTLELQAADLYPGKLPDESVELD

SEQ ID NO: 188262 - protein, 192 aa, Unknown
  Bacterial polypetide isolated from the Sargasso Sea
MSTDQINEIKTELFGKNGLISSKFKIIGSIPETDRKKFASYLNQVKDELQNLITSKINEIDGKKINEKLEKEKVDITLPERPFVRGKVHPVSQTIDEISCIFSEIGFSVEEGPDIENEYNNFTALNTPDNHPARDMHDTFYLDENKEVLLRTHTSPVQIRTMLKDKPPFKIIAPGRTYRSDSDQTHAPMFHQ

SEQ ID NO: 188263 - protein, 176 aa, Unknown
  Bacterial polypetide isolated from the Sargasso Sea
MKKGKPPFKIIAPGRTYRSDSDQTHAPMFHQVEGLHIDKNINMGHLKGCLNYFIKEFFEVKKINMRFRPSHFPFTEPSAEVDIGYEIKDGKIVIGDGDKWLEILGCGMVHPNVLRNVKVDPRKYQGYAFGIGIDRLAMLKYGINDLRAFFETDYRWLNHFGFDPLDVPSSYRGLSR

SEQ ID NO: 188264 - protein, 273 aa, Unknown
  Bacterial polypetide isolated from the Sargasso Sea
MWKKELVKVVCGGPNAKDNLLTIYAPPGSVIPKNNMKLEISKIRGETSYGMLCSESELNLSDESEGIIELNQNYKKKIGKSYFESNSDNVIELSITPNRPDCLGIRGIARDLSASGFGKLIENKYIKIKKNGKQNLKVKIEKSKNQACTLFGSCLIKNIKNKESPEWLKKRIISLGLRPISAVVDVTNYVMFDLNRPMHAYDADKINKGIIVRNSKKGEKFKALDNKDYNLDDGMCVISDHEGVLGLGGIIGGTRSGTELNTKNILLESAFFD

SEQ ID NO: 188265 - protein, 365 aa, Unknown
  Bacterial polypetide isolated from the Sargasso Sea
REVAALTGAPLSLPSLQLQPPHQPLDCDQDSAAAFLRGGLYSLTLIKGVDGSRSSSSWLKQRLDRAGINSINAIVDVTNHVMVEQGQPLHAFDADALEALTGKPVTAASFGLRQARSGEAFTGLDERQLILDSKAQVVTCHDLPIALAGVMGSKDSGVSASTNRIWLESAMFSASAVRTTARAVGLRTDASSRFEKGLPVDLTLACSVRAVEMLSQAFDLEVCGRWVSGDVPEVGEAVLLRREALQRLLGPLHTSEGPADLDDASIERCLTALGCSLTATAAGWQVVAPPSRRQDLHREVDLIEEVARLTGFDRFGAHLPDPLVPGALTPRQQADRRLRHLFSAAGLQEITTLSLVGASEQEPER

SEQ ID NO: 188266 - protein, 209 aa, Unknown
  Bacterial polypetide isolated from the Sargasso Sea
ENHPARDMHDTFYLDEKKQKLLRTHTSPVQIRTMLKDKPPFKIIAPGRTYRSDSDQTHSPMFHQVEGLHIDKNINMGHLKGCLNYFIKEFFEVDKIQMRFRPSHFPFTEPSAEVDIGYEMKDGKIEIGEGNQWLEILGCGMVHPNVLKNVKVDPTKFQGYAFGIGIDRLAMLKYGINDLRAFFDCDYRWLNHFGFDPLDVPTNYRGLSR

SEQ ID NO: 188267 - protein, 331 aa, Unknown
  Bacterial polypetide isolated from the Sargasso Sea
KILNHSFLGKNSQINQEFKKLGSLSEEEKKIKASSLNNEKQKITEAINNRFKELEKLEISKKLQKDKVDVTLPARERPNGKIHPVSQVIDEISSIFSEIGFSIAEGPDVETEYNNFTALNTPEDHPARDMHDTFYLDNDKKILLRTHTSPVQVRTMLNSKPPFKIIVPGRTYRCDSDQTHAPMFHQLEGLHIDKDITMGHLKGCLDYFVKEFFEVKKIRMRFRPSHFPFTEPSAEVDIGYKLENGRIIVGEGDKWLEILGCGMVHPNVLKNAKVDPNKFQGFAFGMGIDRLAMLKYGINDLRSFFESDYRWLNYFGFDPLDVPTNYRGLSR

SEQ ID NO: 188268 - protein, 355 aa, Unknown
  Bacterial polypetide isolated from the Sargasso Sea
MSDLKKLKEEFLSKLNSQLNLSEINQIKSDLFGKNGLVSSQFKKIGTMAESERKKFASDLNIVKDELQNLIDVKINKIQNAEINEKLQREKVDITLPERPFVRGKIHPVSQTIDEISSIFSEIGFSVEEGPDVENEYNNFTALNTPDNHPARDMHDTFYLDEKKEKLLRTHTSPVQIRTMLKDKPPFKIIAPGRTYRSDSDQTHSPMFHQVEGLHIDKNINMGHLKGCLNYFIKEFFEVEKIKMRFRPSHFPFTEPSAEVDIGYEIKDGKIIIGEGDQWLEILGCGMVHPNVLKNVKVDPNKFQGYAFGIGIDRLAMLKYGINDLRSFFDCDYRWLNHFGFDPLDVPTNYRGLSR

SEQ ID NO: 188269 - protein, 328 aa, Unknown
  Bacterial polypetide isolated from the Sargasso Sea
MSLSVDSVDIKKKIESCKTFQDVEIIRLEYLGKKGLIPSEMKLLGKLPIDQKKIKGQELNKLKTFIEEAINDQKTLIENNELEKKLKNESIDVTLPHNEETKGKIHPISQTIFSIIEIFGNLNYSVEAGPDIETDFNNFSALNIPPHHPAREMQDTFYVNDINGEDNVLRTHTSPVQVRTMLKSKPPIKIIVPGRTYRSDSDSTHTPMFHQVEGLVVNKNATMADLKSTLILFLKEFFEIDDLKYRFRPSYFPFTEPSAEMDVAYTKKNNVLKIGEGEDWLEILGCGMVNPKVLENCNIDSTVYQGFAFGMGIERLSMLKYGITEYAR

SEQ ID NO: 188270 - protein, 247 aa, Unknown
  Bacterial polypetide isolated from the Sargasso Sea
MEQSALDEQLSKEAIDVTLPLSPDVGSYHPVSLIAQEISNYFKNKGYVLREGPEIESEYFNFSALNIPENHPARDMHDTFYFEDGNLLRTHTSPVQIRSMELESPPLKILCPGKVFRCDSDQTHTPMFHQVEGLVVDKDINFAHLKNEILEFVESFFNDNPKVRFRPSYFPFTEPSVEVDILGKNGWLEIMGCGMVHPNVLKNVGLNPEVYSGFAFGMGIERMTMLRYQISDIRMLFENDLRFVTKG

SEQ ID NO: 188271 - protein, 392 aa, Unknown
  Bacterial polypetide isolated from the Sargasso Sea
MGLEVDQSKKEKNDLLIKLDLTPNRGDCFSLIGIARDVCAVNNLKLKLPKFKKQQQSLDSKKTVSVDKSACSSYLSQIIKLKNKGKTPQYIKKTLKAADIGQVNPIVDITNYVMLHTGQPLHAFDNKKIGKKIYVEFPSKKTRLKLLDGASYEINKDFLTISDEKEVIALAGIMGCANSEVDETTQEIFLESACFEPASIRGNARKLGFQSDASLRFERGVDKEIQEYALNFAAQLYAEIFGGDFSKIFKESKNHKAKKISISKEFIDSRLGTEIPAAKIIKLLKALEFKVESKRNVMELTCPSHRYDIEIKEDIIEEIARIIGYDNLLNKRLKLLASSPEDKSIEKEKLSKDIFVNAGFNEVINYAFVDSSFVQMLGLNNDSIELANPMSS

SEQ ID NO: 188272 - protein, 310 aa, Unknown
  Bacterial polypetide isolated from the Sargasso Sea
AQDAATLDQVRVEFMGKKGKLTDLLKGLGKLSNEERPAAGQKINQAKQVIQQAISAKGEFLRTEELNKKLADEAIDVTLPGRTEKPGNLHPVSRTIARIESFFGELGFSVKTGPEIEDGFHNFDALNIPANHPARADHDTFYFNPDMMLRTQTSGVQIRTMEAEKPPLRIISPGRVYRNDYDQTHTPMFHQVEGLMVDKNVSFTDLKGILHDFLHHFFEESLEIRFRPSYFPFTEPSAEVDVMGKNGQWLEVLGCGMVHPNVLKAVGIDPEEYTGFAFGMGVERLTMLRYGVNDLRAFFENDLRFLKQFN

SEQ ID NO: 188273 - protein, 625 aa, Unknown
  Bacterial polypetide isolated from the Sargasso Sea
PNRGDCMSYLGIARELSGYFNKKLKNKKTNLKPTIANILNADSGKIKECNSYGSVEIENFNVTSSSFEMRYRLTQVGTRIINNVVDITNYILYDIGQPLHAFDRDKLFGTISVRKAKNNEKITTLDSQVRKLDSNDLVITDNDKPIALAGVMGGLETEVSETTTNLLIESAYFDKVSIMKSSRKLNLISDASIRFERGIDYKIQRYGLERFLMELKDNQSINYSEINVDDKGNLDNKKVILKYSEIKKLLGIDLKESFIKKVLKFLMIDSEVSKESVKFTPPSWRYDLDRPVDLIEEFAKHYGFNNFESTLPQGIHKNNKGSYWDLKSYLSSVLTSNNFQEVQTLSFVNNDKNFLFNPEKKYVEIFNAIDQSSKFMRSNLMSSLIDVYKLNYDQNNLSNSYFEINTVFDTSKNKIYEDVPNQNIVLGFLTSSTLSNTDTRLKDQELDLYYVKNILTQLLSSYDLEPITKPGFHQNYSFSIIKNGQIIGHFGQLATETQMTLEFNNEIYLGEIYINKLNLNNLKEINYVPLSQYPFVKFDLSFSVPIDLSAHLLVDEINELLRENENSIEIFDDFQQENSRNLGIRIITRSYDKTYDDNETREILMNISQTLESKFNITLNSSKND

SEQ ID NO: 188274 - protein, 355 aa, Unknown
  Bacterial polypetide isolated from the Sargasso Sea
MSDIKKIKDEYLVKINNNHNLDNLNQIKSELFGKNGIIALEFKKISSISANEKKQFASNLNLIKDELQNALNKGFKTIEAKEINSKLQNEKLDITLPERNFNQGKVHPVSQVIDEISSIFSEIGFSVEEGPDVENEYNNFTALNTPDNHPARDMHDTFYLDKKKEYLLRTHTSPVQVRTMKKGKPPFKIIAPGRTYRSDSDQTHAPMFHQVEGLHIDKNINMGHLKGCLNYFIKEFFEVKKIKMRFRPSHFPFTEPSAEVDIGYEIKDGNIVIGEGDKWLEILGCGMVHPNVLKNVKVDPKKYQGYAFGIGIDRLGMLKYGINDLRAFFETDYRWLNHFGFDPLDVPSNYRGLSR

SEQ ID NO: 188275 - protein, 187 aa, Unknown
  Bacterial polypetide isolated from the Sargasso Sea
MSNQKEFELPKINKNLGTFHPINQMMEYIMNLLIDFGFEIVMGPEIESEEFNFNMLNIKESHPARQMHDTFYVNNKKKLLRTHTSPVQVRGMIKKKPPLAFISGGKVFRKDDDSTHLPMFHQVEGIYVDKNVSFSNLKDLIFKIVYSLFGKDVQIRFRPSYFPFTEPSAEVDILYDGKKWLEILGCG

SEQ ID NO: 188276 - protein, 340 aa, Unknown
  Bacterial polypetide isolated from the Sargasso Sea
MSDLDKISSVFNAKIDTVKTKDDLQNIKTEFFGKNGQITLQFKSLGSLDPEKRKEFASNLNKIKDDLTHQLEQKNLEIETSEINEKLKNEKVDVTLPIRPERQGKIHPVSQVIDEISSIFSEIGFSVAEGPDVETEYNNFTALNTPKEHPARDMHDTFYLEENKKLLLRTHTSPVQIRTMLSSKPPFKIIVPGRTYRCDSDQTHAPMFHQLEGLHIDKGITMGHLKGCLDYFIKEFFEVKNVKMRFRPSHFPFTEPSAEVDIGYKIEKGKIVIGEGDKWLEVLGCGMVHPNVLKNVKIDTKKYQGFAFGIGIDRLAMLKYGINDLRAFFEADYRWLSHFG

SEQ ID NO: 188277 - protein, 240 aa, Unknown
  Bacterial polypetide isolated from the Sargasso Sea
MTAPKDIFLPSLDRELGSIHPINQVKDQLTDLLKSFGFEVAEGPEVETEEYNFDLLNIPASHPAREMHDTFYVDNKKKLLRTHTSPVQVRCMLKDKPPLAFISPGKVYRKDDDSTHLPMFHQIEGLYVDEDVSFAQLKDLMYKICHSLFGQATKLRFRPSYFPFTEPSAEVDVLFGDKWLEILGCGVVNPKVLENCKIDSSKYSGLAFGLGIERIAMLKYGVNDIRDFYKSNLDFLRQFK

SEQ ID NO: 188278 - protein, 328 aa, Unknown
  Bacterial polypetide isolated from the Sargasso Sea
MTLEVKIKSVKSDFLTDLDTFHEGNIDLPSLRQKYIARNGLVADLFKMLSQVSSEDRPKYGQLLNELKNNIASKIDSLSTILEDSDSLGNVDIALPGKDYDIGTIHILEQTLNDIKRIFNDIGFCVEYGPEVDDDYHNFGALNFPEHHPARDMQDTFFIDKDIVLRTHTSNVQIHLMEENEPPLRFIVPGRVYRNEAISYKSYCLFHQVEGLYVDKNVSFGQLKGCLEYFVKKMFGEKCKMRWRPSYFPFTEPSAEVDIWDDQRKQWMEILGCGMVDPEVFNNVGYDSKVWHGYAFGMGVERIAMLKHNIDDIRLFYNGDIRFLRQFK

SEQ ID NO: 188279 - protein, 331 aa, Unknown
  Bacterial polypetide isolated from the Sargasso Sea
MSDLEKINSIFNAKIDSVKSKDELQHLKTEFFGKNGQITTQFKNLGSLSAEDKKEFASRLNKLKDSLSQQIEEKNLELETQEINEKLKSEKIDVTLPIRSYRKGKIHPVSQVIDEISSIFSEIGFSVAEGPDVETEYNNFTALNTPEDHPARDMHDTFYLDKNKKLLLRTHTSPVQIRTMLNEKPPFKIIVPGRTYRSDSDQTHAPMFHQLEGLHIDKNITMGHLKGCLNYFIKEFFEVKNVRMRFRPSHFPFTEPSAEVDIGYRLENGKIVIGEGDKWLEVLGCGMVHPNVLKNVKVDTKKYQGYAFGIGIDRLAMLKYGINDLRAFFEI

SEQ ID NO: 188280 - protein, 351 aa, Unknown
  Bacterial polypetide isolated from the Sargasso Sea
MVDIRELIHKVAQAKDKQELQNLKSQLLGKSSQISQEFKKLGSLPEDERKKRAVALNNEKKKITESINNRLQQIEKIEVNKKLKQGTIDITLPGRTRPNGKIHPVSQVIDEISSIFSEIGFSVVEGPDVETEYNNFTALNTPEDHPARDMHDTFYLQEDKKILLRTHTSPVQIRAMLNGKPPFKIIVPGRTYRCDSDQTHSPMFHQLEGLHIDKNITMGHLKGCLDYFVKEFFEVKKIKMRFRPSHFPFTEPSAEVDIGYRLENDRIIVGEGDKWLEILGCGMVHPNVLKNAKVDNKKFQGFAFGMGIDRLAMLKYGINDLRAFFEADYRWLNYFGFDPLDVPTNYRGLSR

SEQ ID NO: 188281 - protein, 328 aa, Unknown
  Bacterial polypetide isolated from the Sargasso Sea
MINQLIPKIKKEISIIKSENELMNLKSKYLGKKGELTSYTNSIKDLSIEEKKIQGPIINSIKKEVELLIATKLNSLKRSLIDKKLAEEKIDITLPPKGASYGSTHPISQVSSEIVEIFTQFGFETFEGPEIESDYYNFEALNIPKDHPARDMQDTFYLNDGSLLRTHTSPMQVRIMEANRPPIKIISPGKVYRCDSDVTHTPMFHQIEGLLVDKSVTFANLKGILNEFISRFFGSDIKTRFRPSYFPFTEPSAELDIEWKDKSGKKTWMEVLGCGMVNPKVFASVGYDAKEFNGLAFGMGVERLSMIKFGITDIRYFYQNDLKFLKQF

SEQ ID NO: 188282 - protein, 634 aa, Unknown
  Bacterial polypetide isolated from the Sargasso Sea
GVVIGKVESAEKHPDADKLKLCTVNDGKQIHQVVCGAPNVDAGQTIAFATVGSVLPGNLKIKKAKIRGVESSGMICSERELNLSDEHEGIMVLPDDLEAGTDFVSSYGYKYISVELDITPNRPDAFSHQGVARDIACKTNREFTQLSVTEVVSKGNDTIDISMEDPGDCPRYIGGIVKNVKVGPSPEWLVERLRSSGQRSINNIVDISNFVLMEMGHPTHIFDHESLKNKSIHVRRAKKGETLTTLDDQKHKLDETHLLITDGKEPLALAGVMGGASTSVSDKTTTLLVESAYFNPVTIRKGAKSLSMSTDASKRYERGADPNGCETAFWRVVGLLEEITGGELCSDMIDEYPNPITEYKVELRRSELDLVLGINIDGKTVERILNGLGILSVKNGDDWHCQVPTYRPDIFREIDLIEEVARIYGFDDIPADESLYGSFRYDHPDPEQYLDTIRNTLSGCGFHQIYANSLQNENEATLSGQPPVKMLNPLNVEMGFLRTSLLPGLLKAADYNLKHSVYDLRLFELGHIHVQKDKGLENIVEKKYISGVVFGRARGHSVHSVSSEEDLFTLKGYLNTLFVKKLGMRMDLVKGEDPGFDHSRTIMVNRQKVGSMGRISSSWIDSMDLDLETVYGLK

SEQ ID NO: 188283 - protein, 355 aa, Unknown
  Bacterial polypetide isolated from the Sargasso Sea
MSDIKKIKDEYLNKLDKDQNIESINQIKTELFGKNGIVSNEFKKLGSVSQEERKKFASDLNFIKEELQNKITSKIEEIETKEINLKLENEKVDVTLPERDFKQGKIHPVSQVIDEISSIFSEIGFSVEEGPDVENEYNNFSALNTPDNHPARDMHDTFYLDEKKELLLRTHTSPVQVRTMLKGKPPFKIIAPGRTYRSDSDQTHAPMFHQVEGLHIDKDINMGHLKGCLNYFIKEFFEVDKLKMRFRPSHFPFTEPSAEVDIGYEIKDGKIIIGEGDKWLEILGCGMVHPNVLKNVNVDPSKFQGYAFGIGIDRLGMLKYGINDLRAFFETDYRWLSHFGFDPLDVPSSYRGLSR

SEQ ID NO: 188284 - protein, 255 aa, Unknown
  Bacterial polypetide isolated from the Sargasso Sea
MVDLRELIQKVLQAKDKLELQNLKSQFLGKNSQINQEFKKLGSLAEDERKIRAASLNDEKQKIAEAINSRFKELEKSEINQKLQKDKVDVTLPARERPNGKIHPVSQVIDEISSIFSEIGFSVAEGPDVESEYNNFTALNTPEDHPARDMHDTFYLDDNKKILLRTHTSPVQIRTMLSGKAPFKIIVPGRTYRCDSDQTHAPMFHQLEGLHIDKDITMGHLKGCLDYFVKEFFEVKKIQMRFRPKSFSIYRTISR

SEQ ID NO: 188285 - protein, 201 aa, Unknown
  Bacterial polypetide isolated from the Sargasso Sea
HDTFYLDDKKELLLRTHTSPVQVRTMLKGKPPFKIIAPGRTYRSDSDQTHAPMFHQVEGLHIDKNINMGHLKGCLDYFIKSFFEVDKIKMRFRPSHFPFTEPSAEVDIGYELKDGKIVIGEGDKWLEILGCGMVHPNVLKNVKINPDKYQGYAFGIGIDRLAMLKYGINDLRAFFETDYRWLNHFGFDPLDVPSNYRGLSR

SEQ ID NO: 188286 - protein, 336 aa, Unknown
  Bacterial polypetide isolated from the Sargasso Sea
MIEIINKLRKDFDYRIGSVSNPKQLEQIRIEFLGKKGQLQGLMKELRNASPQEKPKIGKDINVLKQHVEQAINEKDVILGSKSFKKSSENFDTTLPGRKELTGTLHPITQVMEEITSIFFGLGFQVEEGPEIETDYYNFEALNIPKDHPARDMQDTFYIEDETVLRTHTSPVQIHVMENRKPPLRIIAPGKVYRCDSDVSHTPMFHQIEGLMVDEGVSFSHLKGIMNIFLQEVFGKNTQIRFRPSFFPFTCPSAEVDIQCVMCNGKGCRVCSQTGWLEILGAGMVDPAVFQSVDYDPEKWTGFAFGLGIERIAMLKFGINDIRLFFENDLRFLKQF

SEQ ID NO: 188287 - protein, 217 aa, Unknown
  Bacterial polypetide isolated from the Sargasso Sea
MKDSIMNLLVSFGFEIIDGPEIETEEFNFDMLNIKKTHPARQMHDTFYVDNKSNLLRTHTSPVQIRGMLEKSPPFAFISGGKVYRKDDDATHLPMFHQIEGILVDENVSFAQLKDLIYKIVHSLFDKDIKLRFRPSYFPFTEPSAEVDILSTDGNWIEILGCGLVNPIVLENCNIDSNKHSGLAFGLGIERIAMLKHNMNDIREFYKSNLDFLGQFK

SEQ ID NO: 188288 - protein, 643 aa, Unknown
  Bacterial polypetide isolated from the Sargasso Sea
MKILKSWLNDWIDIENISNSDISEALESLGFEIENKKELNPNYENIVVGKVLEVYEHPNADKVRITKTDVGNNIYEIVCGAWNFDVGAVVPVALPNSKIKDNFKIDKRDIRGIQSNGMICSASELDLWDDHDGILLLDDKLLPGTDFSTIYSSNDFIWEVGVTPNRGDCMSYLGIARELSGYFNKKLKTKKSNLKPTISNILNAGSGKIKECNSYGSVEIENFNVTNSSFEMRYRLTQVGTRIINNVVDITNYILYDIGQPLHAFDRDKLFGTISVRKAKNNEKITTLDSQVRKLDSNDLVITDNDKPIALAGVMGGLETEVSEATTNLLIESAYFDKVSIMKTSRKLNLISDASIRFERGIDYKIQKYGLERFLMELKDNQTINYSEINVDDKGNLKNKKVILKYSEIKKLLGIDLKESFIKKVLKFLMIDSEVNKESVKFTPPSWRYDLDRPVDLIEEFAKHYGFNNFESTLPQGVHKNNKGSYWDLKSYLSSVFTSNNFQEVQTLSFVNNDKNFLFNPEKKYVEVFNAIDQSSKFMRSNLMSSLIDVYKLNYDQNNLSNSYFEINTVFDTSKNKIFEDVPNQNIVLGFLTSSNLSNTDTRLKDQELDLYYVKNILNQLLSSYDLEPITKPGFHQKLFIFN

SEQ ID NO: 188289 - protein, 272 aa, Unknown
  Bacterial polypetide isolated from the Sargasso Sea
KEAGKLLNQLKSDIDNSYKDKTSELSKAENESRLGNQKIDISLPSTSKTDGSVHPVTQTINEISDFFESMGFGIESGPEIETDYYNFEALNVPEDHPAKDMHDTFYLKESGLLRTHTSPVQIRTMENKNPPHRIICPGKVFRKDSDLTHTPMFHQIEGLVVEEGASFAQLKGLLNDFLEDFFGREVELRFRPSYFPFTEPSAEADIKWDKSWLEVLGCGIVHPNVLEMVGVDAKKYSGFAFGLGVERMAMLKYGIPDLRLFFENDYRFLKQF

SEQ ID NO: 188290 - protein, 290 aa, Unknown
  Bacterial polypetide isolated from the Sargasso Sea
MSDIIKIKEEYLNKLKDNLDLNTVNQLKSELFGKNGIISNEFKKMGSVSAKDRKKFASDLNSIKNELQSLIEKRIQDIEINEINLKLQNEQVDVTLPERTFNQGKIHPVSQVIDEISSIFSEIGFSVQEGPDVENEYNNFTALNTPDNHPARDMHDTFYLDNNKEFLLRTHTSPVQVRTMLSGKPPFKIIAPGRTYRSDSDQTHAPMFHQVEGLHIDKNINMGHLKGCLNYFIKEFFEVDKIKMRFRPSHFPFTEPSAEVDIGYELKDGKIIIGEGNKWLEILGCGMVHP

SEQ ID NO: 188291 - protein, 355 aa, Unknown
  Bacterial polypetide isolated from the Sargasso Sea
MSDIKKIKDEYLLKLSKDLDVNQINEIKTDLFGKNGLVSSQFKQLGKITEDERKKFASELNYVKDELQNLIVSKIEEIEIREINQKLEKEKVDITLPERPFVEGKIHPVSQVIDEISSIFSEIGFSVEEGPDVENEYNNFTALNTPDNHPARDMHDTFYLDEKKELLLRTHTSPVQIRTMLNDKPPFRIIAPGRTYRSDSDQTHAPMFHQVEGLHIDKDINMGHLKGCLNYFIKEFFEVDKIKMRFRPSHFPFTEPSAEVDIGYEIKDGKIIIGEGNKWLEILGCGMVHPNVLKNVNVDPGEFQGYAFGIGIDRLAMLKYGINDLRAFFDCDYRWLNQFGFDPIDVPSSYRGLSR

SEQ ID NO: 188292 - protein, 317 aa, Unknown
  Bacterial polypetide isolated from the Sargasso Sea
MADLENVSEDLNQIEKFRSIYLGRKGKVASLFSLMGKASNQDRPALGNSLNQLKTELTTLFENKVAEIDSSRQKAQDDSIDLSLPSKQQRLGSIHILEQTLSEIKEIYQSIGFHVAYGPEVDDNHHNFTALNIPEHHPARDMQDTFFIDPETVLRTHTSNVQVHLMEEQDPPLRYIVPGRVYRNEAIAYKSYCLFHQVEGIYINEKVSFGELKGCLEFFVKQMFGPKKKMRFRPSYFPFTEPSAEVDIWDEERKQWMEILGCGMVDPAVLENVGYNPSRFHGYAFGMGVERIAMLKYKINDIRHFYSGDVRFLEQFV

SEQ ID NO: 188293 - protein, 337 aa, Unknown
  Bacterial polypetide isolated from the Sargasso Sea
LDLNTVNQLKSELFGKNGKISIEFKKMGSVPAEDRKKFASDLNSIKNELQSLIEKKIQEIEISDINSKLQNEKVDVTLPERSFNSGKIHPVSQVIDEISSIFSEIGFSVEEGPDIENEYNNFTALNTPDNHPARDMHDTFYLDSKKEFLLRTHTSPVQVRTMLNRKPPFKIIAPGRTYRSDSDQTHAPMFHQVEGLHIDKNINMGHLKGCLNYFIKEFFEVNKIKMRFRPSHFPFTEPSAEVDIGYELKDGKIIIGEGNKWLEILGCGMVHPNVLKNVKVDPSKFQGYAFGIGIDRLAMLKYGINDLRAFFETDYRWLNHFGFDPLDVPSSYRGLSR

SEQ ID NO: 188294 - protein, 811 aa, Unknown
  Bacterial polypetide isolated from the Sargasso Sea
MQFPESWLRTFVDPQLTTDELSHALTMAGLEVEDLRPAAPPTSKIVVGQVLEVVKHPDADKLNVCQVDAGTGATLNIVCGAPNVAPGIKVPVALVGAQLPPAEEGGAPFAIKLSKLRGVESQGMLCSARELKLSEDHSGLMILPEATPIGQDIRETLNLDDTIFEIKLTPNKADCLSVFGVARETSAITGAPLRPLEIKPAEVKLNETLPVKISAPDLCGRFSGRVIRGVNARAKSPQWMVQRLERSGQRSISALVDISNYVMLELGRPSHVFDLDKIHGGMDVRWGRKGETLKLLNGSTVELDETVGVIADEQHIESLAGIMGGDSTAVTLDTTNIYLEAAFWWPDSIRGRSRKYNFSTDAGHRFERGVDYATTVEHIERITQLILDICGGEAGPVDDQIVNVPKREPVKMRVSRANRIIGVKIDADEIAQIFTRLGLTFERDGDTFAVNPPSYRFDIEIEEDLIEEVARIYGFEKIPARPPVATSEMLPTNETKRSIHVIRHALAARDYAETVNFSFVDAEWEQDFAGNDKPVRLLNPIASQLSVMRTTLFGSLINVLRTNLNRRAADRVRVFEAGRVFLHDPSIKAGELTVEGFAQPKMIGALAYGPALEEQWGAQTRPVDYFDVKGDLEAVLAPAVASFVKAEHPALHPGRSARIELNGRAVGWIGELHPRWMQKYDLPHAPILFEIEAEALMQRVLPTPAEVSKFPPVRRDIAVVVDQKIEVQALLDELQKAQSEPACKAVQKVALFDEFRPKSNTSGGLAAHEKSLAFRVTLQDTGGTLQDETVDLAIQTLVERLARVYGARLRG

SEQ ID NO: 188295 - protein, 667 aa, Unknown
  Bacterial polypetide isolated from the Sargasso Sea
MRWLKEFIPNLKINDKVAESLTSLGLEVSSITKKQRDLIIDIDLTPNRGDCLSVHGIARDLNSLFNKKIKYPRVKKLSKINKKKYIKSLDSKICPSYSCLSITGLNNSIKTPDLIKSRLKSSGIKNINFLVDIINYVMLEIGQPMHVFDLNKLKLPLSVEFANKTELFEGLDDSEYKLTKKIPVISDQSGPIALAGVLGGKKTSTTQKTQNVLIESAFFEPNQIRQSSKSFRLQTDSSYRYERGVDPKLPMVALSRVLELLSEYTTYDSVFIDSKISKKSEKRNDKKITIEHNLITKSLGQDIEKVFILKIFKSLGFEIKVKNTAYTLISPSHRFDIRNQQDIIEEIARVYGYNNFKSNIPTNYIKTLDSNLNTSDILSESLSSRGYNEIISYTMLPKNSQNQLHNNSEIIRILNPISEDKSDLRASMVFNMLQIYKYNKSRQATSLRFYESGKIYSYNRGKKIIETNVLAGIIGGINFNNNLRNSRKKLNFFDLKGDLISVISNLSFKKTNKLNYLVSNTQMSLFQDNTFIGTFGALIPSLRDDYGISDEVFYFELMIDSIKVRNVVKYVDFSRFPKIKRDITLKINNKISIEEVIKCISKSSLKYMINSRISDIFYSMNHENSHKSLTIELIFQGNESTLSDQEVNEQMTILIKRLKDKLNIDIK

SEQ ID NO: 188296 - protein, 337 aa, Unknown
  Bacterial polypetide isolated from the Sargasso Sea
MDLNSVNQLKSELFGKNGIISNEFKKMGSISPEDRKKFASDLNSTKNELQSLIEKKIQDIEINYINIKLQNEQVDVTLPERSFNRGKIHPVSQVIDEISSIFSEIGFSVQEGPDVENEYNNFTALNTPENHPARDMHDTFYLDNKKEFLLRTHTSPVQVRTMLSGKPPFKIIAPGRTYRSDSDQTHAPMFHQVEGLHIDKNINMGHLKGCLNYFIKEFFEVDKIKMRFRPSHFPFTEPSAEVDIGYELKDGKIIIGEGDKWLEILGCGMVHPNVLKNVKVDPSKFQGYAFGIGIDRLAMLKYGINDLRAFFESDYRWLNHFGFDPLDVPSSYRGLSR

SEQ ID NO: 188297 - protein, 270 aa, Unknown
  Bacterial polypetide isolated from the Sargasso Sea
MSDIKKIKDEYLKKLDNNLDIESVNQIKTELFGKNGQISNSFKTLGSLPNDERKKFASDLNSIKDELQEKINSKLQEIEIKEINSKLENEKLDVTLPEREIKQGKIHPVSQVIDEISSIFSEIGFSVEEGPDVENEYYNFTALNTPDNHPARDMHDTFYLNNNKEILLRTHTSPVQVRTMLNGKPPFKIIAPGRTYRSDSDQTHSPMFHQVEGLHIDKDINMGHLKGCLNYFIKSFFEIDKIKMRFRPSHFSFTEPSAEVDIGYELKDGK

SEQ ID NO: 188298 - protein, 149 aa, Unknown
  Bacterial polypetide isolated from the Sargasso Sea
MPGKCYRFEQITPRSEHQFYQVRGLAIGKNMRLTDLIGVMGEFAHKMYGEERRIRIRGSYFPFTEPSIEIDMNCSCENKGCRLCKNTGWLEVAGAGMVHPVVLSNGGYDPEEWTGFAFGMGVERPALLKHNIDDIRYFYNNDLRFLHQF

SEQ ID NO: 188299 - protein, 323 aa, Unknown
  Bacterial polypetide isolated from the Sargasso Sea
MSDIKKIKEDYLGKLSGKLNLEEVNQIKTELFGKNGLVSNSFKKLGSMQSEDRKKFASDLNFVKDELQEKINNKLQEIETIEINSKLKNEKVDVTLPERDINQGKIHPVSQVIDEISSIFSEIGFSVEEGPDVENQHYNFTALNTPDNHPARDMHDTFYLDDKKELLLRTHTSPVQVRTMLKGKPPFKIIAPGRTYRSDSDQTHSPMFHQVEGLHIDKDINMGHLKGCLNYFIKEFFEVDKIQMRFRPSHFPFTEPSAEVDIGYELKDGKIVIGEGDKWLEILGCGMVHPNVLKNVNVNPDKYQGYAFGIGIDRLGMLQYGNK

SEQ ID NO: 188300 - protein, 326 aa, Unknown
  Bacterial polypetide isolated from the Sargasso Sea
MNIKDTIESVRKQFRTDSDPFPDDNDKIDSLKIKYLGRKGLIANLFTQMNKVEAEDRPLFGKYLNQLKNEINSVFDSSQQKDSNSKTDQIDYSLPGLNFNIGYQHPLQTTLNEIKSIFQNLGFSVAYGPEVDDDFHNFSALNFPPEHPARDMQDTFFIEKDIVLRTHTSNVQVHLMKEKEPPLRYIVPGRVYRNESISFKSYCLFHQIEGLYVDKNVSFADHKGILEYFVKQMFGAKTKMRFRPSFFPFTEPSAEVDIWSEKRGQWLEILGSGMVDPEVFKSVDIDPDVWHGYAFGLGIERICMLKYDIDDIRLLYQGDLRFLEQF

SEQ ID NO: 188301 - protein, 321 aa, Unknown
  Bacterial polypetide isolated from the Sargasso Sea
MVKISSLFKTVGSIPESDRKSFAADLNKIKDELQLLISEKIKEIETKEINQKLEKERVDITLPGRSFVIGKIHPVSQTIDEISSIFSEIGFSVEEGPDVENEYNNFTALNTPDNHPARDMHDTFYLDENKEVLLRTHTSPVQIRTMLKDKPPFKIIAPGRTYRSDSDQTHAPMFHQVEGLHIDKNINMGHLKGCLNYFIKEFFEVEKIKMRFRPSHFPFTEPSAEVDIGYEIKDGKIVIGDGDQWLEILGCGMVHPNVLKNVKVDPAKYQGYAFGIGIDRLAMLKYGINDLRAFFDCDYRWLNHFGFDPLDVPTNYRGLSR

SEQ ID NO: 188302 - protein, 173 aa, Unknown
  Bacterial polypetide isolated from the Sargasso Sea
DKPPFKIIAPGRTYRSDSDQTHAPMFHQVEGLHIDTNINMGHLKGCLNYFIKEFFEVEKIKMRFRLSHFPFTEPSAEVDIGYEIKDGKIIIGEGDKWLEILGCGMVHPNVLRNVKVDPSKYQGYAFGIGIDRLAMLKYGINDLRAFFDCDYRWLNHFGFDPLDVPSNYRGLSR

SEQ ID NO: 188303 - protein, 264 aa, Unknown
  Bacterial polypetide isolated from the Sargasso Sea
IDVTLPERSFFQGKIHPVSQVIDEISSIFSEIGFNVEEGPDVENEYNNFTALNTPDNHPARDMHDTFYLDANKEYLLRTHTSPVQVRTMLKGKPPFKIIAPGRTYRSDSDQTHAPMFHQVEGLHIDKNINMGHLKGCLNYFIKEFFEVDKIKMRFRPSHFPFTEPSAEVDIGYKIKDEKIIIGEGDKWLEILGCGMVHPNVLRNVKVDPSKYQGYAFGIGIDRLAMLKYGINDLRSFFETDYRWLNHFGFDPLDVPSSYRGLSR

SEQ ID NO: 188304 - protein, 431 aa, Unknown
  Bacterial polypetide isolated from the Sargasso Sea
MKFTIDWLKEHLDTNYNDNKIVNKLTDIGLEVESFQSQLSELDNFIVAKILNAEKHPNADRLKVCDVDIGKNEVVKVVCGATNAKKNLLTIYAPPGSIIPKNQIKLSITKIRGVTSYGMLCSESELNLSDESEGITELSSKKYNNQVGKKYFKNNTSKVIDLSITPNRADCLGVRGIARDLAAAGTGKLKKLTLKNIKNSGPQKINIKITKEKNQGCLAFGSCLIKGVKNTESPKWLKDKIITLGQKPISAIVDITNYVMIDLNRPLHAYDADKIDKGIIVRNSKKGETFKALDNKNYLLKEDMCVISDNSGVLGLGGIIGGIRSGTEFNTKNILLESAYFDPRSIRKTSKLLNIDTDAKYRFERGIDPESIQLGLLKAAELIKKICGGEISKIDIKKNENFKKNKIKFYIPFFEKITGFKVNDKDIVKIL

SEQ ID NO: 188305 - protein, 361 aa, Unknown
  Bacterial polypetide isolated from the Sargasso Sea
MENLNSIKEEILQKIESAESDDTVEEIRISELGKKGRISKLLGELGKLNQDERRKLGPEINGLKNTVLEKIQEKKEFFLDQILSKKLLEEKIDVTLPVKSSQNTNGRIHPVSQVLDEITEIFGSLGYEIADGPDIETEYYNFNALNIPESHPARQMHDTFYFDEFDKDQGQSVLRTHTSPVQVRTMEKGEPPFRFISPGRTYRCDSDQTHTPMFHQIEGLSVDKETNLGHLKWTLETFLSSFFEIENTKIQMRPSYFPFTEPSLEIDVLCDRSGPVLKIGEGSDWLEVAGAGMVHPNVLKSANIDPDKYQGFAFGFGLDRLAQLKYGIPDLRTFFSGDIRWLRHYGFSALDIPTLSRGLKK

SEQ ID NO: 188306 - protein, 355 aa, Unknown
  Bacterial polypetide isolated from the Sargasso Sea
MSDLDKINSIFNAKIDSVKTKEDLQNIKTEFFGKNGQITKQFKTLGSLDPDKRKEFASCLNKIKDDLTNQINQKDFEISNLEINEKLKNEKVDVTLPIRPYQQGKIHPVSQVIDEISSIFSEIGFSVAEGPDVETEYNNFTALNTPEDHPARDMHDTFYLEKNKKLLLRTHTSPVQIRTMLNGKPPFKIIVPGRTYRCDSDQTHAPMFHQLEGLHIDKNITMGHLKGCLDYFIKEFFEVKNVKMRFRPSHFPFTEPSAEVDIGYRIENEKIVIGEGDKWLEILGCGMVHPNVLKNAKVDPKKYQGFAFGMGIDRLAMLKYGINDLRAFFETDFRWLSHFGFDPLDVPTNYRGLSK

SEQ ID NO: 188307 - protein, 355 aa, Unknown
  Bacterial polypetide isolated from the Sargasso Sea
MSDIIKIKEEYISKLKENLDLTNVNQLKSELFGKNGKISNEFKKMGSIPSEERKKFASDLNSIKDELQNLIEKKIQDIEINEINSKLKNEKVDVTLPERSFNRGKIHPVSQVIDEISSIFSEIGFSVMEGPDVENEYNNFTALNTPDDHPARDMHDTFYLDNKKEFLLRTHTSPVQVRTMIDSKPPFKIIAPGRTYRSDSDQTHAPMFHQVEGLHIDKNINMGHLKGCLNYFIKEFFEVDKIKMRFRPSHFPFTEPSAEVDIGYELRDGKIIIGEGDKWLEILGCGMVHPNVLKNVKVDPAKFQGYAFGIGIDRLAMLKYGINDLRAFFETDYRWLNHFGFDPLDVPSSYRGLSR

SEQ ID NO: 188308 - protein, 429 aa, Unknown
  Bacterial polypetide isolated from the Sargasso Sea
MRISIEWLKEFVEVKENPSALADMLSMLGLESEVVHDFSLLSNVVVGKVVTAKKHPNADRLKLCTVNDGAHTLNVVCGAPNVDAGQTIAFAQVGAVLPGDFVISKAKIRGQESRGMICSERELNISEEHDGIMVLPNTLKVGRPIYPYLDKMYSALELDLTPNRPDGFSHYGVAREVALKTGRKLKNISVKKSQVKSKDVHKIAKVTIEDKVDCPRYMGAVLHNVTVGPSPAWMVDRLKAAGQRSINNLVDISNYVLLEMGHPTHIFDYDMIPSNTIAIRRVKNDKTITTLDEEKRKLSKQQLLITDGKKPIALAGIMGGLESAVQDNTKNVFVESAYFDPVTIRKGSKELGLLTEASRRFERGADVQAAETALWRVINLLQEFAGGELVPGIIDEYPGKFKSKNITLRRNELDLFAGCTITDKEVSTI

SEQ ID NO: 188309 - protein, 240 aa, Unknown
  Bacterial polypetide isolated from the Sargasso Sea
MTAPKDIFLPSLDRELGSVHPINQVKDQLTELLKSFGFEVAEGPEVETEEYNFDMLNIPASHPAREMHDTFYVDNKNKLLRTHTSPVQVRCMLKDKPPLAFISPGKVYRKDDDSTHLPMFHQIEGLYVDENVNFAQLKDLMYKICHSLFGKATKLRFRPSYFPFTEPSAEVDVLFGDKWLEILGCGVVNPKVLENCKIDSSKYSGLAFGLGIERIAMLKYGVNDIRDFYKSNLDFLRQFK

SEQ ID NO: 188310 - protein, 348 aa, Unknown
  Bacterial polypetide isolated from the Sargasso Sea
MSDFEKLKDKLKDKLTKVQSSQEVETVRSEIFGKNGLINLEFKKIGSLPPEDKKKIASEINNAKQELTKLFNDKAIKLADSEIDEQVKKEKNDVTLPEKDFRIGKIHPVSQVIDEISSIFSEIGFSVEEGPDVESEYYNFTALNTPENHPAKDMHDTFYIEENMKTLLRTHTSPVQVRTMIKGKPPFKIIAPGRTYRSDSDQTHTPMFHQLEGLHIDKNITMGHLKGCLNYFIKEFFEVDKIKMRFRPSHFPFTEPSAEVDIGYRVENNKIIIGEGDKWLEILGCGMVHPNVLKNSKVDPNKFQGFAFGIGIDRLAMLKYGINDLRSFFECDYRWLNYYGFDPLDVPT

SEQ ID NO: 188311 - protein, 238 aa, Unknown
  Bacterial polypetide isolated from the Sargasso Sea
GSQKIDITLPSFSTTDGSVHPVTKTISEISNFFESIGFGIESGPETETDYYNFEALNVPEDHPAKDMHDTFYLKGSGLLRTHTSPVQIRTMEKNKPPHRIICPGKVYRKDSDLTHTPMFHQIEGLVVEEGASFAQLKGLLNDFLEDFFGREVELRFRPSYFPFTEPSAEVDIRWDKSWLEVLGCGMVHPNVLEMVGVDTKKYSGFAFGLGVERMAMLKYDIPDLRLFFENDYRFLKQF

SEQ ID NO: 188312 - protein, 212 aa, Unknown
  Bacterial polypetide isolated from the Sargasso Sea
MENLRNKYIEAIATSSDENALEAVRLAALGKKGEVSLKMRELGQMSPEERQVAGPALNELKNEIISAISAKKEALEDSVLNERLKSEWLDVTLPSRERPSGSIHPISQVTEEVISIFASMDFSVAEGPRIETDWYNFDALNIPSHHPARAEMDTFYMYRSENDDRAPHVLRTHTSPVQIRTMENTGAPVRVICPGGVYRADYDQTHTPMFHQ

SEQ ID NO: 188313 - protein, 355 aa, Unknown
  Bacterial polypetide isolated from the Sargasso Sea
MSDFEKLKDQLKDKLIKAQSSEEVEIIRGEIFGKNGLVNLEFKKLGSLPPEDKKKVASELNDAKQELTKLFNDKNIKLADSEIEEKIKKEKNDVTLPEKDFRIGKIHPVSQVIDEISSIFSEIGFSVEEGPDIESEYYNFTALNTPKNHPAKDMHDTFYIEENMKTLLRTHTSPVQVRTMLKGKPPFKIIAPGRTYRSDSDQTHTPMFHQLEGLHIDKNINMGHLKGCLNYFIKEFFEVDKIKMRFRPSHFPFTEPSAEVDIGYRIENNKIIIGEGDKWLEILGCGMVHPNVLKYSKVDPNKFQGFAFGIGIDRLAMLKYGINDLRSFFECDYRWLNHYGFDPLDVPTNYRGLSK

SEQ ID NO: 188314 - protein, 355 aa, Unknown
  Bacterial polypetide isolated from the Sargasso Sea
MSDIKKIKDDYLSKLDNDLNIEILNQIKTELFGKNGKISNSFKSLGSLPNDERKKFASDLNTIKDELQGKIDSKLQEIETKEINSKLKNEKVDVTLPEREFSKGKIHPVSQVIDEISSIFSEIGFSVEEGPDIENEHYNFTALNTPDNHPARDMHDTFYLDNNKELLLRTHTSPVQVRTMLNGKPPFKIIAPGRTYRSDSDQTHSPMFHQVEGLHIDKDINMGHLKGCLNYFIKSFFEVDKIKMRFRPSHFPFTEPSAEVDIGYEMKDGKIVIGEGDKWLEILGCGMVHPNVLKNVKVNPDKFQGYAFGIGIDRLGMLKYGINDLRAFFETDYRWLNHFGFDPLDVPSNYRGLSR

SEQ ID NO: 188315 - protein, 182 aa, Unknown
  Bacterial polypetide isolated from the Sargasso Sea
RDMWDTMWIDEKMNSNGEKMLLRTHTSPVQARIMESQDPPIRVIVPGKCYRYEATDATHEWHFYQVEGLAVDKNLTFADLKGTLYEFAKKIFGNDTKIRFRCDYFPFVEPGVDMSIFWEGKWLEILGAGMVHPKVFEKAGYTDPNISGFAFGMGPERIAMIKHNIDDIRLFYSNDLRFLNQF

SEQ ID NO: 188316 - protein, 177 aa, Unknown
  Bacterial polypetide isolated from the Sargasso Sea
MENLDALVSQALEAVERAEDINALEQIRVNYLGKKGELTQVMKTLGNLPAEERPKVGALINDAKERVTVVLNARKAAFEEAELSARLAAECIDVTLPGRGQATGGLHPITRTLERIEQFFTHIGYGIAEGPEVEDDYHNFEALNIPGHHPARAMHDTFYFNANMLLRTHTSPVQVRT

SEQ ID NO: 188317 - protein, 180 aa, Unknown
  Bacterial polypetide isolated from the Sargasso Sea
QIRTMENTGAPVRVICPGGVYRADYDQTHTPMFHQVEGLAIDQSLSMANLKWVLEEFVKAYFEVSDVELRFRASHFPFTEPSAEVDIRCSWEKGQLKVGEGDDWLEILGSGMVHPKVLQAGNIDPNLWQGFAFGMGIDRIAMLKYGVPDLRAFFDSDLRWLRHYGFTALDQPNLHAGLSR

SEQ ID NO: 188318 - protein, 326 aa, Unknown
  Bacterial polypetide isolated from the Sargasso Sea
MNIKDTIESVRKQFRTDSDPFPDDNDKIDSLKIKYLGRKGLIANLFTQMNQVEAEDRPLFGKYLNQLKNEINSVFDSSQQKDSDSKTDQIDYSLPGLNFNIGYQHPLQTTLNEIKSIFQNLGFSVAYGPEVDDDFHNFSALNFPPEHPARDMQDTFFIEKDIVLRTHTSNVQVHLMKEKEPPLRYIVPGRVYRNESISFKSYCLFHQIEGLYVDKNVSFADHKGILEYFVKQMFGAKTKMRFRPSFFPFTEPSAEVDIWSEKRGQWLEILGSGMVDPEVFKSVDIDPDVWHGYAFGLGIERICMLKYDIDDIRLLYQGDLRFLEQF

SEQ ID NO: 188319 - protein, 355 aa, Unknown
  Bacterial polypetide isolated from the Sargasso Sea
MSDFEKLKEEYQNKLTKAQNSKELDIIRTEIFGKNGLINIEFKKLGSLSPEDKKKVASEINNAKQELTNLFNEKATKLENVEIDERVKKEKDDVTLPEKDFKIGKIHPVSQVIDEISSIFSEIGFTVEEGPDVESEYYNFTALNTPENHPAKDMHDTFYIEENMKTLLRTHTSPVQVRTMLKGKPPFKIIAPGRTYRSDSDQTHTPMFHQLEGLHIDKNITMGHLKGCLNYFIKEFFEVDKIRMRFRPSHFPFTEPSAEVDIGYRIENNKIVIGEGDKWLEILGCGMVHPNVLKNSKVDPNKFQGFAFGIGIDRLAMLKYGINDLRSFFECDYRWLNYYGFDPLDVPTNYRGLSK

SEQ ID NO: 188320 - protein, 249 aa, Unknown
  Bacterial polypetide isolated from the Sargasso Sea
MSEIEKIKSEYLDKLNRCTSSDNLIQIKTELFGKSGVITNQFKLISSKSENDKKIFASQINDLKNLLQETLNKVSKKIEIDEVNKKLTSEKVDVTLPERNFKKGKIHPVSQVIDEICSIFSEIGFSVAEGPDVENEYNNFTALNTPSNHPARDMHDTFYLSEDKNLLLRTHTSPVQIRTMLNGKPPFKIIAPGRTYRCDSDQTHTPMFHQLEGLHIDKDINMGHLKGCLNYFIKEFFEVKKLKMRFDQA

SEQ ID NO: 188321 - protein, 179 aa, Unknown
  Bacterial polypetide isolated from the Sargasso Sea
MSDLKKIKDEFFSKLKGKLNLSEINQIKSDLFGKSGLISSQFKKIASIPEKERKKFASDLNIIKDELQQLINYKINEIQNLEINEKLGKEKIDVTLPERDFVRGKIHPVSQTIDQISSIFSEIGFSIEEGPDVENEYNNFTALNTPDNHPARDMHDTFYLDEKKEKLLRTHTSPVQIRT

SEQ ID NO: 188322 - protein, 293 aa, Unknown
  Bacterial polypetide isolated from the Sargasso Sea
MSDIKKIKDDYLNKLNNDLNIESLNQIKTELFGKNGKISNSFKKLGLLPTDERKKFASDLNSIKNELQDKIDSKLQEIETKEINSKLENEKVDVTLPEREFSRGKIHPVSQVIDEISSIFSEIGFSVEEGPDIENEHYNFTALNTPDNHPARDMHDTFYLDNNKELLLRTHTSPVQVRTMLNGKPPFKIIAPGRTYRSDSDQTHSPMFHQVEGLHIDKDINMGHLKGCLNYFIKSFFEVDKIKMRFRPSHFPFTEPSAEVDIGYEIKDGKIVIGEGDKWLEILGCGMVHPKCA

SEQ ID NO: 188323 - protein, 351 aa, Unknown
  Bacterial polypetide isolated from the Sargasso Sea
MVDLRELIQKISQAKDKLELQNLKSQFLGKNSQINQEFKKLGSLDENERKVRASSLNNEKQKITEAINNKFKELENLEINQKLQKNKVDVTLPARERPNGKIHPVSQVIDEISSIFSEIGFSVAEGPDVESEYNNFTALNTPEDHPARDMHDTFYLDNNKKILLRTHTSPVQIRTMLNGKPPFKIIVPGRTYRCDSDQTHAPMFHQLEGLHIDKDITMGHLKGCLDYFVKEFFEVKKIKIRFRPSHFPFTEPSAEVDIGYRLENGRIIVGEGDKWLEILGCGMVHPNVLKNAKVDLKKFQGYAFGMGIDRLAMLKYGINDLRSFFEADFRWLNYFGFDPLDVPTNYRGLSR

SEQ ID NO: 188324 - protein, 401 aa, Unknown
  Bacterial polypetide isolated from the Sargasso Sea
MKVSVSWLKDLVEFNNDIDELSEKLSMTGFEVESLEDLSEQAKNVVIGFVEEITPHPNAEKLKVCSVDVGLPKKLSIVCGAPNVKAGFHVLVAKVGAYLSSKSLKIKLSNLRGVESEGMICSLEELGIESSNEGIEILEENEENIPPIGTNAVDYLCLNDTIIELAITANRPDGMSMVGIAREISTITNSKLTLPTLNYNEDFNIFEPKISDQETIGVDCIYSITYIDSIDNTGNTNKNIFNKLNSLKQNCINPVVDITNYLMLEQGQPLHAFDADLLDNIIGRKVIPNDFGIRNGKEGELFVALDKKEYKINPTIKLITCDDIPIAIAGVIGGNNSSVSDKTTRIWLEAAVFTPTSIRNSSREIGLRTDASSRYEKGISSNMTTAVSKRASELISVQLGG

SEQ ID NO: 188325 - protein, 355 aa, Unknown
  Bacterial polypetide isolated from the Sargasso Sea
MSDLKKIRDEFISKLKGKLDLAELNQIKSDLFGKNGLVSSQFKKIGTIDVSEKKKFAADLNIIKDELHDLINFKINEIEKANINEKLEKEKIDVTLPERSFVRGKIHPVSQTIDEISSIFSEIGFSVEEGPDVENEYNNFTALNTPDNHPARDMHDTFYLDEKKERLLRTHTSPVQIRTMLKDKPPFKIIAPGRTYRSDSDQTHSPMFHQVEGLHIDKNINMGHLKGCLNYFIKEFFEVKKIKMRFRPSHFPFTEPSAEVDIGYEIKDGKIIIGEGDQWLEILGCGMVHPNVLKNVKVDPAKFQGYAFGIGIDRLAMLKYGINDLRAFFDCDYRWLNHFGFDPLDVPTNYRGLSR

SEQ ID NO: 188326 - protein, 155 aa, Unknown
  Bacterial polypetide isolated from the Sargasso Sea
DQTHSPMFHQVEGLHIDKNINMGHLKGCLNYFIKEFFEVDKIKMRFRPSHFPFTEPSAEVDIGYKIKDEKIVIGEGDKWLEILGCGMVHPNVLRNVKVDPSKYQGYAFGIGIDRLAMLKYGINDLRSFFETDYRWLSHFGFDPLDVPSSYRGLSR

SEQ ID NO: 188327 - protein, 240 aa, Unknown
  Bacterial polypetide isolated from the Sargasso Sea
MSNTRDFEPPKITKSLGSSHPINQIKDSIMNYLVSLGFEILDGPEIETEEFNFDMLNIKESHPARQMHDTFYVNKKSNVLRTHTSPVQIRGMLDKKPPVAFISGGKVYRKDDDSTHLPMFHQIEGIYVDKNVSFANLKDVIYQIITYLFGKDVKIRFRPSYFPFTEPSAEVDILSEDGKWLEILGCGIVNPIVLQNCKIDSNLYSGFAFGLGIERIAMLKYGVSDIRDFYKSQFRFSETI

SEQ ID NO: 188328 - protein, 205 aa, Unknown
  Bacterial polypetide isolated from the Sargasso Sea
MQFSKNWLKDFIDLNISTEDICSQLTMAGIEVDGYDSFHSKITGKDSIIKLDITPNRGDCFSILGVARELAVINNLKLKNPTFKPIENSFKEDIKIKVCKETPRYIGRSVKNVDINAKTLPLISERLILSDQKLIDPVVDITNYVLLELGQPLHAFDRDRLEGNINVRKAEKDENLTLLDDQEVKLSPDYVVISDAKQAIALAGI

SEQ ID NO: 188329 - protein, 355 aa, Unknown
  Bacterial polypetide isolated from the Sargasso Sea
MSDLDKINSIFNAKIDSIKSKDELQNLKTEFFGKNGQITNQFKNLASLSDEQKKEFASSLNKLKSSLSNQIEVKNLEIETQEINEKLKNEKIDVTLPIRSYRQGKIHPVSQVIDEISSIFSEIGFSVAEGPDVETEYNNFTALNTPEDHPARDMHDTFYLDKNKKLLLRTHTSPVQIRSMLNEKPPFKIIVPGRTYRSDSDQTHAPMFHQLEGLHIDKNITMGHLKGCLDYFIKEFFEVRNVKMRFRPSHFPFTEPSAEVDIGYRLENGKIVIGEGDKWLEVLGCGMVHPNVLKNVKVNTKKYQGYAFGIGIDRLAMLKYGINDLRALFETDYRWLSHFGFDPLDVPTNYRGLSK

SEQ ID NO: 188330 - protein, 795 aa, Unknown
  Bacterial polypetide isolated from the Sargasso Sea
MKFSESWLREWVNPAVSREALSHQITMAGLEVDGVDAVAAEFNGVVVGEVVECGQHPDADKLRVTKVSVGSGELIDIVCGAPNCRQGLKVAVAMVGAVLPGDFKIKKAKLRGMPSEGMLCSYSELGIDIDSDGIIELPLDAPLGTDLREYLQLDDAVIEVDLTANRADCLGMVGLAREVGVLNRQAVTEPQWQTVTPTIDAKVAINVKETAACPRYLGRVVKNVNVKAATPLWMQEKLRRSGIRSIDPIVDITNFVLVEFGQPMHAFDLAKLTGDIQVRLGNGEEKITLLDGSEVTIPNDTLVIADDARPLALAGVFGGEYSGVSDTTQDILLECAFFAPLAIMGKSRRLGLHTDSSHRFERGVDPEMQHKVMDRATRLVLDICGGEAGPVVEAKSDADLPKPVQILLRRSKLDKILGHHVPDSDVVEILERLGFSVVAGEGCWQVTTATYRFDMAIEEDLIEEVARIYGYNNIPNVAPVASLRMSDHKETDLSLKRVRSLLVARGFQEAVTYSFVDPKLQNLVHPGEQAMVLPNPISSEMSAMRLSMFTGLLTAVGYNQSRQQGRVRLFETGLRFVPDIHAESGVRQQAMLGCVITGLQNDEHWSMESKTVDFFDLKGDLEAIIGLTVSASEFSFRVATHSALHPGQCAEILRNDRVIGHIGAIHPSLEKPFGLNGKTIVFELELDALLHTSLPLAQAVSKFPANRRDIAVVVDESVSAGDVMKLIRKVGENQLVGINLFDVYLGKGVEPGKKSLAIALTLQDTTRTLEEKEIAETVDSVVSALKTEFNASLRD

SEQ ID NO: 188331 - protein, 327 aa, Unknown
  Bacterial polypetide isolated from the Sargasso Sea
MQQLTEIVEQALVIIDQASDLKALDDIRVDYLGKKGKITDMMKMMGSLSPEEKPAFGQAVNDAKQAIQQKLTERIDVLRSAELEAKLIAEKIDVTLPGRTIEIGGLHPVTRTIERIETFFGELGFSVKQGPEIEDDFHNFDALNISEHHPARADHDTFYFNPKLMLRTQTSGVQIRTMETEKPPLRIISPGRVYRNDYDQTHTPMFHQVEGLLVDENVNFAELKGVLHDFLRNFFEEDLQVRFRPSYFPFTEPSAEVDVMGKNGKWLEVLGCGMVHPNVLRSVGIDPEKYSGFAFGMGVERLTMLRYGVNDLRAFFENDLRFLKQFK

SEQ ID NO: 188332 - protein, 276 aa, Unknown
  Bacterial polypetide isolated from the Sargasso Sea
MSDLKNILSIFEDKFSSIKNKDDLQNLKSEFFGKNGSISLQFKKMGSINPEERKNFAKELNTIKDQLTSKIEKKFKDFESLEINQKLKDEKIDITLPIRSIQHGKIHPVSQVIDEISSIFSEVGFSVAEGPDVESEHNNFTALNTPANHPARDMHDTFYLDKDKKTLLRTHTSPVQIRTMLNGKPPFKIIVPGRTYRCDSDQTHAPMFHQLEGLHVDKNITMGHLKGCLNYFIREFFEVKTIKMRFRPSHFPFTEPSAEVDIGYKIENGKIVIGEG

SEQ ID NO: 188333 - protein, 128 aa, Unknown
  Bacterial polypetide isolated from the Sargasso Sea
AVDATHSPVFNQVEVLCIDQDINFSHLRGTVLTFLKAFFGDIPVRFRASYFPFTEPSAEVDVQWKGKWLEVMGCGMVDPKVLEKLGIDSEKWTGFAAGLGVERFCMVRHQIDDIRKFYTNDIRFLEQF

SEQ ID NO: 188334 - protein, 355 aa, Unknown
  Bacterial polypetide isolated from the Sargasso Sea
MSDIKKIKDEFLERLNEDLNIERVNEIKSELFGKNGKISTSFKNLGSLPAEERKKFASDLNFVKDELQEKINKKIQQIEIKEINSKLENEKIDVTLPERNIVQGKIHPVSQVIDELSSIFSEIGFSVEEGPDVENEHYNFTALNTPDNHPARDMHDTFYLDDKKEFLLRTHTSPVQVRTMLKGKPPFKIIAPGRTYRSDSDQTHAPMFHQVEGLHIDKNINMGHLKGCLDYFIKSFFEVDKIKMRFRPSHFPFTEPSAEVDIGYELKDGKIVIGEGDKWLEILGCGMVHPNVLKNVKINPDKYQGYAFGIGIDRLAMLKYGINDLRAFFETDYRWLNHFGFDPLDVPSNYRGLSR

SEQ ID NO: 188335 - protein, 165 aa, Unknown
  Bacterial polypetide isolated from the Sargasso Sea
AVLRTHTSNVQIHLMENQDPPLRHICCGRVFRNESVSYKSFCLFNQVEGLVINETSSFAEMKGTLEYFVQEMFGKDTKMRFRPSYFPFTEPSAEVDIWNSKLNQWMEILGCGMVNPNVLTNVGYDNEKYQGFAFGMGIERIAMIKFGIKDIRLFYQNDKRFLEQF

SEQ ID NO: 188336 - protein, 795 aa, Unknown
  Bacterial polypetide isolated from the Sargasso Sea
MKFSESWLREWVNPAVSREALSHQITMAGLEVDGVDAVAAEFSGVVIGEVVECGQHPDADKLRVTKVSVGSGELIDIVCGAPNCRQGLRVAVAMVGAVLPGDFKIKKAKLRGMPSEGMLCSYSELGIDIDSDGIIELPLDAPLGTDLREYLQLDDAVIEVDLTANRADCLGMVGLAREVGVLNRAAVTEPQWQAVTPTIDAKVAINVKESAACPRYLGRVVKNVNVKAATPLWMQEKLRRSGIRSIDPIVDITNFVLVEFGQPMHAFDLAKLTGDIQVRLGNGEEKITLLDGSEVTIPSDTLVIADDARPLALAGVFGGEYSGVSDTTQDILLECAFFAPLAIMGKSRRLGLHTDSSHRFERGVDPEMQHKVMDRATRLVLDICGGEAGPVVEAKSDADLPKPAQILLRRSKLDKILGHHVPDSDVVEILERLGFGVVAGEGSWQVTTATYRFDMAIEEDLIEEVARIYGYNNIPNVAPVASLRMSDHKETDLSLKRVRSLLVARGFQEAVTYSFVDPKLQNLVHPGEQAMVLPNPISSEMSAMRLSMFTGLLTAVGYNQSRQQGRVRLFETGLRFVPDINAESGVRQQAMLGCVITGLQNDEHWAMESKTVDFFDLKGDLEAIIGLTVSASEFSFRVATHSALHPGQCAEILRNDRVIGHIGAIHPSLEKPFGLNGKTIVFELELDALLHTSLPLAQAVSKFPANRRDIAVVVDESVSAGDVMKLIRKVGENQLVGINLFDVYLGKGVEPGKKSLAIALTLQDTTRTLEEKEIAETVESVVSALKTEFNASLRD

SEQ ID NO: 188337 - protein, 327 aa, Unknown
  Bacterial polypetide isolated from the Sargasso Sea
MQQLTEIVEQALVIIDQASDLKALDDIRVDYLGKKGKITDMMKMMGSLSPEEKPAFGQAVNDAKQAIQQKLTERIDGLKSAELEAKLIAEKIDVTLPGRTIDIGGLHPVTRTIERIETFFGELGFTVKQGPEIEDDFHNFDALNISEHHPARADHDTFYFNPKLMLRTQTSGVQIRTMETEKPPLRIISPGRVYRNDYDQTHTPMFHQVEGLLVDENVNFAELKGVLHDFLRNFFEEDLQVRFRPSYFPFTEPSAEVDVMGKNGKWLEVLGCGMVHPNVLRSVGIDPEKYSGFAFGMGVERLTMLRYGVNDLRAFFENDLRFLKQFK

SEQ ID NO: 188338 - protein, 337 aa, Unknown
  Bacterial polypetide isolated from the Sargasso Sea
SKINDIDRQIEKFKIQDKESLEKFRIQFLGSKNILKDLFAEIKNVTPEKRKAIGQSINSLKTKAQAKLESFTEKINEEDEENVKIDLTLPGDNLKLGSRHPLSIVNEKIIDIFGKIGFSVSEGPEVEDDWHNFTGLNLPEEHPARDMQDTFFIEKNPDWLLRTHTSSVQMRVMESNELPIRTITPGRVYRNEAISARAHCFFHQVEGLYIDENVSFADLKQTIQYFAKEMFGERSKIRLRPSYFPFTEPSAEVDVSCSLCETKGCNVCKYTGWLEIMGCGMIDPNVLSNAGIDPEKYSGFAFGMGVERMAMLKYEVKDLRMWSENDTRFLEQFKSAW

SEQ ID NO: 188339 - protein, 230 aa, Unknown
  Bacterial polypetide isolated from the Sargasso Sea
EGPDIEEDWYNFTALNIPPDHPARQEHDTFYLEAKSKGERMVLRTHTSPVQVRTMESTSPPIRIIVPGRTYRCDHDSTHSPMFHQVEGLVVDESTNMSHLKGCLIEFCRAFFSIEDLPVRFRPSYFPFTEPSAEVDIGCSITGGTLKIGHGDKWMEILGSGMVNPRVLENCGIDSKKYQGFAFGMGIERISMLKYGIPDLRTFYDSDIRWMRHYGFRCLDVPTMVGKASR

SEQ ID NO: 188340 - protein, 674 aa, Unknown
  Bacterial polypetide isolated from the Sargasso Sea
MKVSQNWLKNLVEITSTPEDLSEKLSIGGFEVESLEDCSKNVNGVVLGKVLSVLKHEGSDKLSICQVDIGNSKNLQIICGARNIKPNIYVYVATVGTNLNAVDLNIKRSEIRGVMSEGMICSLQELGLEESSEGIEIIDEALALKHELGTPGSDLLQLNDFIYDLAITANRPDGMSVIGIAREISALLESPLNFPELNHKYDIHLLKGIKLCPEAIESNCIYTISCIDGVNGEKLSPNWLKDRIEKSGIKSINLLVDLTNYILLEQGQPLHAFDKDKLSYLIGKEVSPEDFSVRKGKDNERLICLDGKEYDLNDNITVITCCDKPVAIAGVIGGLETSVSNTTSSIYLEGAVFNPATIRKSSKAAGIRTESSSRYEKGISSKNTISAVTRAINLLEEYFSINSPIINTSNLISNENIYIKLRRNRIHKILGPLIINDQLEKRNLSDNEVVDKLTLIGCTLKNKEYGWDVAVIPNRSHDLTREIDLIEEIARLIGYDRFDLKLPNPIKPGKLSSEQLALRKVKNGFIENGFNEVLSYSLVPEDDEKLIKISNPLLLETSCLRDNIWKEHLEIVNRNIKAGQESCYIFEIGNVFQKKTEFIQEEVLNGAIYGNKKFGKWIDSGKDNDLNYYQARGKLKEALSSLNIKIDDKPTDSIDFLHPGRTAKLVIEGKDAGY

SEQ ID NO: 188341 - protein, 336 aa, Unknown
  Bacterial polypetide isolated from the Sargasso Sea
MKKELQNHLDSIKKFNSDKVDKLDDFKIKYLGRKGIVNDLFSKFKEVPDTEKKEVGLKINELKNLVQDKYDELLNKIGSNQDNLSSEDISKPGFPIKSGSLHPITIIKNKVIDIFSQVGFNLSDGPEIEDDWHNFTALNLPKDHPARDMQDTFFIQTNPDILLRTHTSSVQVRYMENNSPPINIISPGRVYRNEAISARSHCLFHQVEGIVVDENISFADLKQMVLYFTKAMFGKSKLRFRPSFFPFTEPSAEVDIYWGLESESDYRLTKGTGWLEIMGCGMVDPKVLENCNIDPEKYSGYAFGLGIERIAMLIYEIPDIRLFFENDVRFLEQFKS

SEQ ID NO: 188342 - protein, 324 aa, Unknown
  Bacterial polypetide isolated from the Sargasso Sea
LDKTIKGLKTSFSQELSKSKTSQDLENFRIKYLGRNGQLASLFEEFNKLPVSEKPRFGKELNILKNQLTNLYQNALGGNNENSVSSDIDFSLPGYNLPDGKIHPLEQITSEIKSIFQSIGFSVAYGPEIDDDYHNFEALNVPKHHPARDMQDTFFINPNAVLRTHTSNVQIHLMENQDPPLRHICCGRVFRNEAVSYKSFCLFNQVEGLVINETSSFAEMKGTLEYFVQEMFGKDTKMRFRPSYFPFTEPSAEVDIWNSKLNQWMEILGCGMVNPNVLSNVGYDNEKYQGFAFGMGIERIAMIKYGIKDIRLFYQNDKRFLEQF

SEQ ID NO: 188343 - protein, 332 aa, Unknown
  Bacterial polypetide isolated from the Sargasso Sea
RELGKKGRITKLLSELGKLNQEERKKLGPEINDLKNKVLEEIEEKKEFFLDQTLNKKLLEEKVDVTLPVKSSQNTNGRIHPVSQVLDEITEIFGSLGYEIADGPDIETEYYNFNALNIPESHPARQMHDTFYFDEFDKDQGQSVLRTHTSPVQVRTMEEGEPPFRFISPGRTYRCDSDQTHTPMFHQIEGLSVDKETNLGHLKWTLETFLSSFFEIKNTKIQMRPSYFPFTEPSLEIDVLCDRSGPVLKIGEGSDWLEVAGAGMVHPNVLKSANIDPDIYQGFAFGFGLDRLAQLKYGIPDLRTFFSGDIRWLRHYGFSALDIPTLSRGLKK

SEQ ID NO: 188344 - protein, 211 aa, Unknown
  Bacterial polypetide isolated from the Sargasso Sea
EHHPARQMHDTFYVNSETDGMQNVMRTHTSPVQIRSMLCQDPPIRLIAPGKTFRCDNDQTHTPMFHQVEGLVIDKESNMGHLKGCLEIFLKSFFETDTLNMRFRPSHFPFTEPSAEVDIGYKKKGNQLIIGEGSDWLEILGCGMVHPNVLRNVNIDPDVYQGYAFGMGIERLAMLKYGISDLRTFFENDIDWNQHYGFSPLNIPTIFGDLS

SEQ ID NO: 188345 - protein, 352 aa, Unknown
  Bacterial polypetide isolated from the Sargasso Sea
MAFAENKIDVLKKIKASKSFEDLEKLRLYYLGKKGLIPEALKGLGSLSIEEKKSKGQELNIIKKEIEEGIKNQRTEIENIEISNKINLESIDVTLPPNISEKGKIHPISQTIFNIIEIFGNLNYAVETGPDIETDFNNFTALNIPEHHPAREMQDTFYVQDNGDKNVLRTHTSPVQVRTMLNTKPPIKIIVPGRTYRSDSDATHAPMFHQVEGLVVDTSSTMVDLKSTLVSFLEEFFEVKNLQYRFRPSYFPFTEPSAEMDVAYTKVNNKIKIGEGDKWLEILGCGMVNPVVLDNCNIDSKQYQGFAFGMGIERLSMLKYGITDLRSFFDPNYRWLDHYGFSILDNQTRSGL

SEQ ID NO: 188346 - protein, 558 aa, Unknown
  Bacterial polypetide isolated from the Sargasso Sea
LKPLDTSPVKTTFKSPIDWRVDLPDMDPPLAPLVVGRYFKGVKNGPSPNWLKERLQAVGLRPISALVDITNYVMMDVGRPLHAYDADKVEGDIFIRLAKNGEKYIALDGKEYVFDEEMIVIGDDKGVDDLAGIMGGERSGCGDGTVNMFLEAAIFDPIRTATTGRKLNIISDARYRFERGLDSTSPFWGSELAARLVLDICGGEASELVVHGAEPDWKKVFTLRYSRIENLTGVKVPEPDCLRILKTLGFEVSGKGERIECAVPPWRADIIGEADLVEEIVRVWGFDEIPMISMLNDNVIPQPALSIRQIREGLAKRSLAVRGMAEAVTYSFLSSRDAILFGGGAEELRLNNPISAELDAMRPSVLPNLISAVGRNSNMGSNDLAIFEVGPQYSDATPAGQQMVAGAIRSGNTGARDWAKSTRPVDLFDIKADALFVLESLSAPTNNLQVDPSGAPGWYHPGRSGAFQLGPKVLGYFGDIHPKVLATMNVDGPTVGFEVFIENIPTTRSKGPSRSLLKLDALQSVNRDFAFIVDQELQAEKLIRAAQGADKALVTAVQ

SEQ ID NO: 188347 - protein, 200 aa, Unknown
  Bacterial polypetide isolated from the Sargasso Sea
MSLSVDSVDIKKRIEGCKNLQEVEAIRLEYLGKKGLIPLEMKLLAKLPIDQKKIKGQELNKLKTFIEDSINHHKILIENKKLEEKLKNEGVDVTLPHNEEVRGKIHPISQTIFSIIEIFGNLNYSVEAGPDIESDFNNFSALNIPPHHPAREMQDTFYVNNPNGEDNVLRTHTSPVQVRTMLKSKPPIKIIVPGRTYRSD

SEQ ID NO: 188348 - protein, 355 aa, Unknown
  Bacterial polypetide isolated from the Sargasso Sea
MSDLKKIRDEFILKLKSKLDLSEINQIKSDLFGKNGLVSSQFKKIGTIVESERKKFASDLNVIKDELQNLINLKIDEVENAEINKKLDKEKIDITLPERPFVRGKIHPVSQTIDEISSIFSEIGFSVEEGPDVENEYNNFTALNTPDNHPARDMHDTFYLDEKKQKLLRTHTSPVQIRTMLKDKPPFKIIAPGRTYRSDSDQTHAPMFHQVEGLHIDKNINMGHLKGCLNYLIKEFFEVDKIKMRFRPSHFPFTEPSAEVDIGYEIKDGKIIIGEGNQWLEILGCGMVHPNVLKNVKVDPAKFQGYAFGIGIDRLAMLKYGINDLRAFFDCDYRWLNHFGFDPLDVPTNYRGLSR

SEQ ID NO: 188349 - protein, 339 aa, Unknown
  Bacterial polypetide isolated from the Sargasso Sea
MSDIKKIKDEYLDKLQGDLNLEKVNKIKTELFGKNGAISNSFKKLGSIPSEDRKKFASDLNFIKDELQEKINNKLQEIETKEINSKLKDEKVDVTLPERDIDQGKIHPVSQVIDEISSIFSEIGFSVEEGPDVENEHYNFTALNTPDNHPARDMHDTFYLDNNKKLLLRTHTSPVQVRTMLKGKPPFKIIAPGRTYRSDSDQTHSPMFHQVEGLHIDKDINMGHLKGCLNYFIKEFFEVDKIQMRFRPSHFPFTEPSAEVDIGYELKDGKIVIGEGDKWLEILGCGMVHPNVLKNVNVNPDKYQGYAFGIGIDRLGMLKYGINDLRAFFETDYRWLKHF

SEQ ID NO: 188350 - protein, 203 aa, Unknown
  Bacterial polypetide isolated from the Sargasso Sea
MIEEINKHIADLEKIKLKDSDELEKFRIKYISKKGIVPFLFSKLKEIPDAQKREVGLKINSIKEKVNEILSKQKKKFAKTSSDQSSDDLTKPANFIKLGSRHPISIVKNKIIDIFLKIGFDISEGPEIEDDWHNFTALNLPEHHPARDMQDTFYINKNPDWLLRTHTSSVQIRHMENNDPPIRTISPGRVYRNEDISARSHCF

SEQ ID NO: 188351 - protein, 425 aa, Unknown
  Bacterial polypetide isolated from the Sargasso Sea
SPEWLQARLRGAGARPVNNIVDATNYVLLELGQPMHAFDLNELRGQSVIVRGASQKETEFVTLDGETRPISTEMLMICDEEAPVAIAGVMGGNNSEVSDRTVDIFLECALFDPKATRTTRRKLGMSTDASYRYERGVDPEGLRSAMERCIHLVLSTAGGELEWPILDCNPVPFESSTVELRVSRIEKLLGIPFEAGYVGELLAPLGFVVENEIDGVLHVRVPGFRSYDVTREVDLIEEVARTHGFDNFPDTLGPQRASSVADHPLFQLEDRLRAVLVGHGMFEVQTPAFCPEGEGDVEVSNPLTTIEPFLRSSLMPSLLRRVEYNMARGNRDVRLFELGTSFHKRGSGEPPLEEPHLAGILAGRREPPHWSREDEEFSMWDLKALVVDIVGRVYGEEVTIESGGVTCPTLLDDDMCIYVREGSGD

SEQ ID NO: 188352 - protein, 498 aa, Unknown
  Bacterial polypetide isolated from the Sargasso Sea
MKFSKSWVMEWVRTELSDNALAEQITMAGLEVDAVEAVAGQFNNVVVGEVVECAQHPDADKLRVTKVNVGESELLDIVCGAPNCRAGLKVCVAKVGATLPGDFTIKKAKLRGQPSHGMLCSFSELGIDVEADGIIELPLDAPIGTDIREYLALNDVSIDVDLTPNRADCLGIAGLAREIGVLNSVDVVEPTWAPAVATIDATFPIRVEAPADCPRYLGRVIKGLNLHAQSPLWMQEKLRRGGIRSIDAIVDITNYLLLEYGQPMHAFDLATLEGELVVRRARSDEPMTLLDGNEVKLKETTLVIADAKGPACMAGIFGGDRTGVSETTTDILLECAFFAPLSITGRARAYGLHTDSSHRFERGVDPQLQAKVMDRATRLLLDICGGECGGEAGPVIEVKSDAHLPKAAPIKLRRTKLDKVIGISVADAQVVEILTRLGMQVTVDADGWTALAPSWRFDIAIEEDLIEEVARIYGYNNIPNLKPAASLAMVEQAEGQVT

SEQ ID NO: 188353 - protein, 139 aa, Unknown
  Bacterial polypetide isolated from the Sargasso Sea
HRGRVYRNDYDMTHTPMFHQVEGLLVDEHASFTELKGILHDFLRNYFEEDLTIRFRPSYFPFTEPSAEVDVMGKNGKWLEVLGCGMVHPNVLRSVGIDPEKYSGFAFGMGVERLTMLRYGVNDLRAFFENDLRFLKQFK

SEQ ID NO: 188354 - protein, 240 aa, Unknown
  Bacterial polypetide isolated from the Sargasso Sea
MTAPKDIFLPSLDRELGSIHPINQVKDQLTDLLKSFGFEVAEGPEVETEEYNFDMLNIPASHPAREMHDTFYVDNKKKLLRTHTSPVQVRCMLKDKPPLAFISPGKVYRKDDDSTHLPMFHQIEGLYVDEDVSFAQLKDLMYKICHSLFGEATKLRFRPSYFPFTEPSAEVDVLFGDKWLEILGCGVVNPKVLENCKIDSSKYSGLAFGLGIERIAMLKYGVNDIRDFYKSNLDFLRQFK

SEQ ID NO: 188355 - protein, 337 aa, Unknown
  Bacterial polypetide isolated from the Sargasso Sea
MSIDQINEIKTELFGKNGLISSKFKKIGSIPETDRKKFASDLNQVKDELQNLITSKISQIEGKKINEKLEKEKVDITLPERPFVRGKVHPVSQTIDEISSIFSEIGFSVEEGPDVEYEYNNFTALNTPDNHPARDMHDTFYLDENKEVLLRTHTSPVQIRTMQKDKPPFKIIAPGRTYRSDSDQTHAPMFHQVEGLHIDTNINMGHLKGCLNYFIKEFFEVEKIKMRFRPSHFPFTEPSAEVDIGYEIKDGKIIIGEGDKWLEILGCGMVHPNVLKNVKVDPSKYQGYAFGIGIDRLAMLKYGINDLRAFFDCDYRWLNHFGFDPLDVPSNYRGLSR

SEQ ID NO: 188356 - protein, 276 aa, Unknown
  Bacterial polypetide isolated from the Sargasso Sea
NAEISDKLKNEKVDVTLPIRPYQQGKIHPVSQVIDEISSIFSEIGFSVAEGPDVETEYNNFTALNTPEDHPARDMHDTFYLEKNKKLLLRTHTSPVQIRAMLDGKPPFKIIVPGRTYRCDSDQTHAPMFHQLEGLHIDKNITMGHLKGCLDYFIKEFFEVKNVKMRFRPSHFPFTEPSAEVDIGYRIENEKIVIGEGNKWLEILGCGMVHPNVLKNAKVDPKKYQGFAFGMGIDRLAMLKYGINDLRAFFETDYRWLSHFGFDPLDVPTNYRGLSK

SEQ ID NO: 188357 - protein, 331 aa, Unknown
  Bacterial polypetide isolated from the Sargasso Sea
MSDLKKIKNELLLKLKSKLNLSEVNQMKSDLFGKNGLVSSQFKKIGTIAETERKKFASELNVIKDELQDLINLKIKEIEKEEIREKLQKEKIDITLPERPFVRGKIHPVSQTIDEISSIFSEIGFSVEEGPDVESEYNNFTALNTPKNHPARDMHDTFYLDEKKERLLRTHTSPVQIRTMLKDKPPFKIIAPGRTYRSDSDQTHAPMFHQVEGLHIDKDINMGHLKGCLNYFIKEFFELDKIKMRFRPSHFPFTEPSAEVDIGYEMKDGKIVIGEGDQWLEILGCGMVHPNVLRNVKVDPIKFQGYAFGMGIDRLAMLKYGINDLRAFFDL

SEQ ID NO: 188358 - protein, 786 aa, Unknown
  Bacterial polypetide isolated from the Sargasso Sea
MIILKSWLNDWINISNIDDNKISEALESLGFEIESTNNIVPNYKNIVVGKVVDIYPHNNADKLRITQVDVGSNTYEIVCGAWNFDVGAIVPVALPKSYIVDNFLIEKREIRGVVSNGMICSAKELGLWDEHEGILLLEDSLAPGTDFSSTYDSQDTSWEIGITPNRGDCMSHLGVARELSNYFDLKISENDYKLKSKIENVLKTNSGKISECNSYVSIEIENFNITDSPFYIRYRLSQVGTRIINNVVDLTNYVLYDIGQPLHAFDRDKIFGTVSVRKAKDNEKILTLDNQKRSLNKNDLVITDNDNPIALAGVMGGLDTEVTENTKNLLIESAYFDKVSIMNTSRKLNLISDASIRFERGIDFNLQLKAINRFINIFSTNQDINYSSPLVDDKKNIKNKSVSFSSNDIYKILGTKIDNKFITKTLNNLDIDHTIKNEDIKFVSPSWRYDLERPIDIIEEIAKHYGFNNFDSTLPIGNNRNNLGDYWNSKSFFSQQLRGKDYQEIQSLSFVDEISNQRFNPEKKYVEVYNPIDSTNMYLRSNLFTSLLNIYQSNLEKNSVSTKYFEINTVFDKGKHEKYENIPNQLYTLGVLTPSRVTNVDLRGEDKTFDIYYVKNLISTLIGEFDVKYLQKPGFHKRLSFLILKDGKQVGFFGQLSYELMDDLNLEDPIYLMELNIENIDSTFKETNNFIPLAQYPFIKFDLSFTVPIDFIASDLISFVVTKLDKNENNIDIFDDYVTEKSRNLGIRISTRNYDQTYSEEEARGILDMLVKEIQDKFKIKLNESQ

SEQ ID NO: 188359 - protein, 173 aa, Unknown
  Bacterial polypetide isolated from the Sargasso Sea
DTLYIDKKLDNLLRTQTSTVQVRHMQENKPPIYIVSPGRVYRSDQLDSTHSPVFHQIEGLAVDDAITFTDLKGTLEFFVKEFFGNNVKTKFIPHFFPFTEPSAEVLVSWKDGDWLEILGCGMVDPNVFENVGFKKGTQGFAFGVGVERLAMLRHNIDHIKNFYDNDLRFLRQF

SEQ ID NO: 188360 - protein, 313 aa, Unknown
  Bacterial polypetide isolated from the Sargasso Sea
MVDLRELIQKVSQAKDKLELQNLKSQFLGKNSQINQEFKKLGSLNEDERKIRASSLNNEKQKITEAINNKLIELENLEINKKLEKNKVDVTLPARERPNGKIHPVSQVIDEISSIFSEIGFSVAEGPDVESEYNNFTALNTPEDHPARDMHDTFYLDNNKKILLRTHTSPVQIRTMLNGKPPFKIIVPGRTYRCDSDQTHAPMFHQLEGLHIDKAITMGHLKGCLDYFVKEFFEVKKIRMRFRPSHFPFTEPSAEVDIGYRLENGRIIVGEGDKWLEILGCGMVHPNVLKNAKVDPKKFQGYAFGMGIDRLAM

SEQ ID NO: 188361 - protein, 167 aa, Unknown
  Bacterial polypetide isolated from the Sargasso Sea
IIAPGRTYRSDSDQTHSPMFHQVEGLHIDKNINMGHLKGCLSYFIKEFFEVDKLQMRFRPSHFPFTEPSAEVDIGYELKDGKIIIGEGNKWLEILGCGMVHPNVLKNVKINPDKYQGYAFGIGIDRLGMLKYGINDLRAFFETDYRWLNHFGFDPLDVPSNYRGLSR

SEQ ID NO: 188362 - protein, 257 aa, Unknown
  Bacterial polypetide isolated from the Sargasso Sea
REFSRGKIHPVSQVIDEISSIFSEIGFSVEEGPDIENEHYNFTALNTPYNHPARDMHDTFYLDNNKELLLRTHTSPVQVRTMLNGKPPFKIIAPGRTYRSDSDQTHSPMFHQVEGLHIDKDINMGHLKGCLNYFIKSFFEVDKIKMRFRPSHFPFTEPSAEVDIGYEIKDGKIVIGEGDKWLEILGCGMVHPNVLKNVKVNPDKYQGYAFGIGIDRLGMLKYGINDLRAFFETDYRWLNHFGFDPLDVPSNYRGLSR

SEQ ID NO: 188363 - protein, 181 aa, Unknown
  Bacterial polypetide isolated from the Sargasso Sea
RAMHDTFYFTNNKLLRTHTSSVQTRVMKDRQPPIRIIAPGKVYRKDSDMTHTPMFHQLEGLFISKNVNFGHLKNTLNIFLKNFFEDDSLQIRFRPSYFPFTEPSAEVDIGYSFSKNKFSWLEILGCGMVHPNVLKTAGINPKVYSGYAFGLGIERLAMLKLEINDLRLFFQNDLRFLTQFR

SEQ ID NO: 188364 - protein, 330 aa, Unknown
  Bacterial polypetide isolated from the Sargasso Sea
MGITPNRADCLGVRGIARDLASAGFGKLKSLNIKNVKGTFKSPKKFVISDELLEKKLVPVVTSRYFKNLNNSKSPKWMQQRLEAIGQRSISALVDITNYIMFDLNRPLHAYDGSKIEGNKLEIRFAKNNEKISTLNEKDYFLSNEDIIISDAKGADDLAGIMGGMRTGVSDETTEMFLEIAVFDPISVSKTGRKINLISDARYRFERGLDQDCPKWVHNYISDLVIDICGGEVSFLEKTGSGPYWSREITFETKQVFNLTGVNVNEITIEKILSDLGFKLNKNKGKWSVLPPPWRNDIDGSADLVEEIIRIYGYENIPEAKLFSKDVIPK

SEQ ID NO: 188365 - protein, 241 aa, Unknown
  Bacterial polypetide isolated from the Sargasso Sea
MSKLGNIDPPIIDQKFGSYHPINETKLFLINFFKEIGFQEVYGPEIETERFNFDMLNIKETHPARQMHDTFYVQNMQSVLRTHTSPVQIRTMLEKEPPFAFTSAGKVYRKDDDATHLPMFHQVEGMYVDKNVTFANLKALIHDLVYSLFGKDTQIRFRPSYFPFTEPSAEVDILSESGKWLEILGCGIVNPVVLENCKIKSDRFSGLAFGLGVERIAMLKYGVNDIRDFYKSNLDFLEKFK

SEQ ID NO: 188366 - protein, 205 aa, Unknown
  Bacterial polypetide isolated from the Sargasso Sea
MIEIIKKHIKEVENFSSESKENSEPFRIKYLGKKGILNELFKKFKDIDANERKVIGKEINILKSKVKKKILEFQSEKNEEGNNLNEDLYKPGYPLEFGSEHPLNIVRKNIIEIFEKIGYCISEGPEIEDDWHNFTALNLPKHHPARDMQDTFFIKRDPDILLRTHTSSVQIRYMEKNPPPIKTISPGRVYRNEDISARSHFFSSG

SEQ ID NO: 188367 - protein, 198 aa, Unknown
  Bacterial polypetide isolated from the Sargasso Sea
MRVSLSWLKQLVQVTDSVDALAHRLSMAGFEEEEIEDLSARAKGVVVGFVKDREKHPNADKLSVCQVDIGSEESIQIVCGAKNVRAGLHVPVAMVGAELPAVNLTIKAGELRGVSSNGMICSLSELGLATESDGIAELDALTDELPALGAPVAPMLGLDDTVLELAITANRPDGLSMVGIAREVAALTGAALTLPVLT

SEQ ID NO: 188368 - protein, 317 aa, Unknown
  Bacterial polypetide isolated from the Sargasso Sea
MAELEDVNEDLKEIESLRSKYLGRKGKVAALFSLMGEASNEERPALGESLNQLKKELTTLFEDKVSEFDRSRQKAEDDSIDLSLPGKEHRLGSIHILEQTLSEIKDIYRSIGFHVAYGPEVDDDYHNFTALNIPEHHPARDMQDTFFIDPGTVLRTHTSNVQVHLMEEQGPPIRYIVPGRVYRNEAIGYKSYCLFHQVEGIYINERVSFGELKGCLEYFVKQMFGPKKKMRFRPSFFPFTEPSAEVDIWDEERQQWMEILGCGMVDPAVLDNVGYDSSRFHGYAFGMGVERIAMLKYKISDIRHFYSGDVRFMEQFV

SEQ ID NO: 188369 - protein, 352 aa, Unknown
  Bacterial polypetide isolated from the Sargasso Sea
MALAEDKNNILNKIKSAVSLDDLEKIRLYYLGKKGLIPESLKGLGSLSIEEKKSKGQELNIIKKLIEETIKDQKINIENKEIEKKLNSETIDVTLPPNISEQGKIHPISQTIFSIIEIFGNFNYVVETGPDIETDFNNFTALNIPDHHPAREMQDTFYINGDENNNVLRTHTSPVQVRTMLNTKPPIKIIVPGRTYRSDSDATHAPMFHQVEGLVLDESSTMVELKSTLVTFLEEFFEVKNLQYRFRPSYFPFTEPSAEMDVAYTKVNNKIKIGEGDNWLEILGCGMVNPIVLENCNIDSKKYQGFAFGMGIERLSMLKYGISDLRSFFDPNYRWLEHYGFSVLDSQTRSGL

SEQ ID NO: 188370 - protein, 355 aa, Unknown
  Bacterial polypetide isolated from the Sargasso Sea
MSDFEKKILEFKNRLNSTQDSKEIEAIRTDIFSKNGFINSQFKKLGSLSEDEKKTFASNINKAKQELLEIFRSKATEVSDKDLNEKIKKEKIDVTLPEKEFKIGKIHPVSQVIDEISCIFSEIGFCVEEGPDVENDYNNFTALNTPEDHPAKDMHDTFYLDENMKTLLRTHTSPVQVRTMLKGKPPFKIIAPGRTYRSDSDQTHTPMFHQLEGLHIDKNINMGHLKGCLNYFIKEFFEVDKIKMRFRPSHFPFTEPSAEVDIGYRIENNKIIIGEGDKWLEILGCGMVHPNVLKNCKVDPKIYQGFAFGIGIDRLAMLKYGINDLRSFFECDYRWLNYYGFDPLDVPTNYRGLSK

SEQ ID NO: 188371 - protein, 355 aa, Unknown
  Bacterial polypetide isolated from the Sargasso Sea
MSDFEKKVLEFKNKLDQTQDVKLVETIRSEIFGKNGFINQEFKRIGTLSADKKKNFASSINKAKQELQNIIRSKENEVLNKQLNEKLEKEKIDVTLPEKEFKIGKIHPVSQVIDEISCIFSEIGFSVEEGPDVENDYNNFTALNTPENHPAKDMHDTFYLDKNMKILLRTHTSPVQVRTMLKGKPPFKIIAPGRTYRSDSDQTHTPMFHQLEGLHIDKNINMGHLKGCLNYFIKEFFEIKKIKMRFRPSHFPFTEPSAEVDIGYRIENNKIIIGEGDKWLEILGCGMVHPNVLKNCKVDSKIYQGFAFGIGIDRLAMLKYGINDLRSFFECDYRWLNYYGFDPLDVPTNYRGLSR

SEQ ID NO: 188372 - protein, 355 aa, Unknown
  Bacterial polypetide isolated from the Sargasso Sea
MSDIKKIKEEYLNKLDNDLDSESVNQIKTELFGKNGQISNSFKTLGSLPNDERKKFASDLNSIKEELQEKINFKLQEIEIKEINSKLENEKLDVTLPEREIKQGKIHPVSQVIDEISSIFSEIGFSVEEGPDVENEHYNFTALNTPDNHPARDMHDTFYLDNNKEILLRTHTSPVQVRTMLNGKPPFKIIAPGRTYRSDSDQTHSPMFHQVEGLHIDKDINMGHLKGCLNYFIKSFFEVDKIKMRFRPSHFPFTEPSAEVDIGYELKDGKIVIGEGDKWLEILGCGMVHPNVLKNVNVNPDKYQGYAFGIGIDRLGMLKYGINDLRAFFETDYRWLNHFGFDPLDVPSNYRGLSR

SEQ ID NO: 188373 - protein, 356 aa, Unknown
  Bacterial polypetide isolated from the Sargasso Sea
MKDFRELETEIKKASDKFTNIESINEFRIKFLGKKGIISLEMKELASLSGDERKQHAEKLNKIKDSVLEIIASKTEELNSEELEKKLNSETLDITLSTSKSYGTIHPISQVIEEVITIFGDLDFFVAEGPEVETDYNNFTALNTSEHHPARQMHDTFYVETETDGMPNVLRTHTSPVQIRSMLKQKPPIRLIAPGKTFRCDNDQTHSPMFHQVEGLVIDQESNMSHLKGCLEIFLKTFFETDKLNMRFRPSHFPFTEPSAEVDIGYTKKGNQLIIGEGEDWLEILGCGMVHPNVLENVNINSNEYQGYAFGMGIERLAMLKYGISDLRTFFDSDLRWNKHYGFSPLNIPSIIGDLS

SEQ ID NO: 188374 - protein, 241 aa, Unknown
  Bacterial polypetide isolated from the Sargasso Sea
MSSLDKIHPPSIELEKGSIHPVNQTKDFLVAFLRDLGFQEVKGPEVETEEFNFDLLNIKKSHPARQMHDTFYIENKSRLLRTHTSPVQIRTMLNEKPPLAITSAGKVYRKDDDATHLPMFHQVEGMLVDENVTFGNLKDLIHKIIYVLFGTDTEIRFRPSYFPFTEPSAEVDILAENGKWLEILGCGIINPIVLENCNIDSKKYSGLAFGLGVERIAMLKYGIKDIRDFYKSNLDFLSQFK

SEQ ID NO: 188375 - protein, 276 aa, Unknown
  Bacterial polypetide isolated from the Sargasso Sea
GKKINEKLEKEKVDITLPERPFVRGKVHPVSQTIDEISSIFSEIGFSVEEGPDVENEYNNFSALNTPENHPARDMHDTFYLDENKEVLLRTHTSPVQIRTMLKDKPPFKIIAPGRTYRSDSDQTHAPMFHQVEGLHIDTNINMGHLKGCLNYFIKEFFEVEKIKMRFRPSHFPFTEPSAEVDIGYEIKDGKIIIGEGDKWLEILGCGMVHPNVLKNVKVDPSKYQGYAFGIGIDRLAMLKYGINDLRAFFDCDYRWLNHFGFDPLDVPSNYRGLSR

SEQ ID NO: 188376 - protein, 283 aa, Unknown
  Bacterial polypetide isolated from the Sargasso Sea
MALSVDAVDIKKRIESCKNLQEVEGIRLEYLGKKGLIPSEMKLLGKLSIDERKLKGQELNKLKSVIEEAIDNQKSFIENQEIEKKLQNENIDVTLPQLEISNGKIHPISQTIFSIIEIFGNLNYSVEAGPDIESDFNNFSALNIPPHHPAREMQDTFYVQNSDGEDNVLRTHTSPVQVRTMLKTKPPIKIIVPGRTYRSDSDSTHTPMFHQVEGLVVNKDATMADLKSTLITFLKEFFEIENLKYRFRPSYFPFTEPSAEMDVAFTKKNNVLKIGEGDEWLEI

SEQ ID NO: 188377 - protein, 360 aa, Unknown
  Bacterial polypetide isolated from the Sargasso Sea
MDHISKLKDRYLLRIGSSGSELELEQVRLDALGKKGEITQKMRELGTMPSDKRQIMGPLLNNLKESVNQALRLRKDELAEINLESRLKSEWIDISRPARESCEGSIHPVSQVTEEVITIFGDLGFEVADGPQIESDYYNFDALNIPPDHPARQEFDTFYLSEEGEDVGPLNVLRTHTSPVQIRHMEQVKGPCRIIAPGRVFRSDYDQTHTPMFHQVEGLAVGQNVSMGNLKWVLEEFCKAFFEVNSIQLRFRSSHFPFTEPSAEVDIKCCWKENQLKIGEGEDWMEILGSGMVHPNVLRAVDIDPEVYQGFAFGLGIDRIAMLKYGIPDLRTFFDSDIRWLRHFGFSARDFPSIHAGISR

SEQ ID NO: 188378 - protein, 327 aa, Unknown
  Bacterial polypetide isolated from the Sargasso Sea
MPDNLSDLSKSATQEINECSSTTELDSLRVKYLGKKGVITIALKSVSSVDPKDRPGYGKKINELKSLIQGTLSQKRASLQKKEINQSIDEKKIDVSLPGRSNFGGHRHPVTKTLLEIEEIFYGAGFAVEDGPEIEDEYHNFTALNIPSNHPARAMHDTFYFNSEFLLRTHTSPIQIRSMEKEGVPIRVIAPGKVYRRDSDITHTPMFHQIEGLVIDKGINFSHLKGILHQFIDTFFEENTEVRFRPSYFPFTEPSAEVDILSKENKWLEILGCGMVHPKVLENLGINTEIYSGYAFGMGVERLAMLKYGIKDIRSFYENDFNFLNQF

SEQ ID NO: 188379 - protein, 174 aa, Unknown
  Bacterial polypetide isolated from the Sargasso Sea
MSDLKKIRDEFIRKLKGKLDLAELNQIKSDLFGKNGLVSSQFKKIGTIDASERKKFASDLNVIKDELQDLINLKINEIQKANINEKLEKEKIDVTLPERSFVRGKIHPVSQTIDEISSIFSEIGFSVEEGPDVENEYNNFTALNTPDNHPARDMHDTFYLDDKKERLLRTHTSP

SEQ ID NO: 188380 - protein, 796 aa, Unknown
  Bacterial polypetide isolated from the Sargasso Sea
MRISIDWFKEFVKTNDSTEDIANTLTMLGLEAENPVDITQLEDIIIGEVVECKKHPNADRLKQCKVSDGKLEIPIICGAPNVDKGQKIALAPVGASLPGGINIKKAKIRGEESQGMICSEKELGISDEHEGIMVLPSDAKIGQKFKDFYLSSYSTIDLDITPNRADCFSHFGVARDYAAKKGLKIKSPQYDPRSFKSNLALKKINVSIENPDECPRYIAGIVKNIKVKDSPKWLRQRLESIGQRSINNIVDISNYVMMEIGQPTHIFDYEKFGSKEILIRRGKKNEKLTTLDEIEREVSPNELLITNGKNPVAIAGVMGGLNSAVTSSTTTVIIESAYFDPPTIRKSAKSVNMSTDASKRFERGADPNAAEHAFWRIISLLEEYAEGEWVPGLVDAYPKAIKPASILLRKEKLDLISGLSIKDNYVHSSLKMLGCIVEKEGDNWKCNAPTWRPDLEREIDLIEEIIRLYGYDKIESTYHYQSLMENNIIDPHLCIDKICNTLHGLGFTQIFSNTLLSEKETSINGIKTINVMNPLSDKMTHLRSSLIPGLLNTADFNHNNGRKDLMLFEIGNVFNKTGKGLKGINENFQLSGIILGDLLHPSVHQSNAIKSDFFAIKGLVSTLLNHLQIGKVEIDTLNTDLPQYEKSFLINIDKTSLGHYGKINSKILHILNLDISNIYAFEINLDHLIGMINQSSLSFNPIIYYPTVERDINFVLDEKVVVGDVLKSILNKNNQIIKNVNPQNIFRHSSIGKNKKSVTFKLIFQHPLKTLEDKDVNLVIDEIIKVVSKDFGAKLR

SEQ ID NO: 188381 - protein, 331 aa, Unknown
  Bacterial polypetide isolated from the Sargasso Sea
MNLDSLKKKISDLESNAKTEFGSANDKLELDNIYRSYLGKKGEVNILLKSLGSLPQEKRKEAGKLLNNLKGDLEKNYALTSSSLNDKANLSRLEKDKLDISLPGFSSRKGSIHPVTRTIRDVCDFFEQMGFDVEAGPEAEIDYYNFEALNVPEDHPAKDMHDTFYLNNEGLLRTHTSPVQIRTMENSEAPHRIICPGKVYRKDSDLTHTPMFHQIEGLVVEEGASFAQLKGLLNDFLTDFFGEEVELRFRPSYFPFTEPSAEVDIRWKKNWLEVLGCGMVHPNVLKSVGVDNKKYSGFAFGLGVERMAMLKYNIPDLRAFFENDIRFLDQF

SEQ ID NO: 188382 - protein, 298 aa, Unknown
  Bacterial polypetide isolated from the Sargasso Sea
MSEIKNIRDQFISKLENDLSIDQINEIKTDLFGKNGLISSKFKTIGSIPETDRKKFASDLNQVKDELQNLITSKINEIEGKKINEKLEKEKVDITLPERPFVRGKVHPVSQTIDEISSIFSEIGFSVEEGPDVENEYNNFTALNTPDNHPARDMHDTFYLDENKEVLLRTHTSPVQIRTMLKDKPPFKIIAPGRTYRSDSDQTHAPMFHQVEGLHIDTNINMGHLKGCLNYFIKEFFEVEKIKMRFRPSHFPFTEPSAEVDIGYEIKDDKIIIGEGDKWLEILGCGMVHPNVLRNVKV

SEQ ID NO: 188383 - protein, 330 aa, Unknown
  Bacterial polypetide isolated from the Sargasso Sea
MPEVNTDKIFAAFLLRLEEVAQIEDFDDIEKEFLGKNSLLSEERKSLSSLNEVSRKKYGKLLQDLSNNITSKLEEEKTKFKSKFFIQSELNDNNDISIDWYKNLGSKNHVLTNVMNEVVDIFAAIGYTVSTGPEAETSWHNFDALNTPDWHPARYESDTLYLDNKLEKLLRTQTSTVQVRHMQNNKPPVYIVAPGRVYRSDQLDATHSPVFHQIEGLAVDENLTFSDLKGTLEYFVKEFFGKDLKTKFIPHFFPFTEPSAEVLVSWKDGEWLEILGCGMVDPNVFKHVGYDTDSQGFAFGVGVERLAMIRYGIDHIKNFYENDLRFLRQF

SEQ ID NO: 188384 - protein, 240 aa, Unknown
  Bacterial polypetide isolated from the Sargasso Sea
MSEPKDIFIPTLDRELGSIHPINQVKFELIKLLTSFGFEVAEGPEIESEKNNFDMLNIPATHPAREMHDTFYVGGKKNVLRTHTSPVQVRCMLRNKPPISFISPGKVYRKDDDSTHLPMFHQIEGIYIDQGVSFAHLKDLIYKICSSLFGEKIKIRFRPSYFPFTEPSAEVDILFGKKWLEILGCGVVNPKVLSNCKIDPKKFSGLAFGLGIERIAMLKYGVKDIREFYKSNLDFLRQFK

SEQ ID NO: 188385 - protein, 206 aa, Unknown
  Bacterial polypetide isolated from the Sargasso Sea
MTAPKDIFLPSLDRELGSIHPINQVKDQLTDLLKSFGFEVAEGPEVETEEYNFDMLNIPASHPAREMHDTFYVDNKKKLLRTHTSPVQVRCMLKDKPPLAFISPGKVYRKDDDSTHLPMFHQIEGLYVDEDVSFAQLKDLMYKICHSLFGEATKLRFRPSYFPFTEPSAEVDVLFGNKWLEILGCGVVNPKVLENCKIDSSKYSGL

SEQ ID NO: 188386 - protein, 346 aa, Unknown
  Bacterial polypetide isolated from the Sargasso Sea
MKEKIQELRNSGLGKLEKLVTTDQLSDWHRDFLGRKGELTLLLKQLGELPAEERPAAGKEVNRLKLELQEAFDTNQDRVRQQQLQQELDSDDLDVTLPGRPCSPGHLHLTTQTLRKIYRIFQEMGFQVYEAPDVETDEYNFQLLNIPEYHPARDMWDTFWVNDEVVLRTHTSPGQIRAMREYHPNPIRVILPGKCYRYEQITPRSEHQFFQVEGLAVGRNIRLTDLIGVMTEFAKKMYGQQRQIRIRGSYFPFTEPSIEIDMSCTCEGAGCRLCKKTGWLEIAGAGMVHPVVLSNGGYDPEEWNGFAFGMGVERPAMLKHGIDDIRYFYSNDLRFLRPVLKIVSCN

SEQ ID NO: 188387 - protein, 304 aa, Unknown
  Bacterial polypetide isolated from the Sargasso Sea
MQFPESWLREFCNPPLTTAELAETLTMAGLEVEELRPVAPPFTKIVVGEIKEAVQHPDADRLRVCQVDVGQGALLNIVCGAPNARVGIKVPCALVGAELPPGDDGKPFLIKVGKLRGVESQGMLCSARELKLSEDHGGLLELDAAAPVGQDIRAYLNLDDTLFTLKLTPNLAHCLSVYGIAREVSALTGVPLQQPSFPAVAAKLSDKLSVKVSAPDLCGRFSGRIVRNVNTRAATPQWMLDRLARCGQRGVSPLVDISNYVMFELGRPSHIFDLDKIHGGLDVRWGKPGEQLKLLNGNTITVDD

SEQ ID NO: 188388 - protein, 133 aa, Unknown
  Bacterial polypetide isolated from the Sargasso Sea
ATHSPMFHQCEGLWIGENVSFKDLKVIFTDFCRTFFESDDLVLRFRPSFFPFTEPSAEIDIQFQTGPLAGRWLEVAGSGQVHPNVVRNMGLDPEKYIGFAFGMGPDRLTMLRYGVNDLRLFFDGDIRFLSQFQ

SEQ ID NO: 188389 - protein, 355 aa, Unknown
  Bacterial polypetide isolated from the Sargasso Sea
MSDFEKLKEDFKNKLARAQNSKEVDLIRAEIFSKNGFINSEFKKLGSLTEEDKKKIATKINSAKQELTKLFNEKSLNLVGSEIDERIKKEKDDVTLPEKDFRIGKIHPVSQVIDEISSIFSEIGFSVEEGPDVESEYYNFTALNTPENHPAKDMHDTFYVEENMKTLLRTHTSPVQVRTMLKGKPPFKIIAPGRTYRSDSDQTHTPMFHQLEGLHIDKNITMGHLKGCLNYFVKEFFEVDKIKMRFRPSHFPFTEPSAEVDIGYRIEKNKIVIGEGDKWLEILGCGMVHPNVLKNSKIDSNKYQGFAFGIGIDRLAMLKYGINDLRSFFECDYRWLNYYGFDPLDVPTNYRGLSK

SEQ ID NO: 188390 - protein, 327 aa, Unknown
  Bacterial polypetide isolated from the Sargasso Sea
MGDNLSDLSNSAIQEINECSSSNDLESIRVKYLGKKGTVTAALKSLSEIDPRDRPAHGKRINEIKTLIQEKLSERKASIQKQEINQNIENKMIDVTLPGRVNFQGHRHPVTKTLLEIEEIFYGAGFVVEDGPEIEDEYHNFTALNIPHNHPARAMHDTFYFNSEYLLRTHTSPIQIRSMEKDGVPIRVIAPGKVYRRDSDITHTPMFHQIEGLVIDKGINFSHLKGILHQFINTFFEENTDVRFRPSYFPFTEPSAEVDILSKDNKWLEILGCGMVHPKVLENLGINTEIYSGYAFGMGVERLAMLKYGIKDIRSFYENDLNFLNQF

SEQ ID NO: 188391 - protein, 386 aa, Unknown
  Bacterial polypetide isolated from the Sargasso Sea
KNLQIICGARNIKSDIYVYVATVGAKLKAVDLTIKRSEIRGVMSEGMICSLQELGLEDSSDGIEIIDEDLALKHELGTPGADLLQLNDFIYDLAITANRPDGMSVIGIARETSALLESTLNFPELNHKYNIQLLKGIKLCPEAITSNCIYTISCIDGVDGDKLSPKWLKDRIEKSGIKSINLLVDLTNYILLEQGQPLHAFDKEKLSNLIGKEVSPEDFSLRKANDNESLICLDGKKYELNENITVVTCCDKPVAIAGVIGGLETSVSNTTSSIYLEGAVFSPVTIRKSSKAVGIRTESSSRYEKGISSKNTISAVTRAINLLEEYFSINSPIINTSNLKNNEDIFIKLRRIRIHKILGPLIINDQFEKRNISDTEIIDKLTLIGC

SEQ ID NO: 188392 - protein, 236 aa, Unknown
  Bacterial polypetide isolated from the Sargasso Sea
FQKIGFSVEEGPDVEDDYNNFTALNTPENHPAKDMHDTFYLDKDMKTLLRTHTSPVQVRTMIKGKPPFKIIAPGRTYRSDSDQTHTPMFHQLEGLHIDKNINMGHLKGCLNYFIKEFFEVDKIKMRFRPSHFPFTEPSAEVDIGYRLENNKIIIGEGDKWLEILGCGMVHPNVLKNCKVDPKKYQGFAFGIGIDRLAMLKYGIKDLRSFFDCDFRWLNHYGFDPLDVPTNYRGLSR

SEQ ID NO: 188393 - protein, 282 aa, Unknown
  Bacterial polypetide isolated from the Sargasso Sea
KIQEIETKEINLKLEKEKIDVTLPERDIEIGKIHPVSQVIDEISSIFSEIGFSVEEGPDVENEYNNFTALNTPDNHPARDMHDTFYLDNNKELLLRTHTSPVQVRTMLKGKPPFKIIAPGRTYRSDSDQTHAPMFHQVEGLHIDKNIHMGHLKGCLNYFIKEFFEVDKIKMRFRPSHFPFTEPSAEVDIGYEIKNGKIVIGEGDKWLEILGCGMVHPNVLKNVKVNSSKYQGYAFGIGIDRLGMLKYGINDLRAFFETDYRWLTHFGFDPLDVPSNYRGLSR

SEQ ID NO: 188394 - protein, 147 aa, Unknown
  Bacterial polypetide isolated from the Sargasso Sea
MSGIEVDGYDSFNSKITGKDSIIKLDITPNRGDCFSVYGVARELAVINNLKLKHPKFKSIENSFKEDLRIKVCKEAPIYVGRSIKNINLKTKTLPLVAERLALSDQKLIDPVVDITNYILLELGQPLHAFDRDKLEGNINVRKAKKR

SEQ ID NO: 188395 - protein, 171 aa, Unknown
  Bacterial polypetide isolated from the Sargasso Sea
DTFYFNSEFLLRTHTSPIQIRSMEKEGVPIRVIAPGKVYRRDSDITHTPMFHQIEGLVIDKGINFSHLKGILHQFIDTFFEENTEVRFRPSYFPFTEPSAEVDILSKENKWLEILGCGMVHPKVLENLDINTEIYSGYAFGMGVERLAMLKYGIKDIRSFYENDFNFLNQF

SEQ ID NO: 188396 - protein, 330 aa, Unknown
  Bacterial polypetide isolated from the Sargasso Sea
MAEINLDKIYSSFLLALEESHDSESLSDLQKEYLGKNSVISEQRKNISNLSDLDKKKFGKIIKDVSEKINTDIENKKIVIKKDKYENKENSENVDISIDWLESTGTKEHVISSVMNEVVQIFSSIGYTVAHGPEAETSWHNFDALNTPVWHPARYESDTLYIDKKLDNLLRTQTSTVQVRHMQENKPPIYIVSPGRVYRSDQLDSTHSPVFHQIEGLAVDDAITFTDLKGTLEFFVKEFFGNNVKTKFIPHFFPFTEPSAEVLVSWKDGDWLEILGCGMVDPNVFENVGFKKGTQGFAFGVGVERLAMLRHNIDHIKNFYDNDLRFLRQF

SEQ ID NO: 188397 - protein, 334 aa, Unknown
  Bacterial polypetide isolated from the Sargasso Sea
MHIVDLKSLKQKISELKSDSSESITLCRDKESLDKTYKSYLGKSGQVNSLLKSLGDLPNENRREAGKLLNDLKSDIENLYKIKISEISKAANELKLANQKIDVGLPSVYQEDGSVHPVTKTIDEISSFFESIGFEIESGPEIETDYYNFEALNVPEDHPAKDMHDTFYLKDSGLLRTHTSPVQIRTMENKSPPHRIICPGKVYRKDSDLTHTPMFHQIEGLVVEEGASFAQLKGLLNDFLQDFFGREVELRFRPSYFPFTEPSAEADIRWEQNWLEVLGCGMVHPNVLEMVGVDTKKYSGFAFGLGVERMAMLKYDIPDLRLFFENDYRFLKQF

SEQ ID NO: 188398 - protein, 353 aa, Unknown
  Bacterial polypetide isolated from the Sargasso Sea
MQFSRNWLKDFIDLNLSTEDICSQLTMAGIEVDGYDVFNSKLTGKDSVIKLDITPNRGDCFSVYGVARELAVINDLKLKKPASSGIESSFKEDIKIKVCPEAPRYVGRSLKNIDLKAETLPLIAERLILSDQKLIDPVVDVTNYILLELGQPLHAFDREKLEGNISVRKAKKDERLTLLDDQKINLSEDCLVISDDLKAIALAGIMGGKNTCVTHSSKSIFLESAFFQPSAVRGRARRFGFQTDASIRFERGVDYEIQELAIERASAILHETLGGEFGQITESKLTNALPKPKKVSLDLNKANRLLGTNITSKTAKKYFTGLGMNPNNKSRKLDISSPSWRYDIEIEADLVEE

SEQ ID NO: 188399 - protein, 129 aa, Unknown
  Bacterial polypetide isolated from the Sargasso Sea
GCLDYFVKEFFEVKNIRMRFRPSHFPFTEPSAEVDIGYRLENGRIIVGEGDKWLEILGCGMVHPNVLKNAKVDTKNFQGFAFGMGIDRLAMLKYGINDLRSFFEADYRWLNYFGFDPLDVPTNYRGLSR

SEQ ID NO: 188400 - protein, 355 aa, Unknown
  Bacterial polypetide isolated from the Sargasso Sea
MSDLKKIKDEFLSKLKGKLDISEINQIKSDLFGKSGLISKQFKKIGSIAESERKKFASDLNIIKDELQDLISSKLNELESAEINKKLEKEKIDITLPERSFVRGKIHPVSQTIDEISSIFSEIGFSVEEGPDVENEYNNFTALNTPENHPARDMHDTFYLDEKKQKLLRTHTSPVQIRTMLKDKPPFKIIAPGRTYRSDSDQTHSPMFHQVEGLHIDKNINMGHLKGCLNYFIKEFFEIDKIKMRFRPSHFPFTEPSAEVDIGYEMKDGKIIIGEGDQWLEILGCGMVHPNVLKNVKVDPSKFQGYAFGIGIDRLAMLKYGINDLRAFFDCDYRWLNHFGFDPLDVPTNYRGLSR

SEQ ID NO: 188401 - protein, 322 aa, Unknown
  Bacterial polypetide isolated from the Sargasso Sea
LGKKGIIPEALKGLGSLSIDEKKSKGQQINIIKKFVEENIREHKILLDNSEISKKINQESIDVTLPPNIKTTGKIHPISQTIFNVIEIFGNLNYSVETGPDIETDFNNFTALNIPEHHPAREMQDTFYLEGDQENNVLRTHTSPVQVRTMINNKPPIKIIVPGRTYRSDSDATHAPMFHQVEGLVVDKNSTMVDLKSTLVSFLEEFFEIKNLQYRFRPSYFPFTEPSAEMDVAYTKVNNKIKIGEGNDWLEILGCGMINPIVLENCKIDSKIYQGFAFGMGIERLSMLKYGITDLRSFFDLNYRWLDHYGFNILDNQTRSGI

SEQ ID NO: 188402 - protein, 241 aa, Unknown
  Bacterial polypetide isolated from the Sargasso Sea
MSNKKDISPPEIINDKGALHPINHMKDSILTLLSSFGFEIIDGPEVETEEFNFDMLNIKKTHPARQMHDTFYIENKSNLLRTHTSPVQIRGMLDNKPPLAFISGGKVYRKDDDATHLPMFHQIEGILVDQNISFAHLKDLIYKIIFSLFGEGVKLRFRPSYFPFTEPSAEVDILSKEGNWLEILGCGIVNPVVLENCKIDSNEYSGLAFGLGIERIAMLKHGVDDIREFYKSNLDFLSQFK

SEQ ID NO: 188403 - protein, 355 aa, Unknown
  Bacterial polypetide isolated from the Sargasso Sea
MSDIKKIKDEYLNKLDSDLNLESVNQIKTELFGKNGQISNSFKSLGSLPTDERKKFASDLNSIKDELQDKINSKLHEIETREINSKLENEKVDVTLPEREFNQGKIHPVSQVIDEISSIFSEIGFSVEEGPDVENEHYNFTALNTPDNHPARDMHDTFYLNNNKELLLRTHTSPVQIRTMLNGKPPFKIIAPGRTYRSDSDQTHSPMFHQVEGLHIDKETNMGHLKGCLNYFIKSFFEVDKIKMRFRPSHFPFTEPSAEVDIGYEIENGKIVVGEGDKWLEILGCGMVHPNVLKNVKVNPDKYQGYAFGIGIDRLGMLKYGINDLRAFFETDYRWLNHFGFDPLDVPSNYRGLSR

SEQ ID NO: 188404 - protein, 324 aa, Unknown
  Bacterial polypetide isolated from the Sargasso Sea
MRLIALSDLDKLHADDDQLENWRISYLGRNGKLSSLMKILATIPNEDKRLVGPKINDLKVQLNKTFVAHKNNINKTEDGSDYFDNSLPGLNLSAGNYHPTTLIIREICEAFGSMGFEILEGKEIETEKYNFDLLNIPSDHPARDQWDTIWLNASTEGEKHLLRTHTSPMQARIMENKKPPIRVVVPGKCYRYEATDATHEWEFHQIEGLAVDKDISFSELKGTLFEMARKIFGSDQKVRFRCDFFPFVEPGVDMSILWDGKWIEILGAGMVHPKVLSGVGYDPSEVSGFAFGIGPERVSMLKNKIKDIRNFHINDLRFLSQFVR

SEQ ID NO: 188405 - protein, 237 aa, Unknown
  Bacterial polypetide isolated from the Sargasso Sea
MHKVDLKSLKQKISTLKSESTDLINSSNDKESLEKAYKSYLGKSGEVNLLLKSLGSLPQEKRKEAGMLLNQLKSGIDNSYKEKLSILSKAENELRLGNQKIDITLPSVSSADGSLHPVTQTISEISNFFESMGFGIESGPETETDYYNFEALNVPEDHPAKDMHDTFYLKDSGLLRTHTSPVQIRTMEDNEPPHRIICPGKVFRKDSDLTHTPMFHQIEGLVVEEDASFAQLKGLLN

SEQ ID NO: 188406 - protein, 338 aa, Unknown
  Bacterial polypetide isolated from the Sargasso Sea
MIKEIKKHLTDLEKIKLTNLDELEKFRIKYISKKGIVPYMFSQLKDVPNKDKREVGLQINSVKQKVNEIISLHKEKFTTKKSNDSYEDLTKPAEFLKLGSRHPISIVKNKIIDIFLKIGFDISEGPEIEDDWHNFTALNLPEHHPARDMQDTFYLNKNPDWLLRTHTSSVQIRHMENNEPPIRTISPGRVYRNEDISARSHCFFHQVEGLYIDEGVSFVDLKQTLLHFTKELFGKSKIRLRPSYFPFTEPSAELDIYWGLESEADYRITKGTGWLEILGCGMVDPNVLKNCKIDSEKFSGFAFGLGIERIAMLLYQIEDIRTLYENDLRFLNQFNNSI

SEQ ID NO: 188407 - protein, 262 aa, Unknown
  Bacterial polypetide isolated from the Sargasso Sea
VTLPIRPYQQGKIHPVSQVIDEISSIFSEIGFSVAEGPDVETEYNNFTALNTPEDHPARDMHDTFYLEKNKKLLLRTHTSPVQIRAMLNGKPPFKIIVPGRTYRCDSDQTHAPMFHQLEGLHIDKNITMGHLKGCLDYFIKEFFEVKNVKMRFRPSHFPFTEPSAEVDIGYRIENEKIVIGEGDKWLEILGCGMVHPNVLKNAKVDPKKYQGFAFGMGIDRLAMLKYGINDLRAFFETDYRWLSHFGFDPLDVPTNYRGLSK

SEQ ID NO: 188408 - protein, 809 aa, Unknown
  Bacterial polypetide isolated from the Sargasso Sea
MQFPESWLRTFVDPQLTTDELSHALTMAGLEVESLSKAAPPTSKIVVGRVLEVVKHPDADKLNVCQVDAGTGATLNIVCGAPNVAPGIKVPVALVGAELPPAEEGGKPFAIKLSKLRGVESQGMLCSARELKLSEDHSGLLVLPEDTPVGQDIRETLNLDDTIFEIKLTPNKADCLSVFGIARETAAITGAPLTPVDIRPVRVELDETLPVRIAAPDLCGRFSGRVIRGVNARAKTPQWMVERLERSGQRSVSALVDISNYVMFELGRPSHVFDLDKIHGGIEVRWGKRGESLKLLNGSTVELDETVGVISDDRQVESLAGIMGGDSTAVTLDTTNIYLEAAFWWPDSIRGRARKYNFSTDAAHRFERGVDYATTVEHVERITQLILEICGGKAGPVDDQAVNLPQRAPVKMRVSRANRIIGVQIGADEIASIFTRLGLPFEREDDAFLVTPPSHRFDIEIEEDLIEEVARIYGFEKIPARPPVATSEMRATNETRRSIHDIRHALAARDYAETVNFSFVDAEWEQDFAGNDHPIRLLNPIASQLSVMRTTLFGSLISVLRHNLNRRADRVRVFEAGRVFLTDTAAKAGELTVEGYVQPKRVGALAYGPALDEQWGTATRAVDFFDVKGDLEALLAPATARFVKAEHPALHPGRSARIEVDGRAVGWIGELHPRLMQKYELPHAPVMFEVDADALIARALPTPTDVSKFPPVRRDIAVVVDQAVEVQALFDEMKKALAEEACRFVQKVVLFDEFRAKSNTSGGLAAYEKSLAFRVTLQDAAGTLQDEVVDQAIQTLVERMARTGARLRG

SEQ ID NO: 188409 - protein, 340 aa, Unknown
  Bacterial polypetide isolated from the Sargasso Sea
MGSMDLDQIVADAQQSFEQAADITTLENEKARFLGKSGALTELLKGLGKLDPEARKTEGARINVAKQQVEAALTARRQALADALLNQRLTAEAIDVTLPGRGAGAGSLHPVMRTWERVEQIFGSIGFDVADGPEIETDWYNFTSLNSPENHPARSMQDTFYVEGKDADGRQLLLRTHTSPMQVRYARMNRPPIKVIAPGRTYRVDSDATHSPMFNQVEGLWIDENISFADLKGVYTDFLKKFFERDDILVRFRPSYFPFTEPSAEIDMMFEQGKNAGKWLEISGSGQVHPTVIRNMGLDPERYIGFAFGSGLERLTMLRYGVQDLRLFFENDLRFLRQFA

SEQ ID NO: 188410 - protein, 316 aa, Unknown
  Bacterial polypetide isolated from the Sargasso Sea
MTIKAGELRGLASNGMICSLTELGLTEQSDGIAILDELGESLPPNGSPVAPLLGLDDTVLELAITANRPDGLSMVGIAREVAALTGGRLSLPELDLNPSTTPLTTELDGCFYSITKIEGVDGSKPSHTWLQQRLERGGVNSVNAVVDVTNLVMLEQGQPLHAFDADALEQLTGQPVDAKSFAVRSARDGEIFVGLDDQKRNLDSRVQVVTCHDRPVAVAGVMGSLESGVTAGTRNIWLESALFAPPRVRQSARALGLRTDASSRFEKGLPVEMTLPCSARASALLSHEFSCSESGRWVGGNGPAEAEPVLLRRSAL

SEQ ID NO: 188411 - protein, 211 aa, Unknown
  Bacterial polypetide isolated from the Sargasso Sea
MSDIKKIREEYINKLNQDLDLNHINQIKTELFGKNGKVSNEFKKIGSISEDQRKKFASDLNIIKDELQNIISKKIQDFEIMKINLKLKNEKVDVTLPERTFYKGKIHPVSQVIDEISSIFSEIGFSVEEGPDVENEYNNFTALNTPDNHPARDMHDTFYLDEDKKFLLRTHTSPVQVRTMLKGKPPFKIIAPGRTYRSDSDQTHAPSSSSR

SEQ ID NO: 188412 - protein, 254 aa, Unknown
  Bacterial polypetide isolated from the Sargasso Sea
KIVIKKDKYENKENSENVDISIDWLESTGTKEHLISSVMNEVVQIFSSIGYTVAHGPEAETSWHNFDALNTPVWHPARYESDTLYIDKKLDNLLRTQTSTVQVRHMQENKPPIYIVSPGRVYRSDQLDSTHSPVFHQIEGLAVDDAITFTDLKGTLEFFVKEFFGNNVKTKFIPHFFPFTEPSAEVLVSWKDGDWLEILGCGMVDPNVFENVGFKKGTQGFAFGVGVERLAMLRHNIDHIKNFYDNDLRFLRQF

SEQ ID NO: 188413 - protein, 326 aa, Unknown
  Bacterial polypetide isolated from the Sargasso Sea
MIVLKSWLNDWINISNIDDSNISEALESLGFEIESTNKIEPNYKNIVVGKVVDIYPHNNADKLRITQVDVGSNTYEIVCGAWNFDVGAIVPVALPKSHIVDNFLIEKREIRGVVSNGMICSARELGLWDEHEGILLLEDSLAPGTDFSSTYDSEDTSWEIGITPNRGDCMSHLGVARELSNYFDIKISENDFKLKSKIENVLKTNSGKISECNSYVSIEIENFNITDSPFYIRYRLSQVGTRIINNVVDLTNYVLYDIGQPLHAFDRDKIFGTVSVRKAKDNEKILTLDNQKRSLDKNDLVITDNDNPIALAGVMGGLDTEVTENT

SEQ ID NO: 188414 - protein, 176 aa, Unknown
  Bacterial polypetide isolated from the Sargasso Sea
MQQLEEVVGQARAEIEGVSDIAALDEIRVKYLGKKGFFTEQMKGLGALSAEERPAAGAVINQAKQQVQDALNERREALEVAVLNQKLAAETIDVSLPGRRIENGGLHPVTRTIERIERLFGEMGFKVARGPEIEDGFHNFDALNIPAHHPARTDHDTFYFNPDLMLRTHTSGVQIR

SEQ ID NO: 188415 - protein, 396 aa, Unknown
  Bacterial polypetide isolated from the Sargasso Sea
MAGLEVEGYDSFNSKITGQDAIIKLDITPNRGDCFSILGVARELSVINNLKFKNPTFHPIQGTFKEDIKIQVCKEAPRYVGRSIKNIDLKVKTLPLVAERLSLSDQKLIDPVVDITNYILLELGQPLHAFDRDKLEGDIIVRPAKKSENLTLLDDQEIKLSPEYIVISDSNKSIALAGIMGGKNTCITSKTKSIFLESAFFKPSIIRGRARRLGFQTDASIRYERGVDYEIQRLAIDKASEILHETVGGEFGIIKESKLARELPKTKKVSIDIDRANMILGTNITSMRARKYLKGLGMNPIGSKRRLETTSPSWRYDVEIEADLIEELARLEGYDSLPIVSLEPKLQKKIESKEKVISASLLSQGFSEVINYSFISEKDEKIFGESKHMIEVENPI

SEQ ID NO: 188416 - protein, 355 aa, Unknown
  Bacterial polypetide isolated from the Sargasso Sea
MQDYDKLKNEVLIKIKEANSLDDLENLRVQVLGKKGSITSLMKQLGSLEPDKRREAGQILNSLQKNIIESIDNKKSSLEETYLNEKLKNEALDITLPTRPENIGRIHPLSKTMDEVISIFAQMGFTVAEGPDIESDFYNFTALNIPQEHPARQEHDTFYFNEDENGERKVLRTHTSPVQIRTMEKLKPPLRVIVPGRTYRSDHDATHSPMFHQCEGLVIGDKLNMSHLKGCLIDFCRIFFGVDDLPVRFRPSYFPFTEPSAEVDIGCSRKSGELIIGEGDEWLEILGSGMVNPRVLQNCGLDPNEHQGFAFGMGLERIAMLKYGIPDLRPFFDSDLRWMKHYGFFPFEQTSIHQG

SEQ ID NO: 188417 - protein, 527 aa, Unknown
  Bacterial polypetide isolated from the Sargasso Sea
NRGDCMSHLGVARELSNYFDIKILENDFKLKSKIENVLKTNSGKISECNSYVSIEIENFNITDSPFYIRYRLSQVGTRVINNVVDLTNYVLYDIGQPLHAFDRDKIFGTVSVRKAKDKEKILTLDNQKRSLNKDDLVITDNDNPIALAGVMGGLETEVTENTKNLLIESAYFDKVSIMNTSRKLNLISDASIRFERGIDFNLQLKAINRFINIFSTYQDINYSSPLVDDKKNIKNKPVSFSSNDIYKILGTKIDNKFITKTLKNLDIDHTINNEDIKFVSPSWRYDLERPIDIIEEIAKHYGFNNFDSTLPIGNNRNNLGDYWNSKSFFSQQLRGKDYQEIQSLSFVDDISNQRFNPEKKYVEVYNPIDSTNKYLRSNLFSSLLNIYQSNLEKNSVSSKYFEINTVFDKGKHEKYENIPNQLYTLGVLTPSRVTNVDLRGEDKSFDIYYVKNLISTLIGEFNVKYLHKPGFHKRLSFLILKNGKQVGFFGQLSYELMDDLNLEDPIYLMELNIEKIDNTTKETNDFI

SEQ ID NO: 188418 - protein, 221 aa, Unknown
  Bacterial polypetide isolated from the Sargasso Sea
NEYNNFTALNTPDNHPARDMHDTFYLDENKEVLLRTHTSPVQIRTMLKDKPPFKIIAPGRTYRSDSDQTHAPMFHQVEGLHIDTNINMGHLKGCLNYFIKEFFEVEKIKMRFRPSHFPFTEPSAEVDIGYEIKDGKIIIGEGDKWLEILGCGMVHPNVLRNVKVDPSKYQGYAFGIGIDRLAMLKYGINDLRAFFDCDYRWLNHFGFDPLDVPSNYRGLSR

SEQ ID NO: 188419 - protein, 347 aa, Unknown
  Bacterial polypetide isolated from the Sargasso Sea
NIESLIKIKTELFGKNGKISNAFKKLGSLSTDERKKFASDLNSIKNELQDKIDSKLQEIETKEINSKLENEKVDVTLPEREFSRGKIHPVSQVIDEISSIFSEIGFSVEEGPDIENEHYNFTALNTPDNHPARDMHDTFYIDNNKELLLRTHTSPVQVRTMLNGKPPFKIIAPGRTYRSDSDQTHSPMFHQVEGLHIDKDINMGHLKGCLNYFIKSFFEVDKIKMRFRPSHFPFTEPSAEVDIGYEIKDGKIVIGEGDKWLEILGCGMVHPNVLKNVKVNPDKYQGYAFGIGIDRLGMLKYGINDLRAFLRLTIDGLIILVLIHWMFHQIIEVLVDEIHNRMAKRTS

SEQ ID NO: 188420 - protein, 242 aa, Unknown
  Bacterial polypetide isolated from the Sargasso Sea
KLDVTLPADPYNLGSEHPITKISKKIIKYFAPLNYQIFSGNEIETDFYNFEALNFPENHPARQMHDTFYLNSKSSSDYLLRTHTSNTQIHAMLSEDLPLYMLSPGRVFRCDSDTTHLPMFTQIEGLVVDEGVTFGDLKGILIDFLEDFFNEKMDVRFRPSYFPFTEPSAEVDIKFGNKGWLEILGCGMVHPNVLKGCNIDTKKFRGFAFGMGIERLAMLYYGVTDIREFYSSNLDFLNQFPS

SEQ ID NO: 188421 - protein, 163 aa, Unknown
  Bacterial polypetide isolated from the Sargasso Sea
PGKTFRCDNDQTHSPMFHQVEGLVIDQESNMSHLKGCLEIFLKTFFETDKLNMRFRPSHFPFTEPSAEVDIGYTEKGNQLIIGEGEDWLEILGCGMVHPNVLENVNINSNEYQGYAFGMGIERLAMLKYGISDLRTFFDSDLRWNKHYGFSPLNIPSIIGDLS

SEQ ID NO: 188422 - protein, 306 aa, Unknown
  Bacterial polypetide isolated from the Sargasso Sea
AIDQKKIKGQELNKLKSIIEEAIDNQKTSIENQAIEKKLKNENIDITLPQLETSNGKIHPISQTIFSIIEIFGNLNYSVEAGPDIESDFNNFSALNIPTHHPAREMQDTFYVQNSDGEDNVLRTHTSPVQVRTMLKTKPPIKIIVPGRTYRSDSDSTHTPMFHQVEGLVVNTDATMADLKSTLITFLKEFFEIENLKYRFRPSYFPFTEPSAEMDVAFTKKNNVLKIGEGDEWLEILGCGMVNPKVLENCNIDSSVYQGFAFGMGIERLSMLKYGITDMRGLFDLNIKWLDHYGFSPLDLRNRTEV

SEQ ID NO: 188423 - protein, 243 aa, Unknown
  Bacterial polypetide isolated from the Sargasso Sea
IDEISSIFSEIGFSVEEGPDVENEYNNFTALNTPDNHPARDMHDTFYLDNNKELLLRTHTSPVQVRTMLKGKPPFKIIAPGRTYRSDSDQTHAPMFHQVEGLHIDKNINMGHLKGCLNYFIKEFFEVDKIKMRFRPSHFPFTEPSAEVDIGYEIKNGKIVIGEGNKWLEILGCGMVHPNVLKNVNVNPSKYQGYAFGIGIDRLGMLKYGINDLRAFFETDYRWLSHFGFDPLDVPSNYRGLSR

SEQ ID NO: 188424 - protein, 152 aa, Unknown
  Bacterial polypetide isolated from the Sargasso Sea
DSTHTPMFHQVEGLLMDEKSTMSHLKGCLIDFLKEFFEINDLKYRFRPSYFPFTEPSAEMDIAYTKTNNVLKFGEGDEWMEILGCGMVNPIVLENCKIDSKKFQGFAFGMGIERLSMLKYGITDIRSFYESDFRWIQHYGFNPLDLNSTSGL

SEQ ID NO: 188425 - protein, 291 aa, Unknown
  Bacterial polypetide isolated from the Sargasso Sea
DRSNNSLMLRPEGTTSVVRALINAGLTQNLPQRFFYSGPMFRYERPQKGRLRQFNQFGAELIGIDNFYGDVEVINLAYNFLKNLNLIENTTLYVNSLGDSQSRKNYRTALISYLEKFEKDLSTESKIRLNKNPLRILDSKNSKDQIILRNSPKYFDSLNKESRAYFENVCISLEKLNIPYKKDEKLVRGLDYYSHTTFEFKTSLLGSQDTVLAGGRYDGLSKMISEHILPGVGWAAGIERLAMMTENKYESFPKVTLVSQSNTLNSVMLNYYKILIDNDIKTEMIYSGSIN

SEQ ID NO: 188426 - protein, 145 aa, Unknown
  Bacterial polypetide isolated from the Sargasso Sea
MKEIFTNYAMSEIRTPALENTNLFKRSVGDTSDIVNKELYTFSDKNDKSITLRPEGTASVMRSIIEKKLDGETHKLWYLGPMWRYERPQKGRYRQFNQAGIEILGYSEGAPEFEMISLICELNRKLQIRKPLIKINHLGDSNTKK

SEQ ID NO: 188427 - protein, 290 aa, Unknown
  Bacterial polypetide isolated from the Sargasso Sea
MEKINSLTGMTDLIETKADENVLANKVFQTEKILKEIFTNYAMSEIRTPALENTNLFKRSVGDTSDIVNKELYTFSDKNDKSITLRPEGTASVMRSIIEKKLDGETHKLWYLGPMWRYERPQKGRYRQFNQAGIEILGYPEGAPEFEMISLICELNRKLQIRKPLIKINHLGDSNTKKLFCKVLVDYLTPMKSNLDEKDLLRLDSNPLRILDSKNPNTIEILKKAPSISDYLQDSSKELLKSIQELFSDKCEIQIDCNLVRGLDYYTGFVFEAISEDLGAQDAYLGGGRY

SEQ ID NO: 188428 - protein, 201 aa, Unknown
  Bacterial polypetide isolated from the Sargasso Sea
MKEIFTNYAMSEIRTPVLENTNLFKRSVGDTSDIVNKELYTFSDKNDKSITLRPEGTASVMRSIIEKKLDGETHKLWYLGPMWRYERPQKGRYRQFNQAGIEILGYPEGAPEFEMISLICELNRKLQIRKPLIKINHLGDSNTKKLFCKALVDYLTPMKSDLDEKDLLRLDSNPLRILDSKNPNTLEILKKAPSISDYLQD

SEQ ID NO: 188429 - protein, 232 aa, Unknown
  Bacterial polypetide isolated from the Sargasso Sea
MTEKIKSIRGMPTLLPAELKLWQSVESTIKKILSNYAFQEIRTPLLERTELFQRTIGEQTDVVSKEMYSFLDRKEQSLSLRPEATAGVVRAGIEHGLFHNQTQKFWSMGPMYRYERPQKGRYRQFHQVNMEAFGYEGPGIDAELILLTSRIWRKLGVEDIQLELNSLGTAESRKGYRTILVEYFNDHTDSLDEDSILRLEKNPMRILDSKNPEMADVIHSAPKMNDHLDQES

SEQ ID NO: 188430 - protein, 125 aa, Unknown
  Bacterial polypetide isolated from the Sargasso Sea
MAKKIQAIRGMNDILPTQSPVWQYLEGTVKDVLAGYGYDEIRMPVLEQTALFKRSIGEVTDIVEKEMYTFEDRNGDSLTLRPEGTASCVRACEEHGLLYNQTQRLWYTGPMFRHERPQKGRYRQF

SEQ ID NO: 188431 - protein, 278 aa, Unknown
  Bacterial polypetide isolated from the Sargasso Sea
MRGMPDLFPEDLERWHYFESKLTYIFNSFNTLEIRTPLLESTELFSRSVGNSSDIVNKELYSFLDRNKESISLRPEGSASVIRAIIQKKQEHEKHKLWYQGPMFRYERPQKGRFRQFHQIGVEYLGFEEGVSEYELISMVLQINQSLGISDYTLKINHLGDAHAKESFCNSLVSFLEPHANELHEKDQIRLRSNPLRVLDSKEKSTIELLKNAPKFQDFISEESKLFLEGLVNSFKDQCDIQIDQSLVRGLDYYTGVVFETVSSELGAQRCLPWWWQI

SEQ ID NO: 188432 - protein, 315 aa, Unknown
  Bacterial polypetide isolated from the Sargasso Sea
DVPQRFSYYGPMFRYERPQKGRLRQFKQLGIECLGLSSAMADIEVISLGQEFLDQLNILDKINLKINTLGDFESRKIYRDALINYLSDYKSKLSEDSVKRLYINPLRILDSKNDEDLKIVENAPSILDFLNSDSKTKFENICKGLDHLNIKYTIDKNLVRGLDYYCHTAFEFTTNELGSQGTVLAGGRYDGLSKMLGGPDVPGVGWAAGVERLALMVESKFINKIEVVLMGQSESFNYLLLPILKKLTQNGIKSEIIYTGNMSKKFKRANKLKASYAIILGEEEVSKKVLKFKDLTSGKEELLKLSEVLLKVTND

SEQ ID NO: 188433 - protein, 304 aa, Unknown
  Bacterial polypetide isolated from the Sargasso Sea
GTDIVEKEMYTFNDRNEESITLRPEATASLARAGITNGLLHNQQQKLWTMGPMFRYEKPQKGRYRQFYQFNIEAMGFEGPDVDAEIIILCQRMWKQLNINKISLKINSLGDKKTRSDYRKDLINYFSSHEGQLDQNSKNRLHQNPLRILDSKNPEMSMLIDNAPLLSDYLDSASKDHFEKLKEIISSAGIEFEVNPKLVRGLDYYNRTVFEWETEALGSQGAVCSGGRYDGLVEKIGGRPTPAIGWAMGMERLVSLYELSNEKISKVSPHIYIVVDGEKSQQKAYKISEELRDLNPSIRIQLNM

SEQ ID NO: 188434 - protein, 274 aa, Unknown
  Bacterial polypetide isolated from the Sargasso Sea
MSFLKNLCGEQSDVVLKEMYTFKDRNEDEITLRPEYTTPMIRAAISNGLLNNLPAKFFGTGQMFRRERPQKGRYRQFNQINFENFGSDDFFADIEIINLANNILKNILPGRKINLNLNTLGSRENLKDYKKILSKYFNDHRNSLSTESSNKINTNPLRILDSKNFEDKNIIEKCPKLIELISKSDLDSYQEIKNCLIALNIPFFEDPNLVRGLDYYCHTVFEFKTDEIGTQDTLIGGGRYDGLIKTLGGKDIPGVGWAGGIERIMLLMKDIVDD

SEQ ID NO: 188435 - protein, 238 aa, Unknown
  Bacterial polypetide isolated from the Sargasso Sea
VTKEMYTFQDKGGESISLRPEGTAGCVRAAIDNDLIRTDKPRLWYAGPMFRYERPQKGRSRQFHQFSAEVFGINSPEIDAELILMSARLWRELGVADKVRLELNNLGDEETRNSFSKALVEFLKNQKEDLDEDTQRKLLENPLRILDSKSQTVQNLLKNAPSIEDFVSEGSKQYHHNLLRILEKSEIDFNVNSKLVRGLDYYNQTVFEWKTDLLGSQDTIIGGGRYDRLVEELGGKSC

SEQ ID NO: 188436 - protein, 276 aa, Unknown
  Bacterial polypetide isolated from the Sargasso Sea
MSKVTKPRGFNDLDPSEFEHKSNLLDEIKNIFNSYFFKEIETPIVEKKELFIRSVGEETDIVNKEMFTFQDKKGEDLVLRPEGTAGCLRSAIDSGLLDLGPIKLSYAGPMFRYERPQKGRSRQFFQVSAETYGVRGFEADLELLMMANEIFQRFGLDNVSLNINSLGDEESQKQYASELKKYLSDFSEALDEDSLKRLETNPLRILDSKNEETRNVIINAPKISSFLSQKSADNYELIQEGLNDLGISYIKDEKLVRGLDYYNNLVFEWTSPDLGS

SEQ ID NO: 188437 - protein, 293 aa, Unknown
  Bacterial polypetide isolated from the Sargasso Sea
DLFGEEIQKFNKVISEVKDNARKFGFNELITPIIESSELFKKPLGEQSDVVLKEMYTFKDRNEDEITLRPEYTTPMIRAAISNGLLNNLPAKFFGTGQMFRRERPQKGRYRQFTQINFENFGSDDFFADIEIINLANKILKNILPDRKINLHLNTLGSRENLKDYKKILSKYFNDHKNSLSADSVNKINSNPLRILDSKIIEDKIIIEKCPKLIELIAKSDLNSYQDIKNSLIDLNIPFFEDQNLVRGLDYYCHTVFEFKTDEIGTQDTLIGGGRYDGLIKTLGGKNIPRCWM

SEQ ID NO: 188438 - protein, 233 aa, Unknown
  Bacterial polypetide isolated from the Sargasso Sea
MTEKIKSIRGMPTLLPAELKLWQSVESTIKKILSNYAFQEIRTPLLERTELFQRTIGEQTDVVSKEMYSFLDRKEQSLSLRPEATAGVVRAGIEHGLFHNQTQKFWSMGPMYRYERPQKGRYRQFHQVNMEAFGYEGPGIDAELILLTSRIWRKLGVEDIQLELNSLGTAESRKGYRAILVEYFNDHTDSLDEDSILRLEKNPMRILDSKNPEMDDVIHSAPKMNDHLDQESE

SEQ ID NO: 188439 - protein, 247 aa, Unknown
  Bacterial polypetide isolated from the Sargasso Sea
MFRCFRIRHVTQLQSLRGMVDLLPEAVQRWQAVEAVAREHFRRSGFGEIRTPLLETTDLFCRGIGEATDVVGKEMYSFTDRGERACTLRPEGTASVVRAALQHGLLSQGAQKLWYAGPMFRYERPQAGRQRQFHQIGVEWLGAESARCDVEVIALAWDLLARLGVGGLELEINSLGSPEDRQVYRAALVNWLEQRSEALDSDSQARLSTNPLRILDSKNNDTQALLEHAPTLANALSPESRQRFDAV

SEQ ID NO: 188440 - protein, 219 aa, Unknown
  Bacterial polypetide isolated from the Sargasso Sea
MDLIGHKTSKDDLAEKIFYTEEILRDIFESFSISEIRTPALESSSLFKRSVGDASDIVNKELYSFLDKNEKSITLRPEGTASVIRSVIEKKLDNDTHKLWYLGPMWRYERPQKGRYRQFNQAGIEILGYPEGLAELEIVSIICSINNALGIEKPVLKINHLGNNETKQNYCKALEDFLIPLSSKLDTKDLERLNKNPLRVLDSKNLDTQAILKDGPKII

SEQ ID NO: 188441 - protein, 299 aa, Unknown
  Bacterial polypetide isolated from the Sargasso Sea
QQACFETARLFGYRYIETPVFEESGLFQRTVGENTDIVEKEMYSFDDKGGENISLRPENTAGVCRAFIENGLHNTTLPSRLFYYGPMFRYERPQSGRYRQFHQFGIECIGEASPDVDYEVIKIAWDVLKILDFGNVVLNVNSLGDSQDRYLYSEELKKYYSKYLNDLPRVDQLRFERSPLRILDSKEDITIKISEDAPKTLDFISTESSIHHENLILNLDQLSSIDKEFKYKINHRLVRGLDYYNKTVFEYTSDSLGPQGVLLGGGRYDPLIKILGGQDTPAVGFAMGIERAVNELKKN

SEQ ID NO: 188442 - protein, 312 aa, Unknown
  Bacterial polypetide isolated from the Sargasso Sea
MIRAAISNGLLNNLPTKLFGTGQMFRRERPQKGRYRQFNQINFENFGSDDFFADIEIINLANTFLKKIIPNSNITLHINSLGTRENLIDYKKILSKFFNDNKNFLSKESIDKIDSNPLRILDSKIKEEKEIINKSPKLIELLSKSDLNVYEEIKKSLTDLEIPIFEDPKLVRGLDYYCHTVFEFKTNEIGSQDTLIGGGRYNGLIKILGGKDIPGVGWAGGIERIMLLMKNILSKDKDIHFAIIDPDYKIHAFKIYDFLIKNNFSVYWNYKYNLKKSLSIANEKKADYIVIIGENEKINNHYSLKNLTNGDQ

SEQ ID NO: 188443 - protein, 282 aa, Unknown
  Bacterial polypetide isolated from the Sargasso Sea
NTAKAHFDLYNYKEIRTPIFENTEVFEQSIGDNTDIVEKEMYSFLDKGERRLTLRPEGTAPIVRAYIQNNLSKQEALSKLFYVGPMFRYERPQAGRYRQFHQVGVETIGDASPAMDIEIISMAFRLFDNLGIKNLKVCVNSIGDSISRPVINEAIKQFLGNSPWYEKKMCPRCIKRFDKDPLRLLDCKNETCKAYLSGLPNIIDLQSAECKDHFHAVTDGLYKLGIPFKVDPFLVRGLGYYSKTTFEIISDHLGAQNAICGGGRYDNLIQSMGGPDKPAGRI

SEQ ID NO: 188444 - protein, 287 aa, Unknown
  Bacterial polypetide isolated from the Sargasso Sea
MEKIRTVRGVHDLLPNELHKHDLVIETGLEISNKYNYSQIEIPIFEFAEVFTKPLGKSSDIVTKENYVFKDRSEDVLMLRPEGTSGVVRAFLNSGLIQDIPQRFSYCGPMFRYERPQKGRLRQFKQIGVECLGLSSSMADIEVLLLGYDFLDKLNILDKIELKINTLGDFDSRKKYREVLVEYFSDYQSELSKDSIKRLSINPLRILDSKNEADQKIIKNAPNILDHLNIESMTRFEKICKGLDQLNIKYIIDKNLVRGLDYYYHTTFEFTTNYFGFSRNCACGRKI

SEQ ID NO: 188445 - protein, 291 aa, Unknown
  Bacterial polypetide isolated from the Sargasso Sea
MRELQPVRGTRDIMSEEFRQHNYLIDQLRYFAELYGYSEIATPIFEFSDVFKRTLGDTSDIVTKEMYTFSDKAGDEITLRPEGTAGVARMLISSGLKQNLPLKYFYNGPMFRYERPQKGRFRQFHQIGVELLGVPEVIGDIEVIALASSMLDGLGILSQCTLEINTLGNKVSRKGYRHKLINYLRDYRDQLSEDSRRRLDRNPLRVLDSKDKGDQKIIENAPEFTESLDTESKDFFSGVKEGLDKLSISYELNPRLVRGLDYYCHTAFEFTTRDLGAQGTILAGGRYDGLV

SEQ ID NO: 188446 - protein, 270 aa, Unknown
  Bacterial polypetide isolated from the Sargasso Sea
MKITPVRGTHDFFGQQVIKYRTIQDLISHYSVIYNFEEIITPIFESTELFKKPLGENSDVVLKEMYTFKDKNEDFLTLRPEYTTPMIRSAISNNLLEKLPKKLYGIGPMFRRERPQKGRYRQFNQINFEILGTHDISADIDLIILANNFLKNLLPEKKINLFINSLGDKNTITNFSIALGNYFKQNKKKLTEESQSKIVLNPIRILDSKDPTDIEINLNAPQISDFYSNEAKEKFSNIQKILKDMSVDFSINMNFSRGLDYYCHTVFEFK

SEQ ID NO: 188447 - protein, 285 aa, Unknown
  Bacterial polypetide isolated from the Sargasso Sea
TPMIRAAITNNLLNDLPLKIFGIGPMFRRERPQKGRYRQFNQINFEILGTRDFLADVELISLSNNILNELLPKSRIKLHINSLGDKKTLIDFKKNLTKYFNFHKKKLSEESIKKIETNPLRILDSKNDEDVEIALSSPKIYEYLTDEAKKHYEDLKKSLNILEIDFEENANLVRGLDYYCNTVFEYKSDNLGSQDTLLGGGRYDGLIKVLGGPDIPGIGWAAGIERIALLMESEKKISSTIHIAVTNEKFIDYFLYLQKYLSENRISYYWNYKYNLKKSFTKANT

SEQ ID NO: 188448 - protein, 226 aa, Unknown
  Bacterial polypetide isolated from the Sargasso Sea
MKINPVRGTHDLFGKDIKKFNKIISDVKDIAYQFGFNELVTPIFESTALFKKPLGEQSDVVLKEMYTFKDRNDDEITLRPEYTTPMIRAAISNGLLNNLPVKFFGTGQMFRRERPQKGRYRQFNQINFENFGSNDSFADVEIINLANLLIKKILPNKKIKLHINSLGTRENLINYKKTLSHYFNQNKNFLSSESKDKIQLNPLRILDSKNIEDKEVIDKAPVLIDF

SEQ ID NO: 188449 - protein, 248 aa, Unknown
  Bacterial polypetide isolated from the Sargasso Sea
MAEESSVQSIRGMNDLLPGQIETWQRVEAAVREVSRRYGYREIRTPIVERTELFRRSIGEQTDIVEKEMYTFTDNNGDSLTLRPEATASCVRAGNEHGLLHNQTQRLWYVGPMFRHERPQKGRYRQFHQFGIEALGWAGSDIEAEVIAVGERLWRCLGIKDLNLEINSLGSVAARANYRDALKAYLSDHVDALDTDSQRRLERNPLRILDSKDAGTQEVLDSAPSLSDFLEETEQENFERLQQLLTTV

SEQ ID NO: 188450 - protein, 279 aa, Unknown
  Bacterial polypetide isolated from the Sargasso Sea
MKLRSVRGTHDIFGEEIEKFNQISNIVSKNAHLKNFKEIQTPIFEFSDLFAKPLGEHSDVVLKEMYSFEDRNNEFLTLRPEYTTPMIRAAITNNLLNDLPLKIYGIGPMFRRERPQKGRYRQFNQINFEILGTKDFLADVELILLSNNILKELLPKSNIRLQINSLGDKETLINFKKSLTKYFNTYKKKLSEESIKKIDTNPLRILDSKNDEDIEIAKSSPKIYEYLTIEAKKHYEDIKSALNLLEINFEENANLVRGLDYYCNTVFEYKSDNLGSQDT

SEQ ID NO: 188451 - protein, 287 aa, Unknown
  Bacterial polypetide isolated from the Sargasso Sea
MYRYERPQKGRLRQFQQFGVESLIDQEKSSQEELIRMELKVIGCLLDIVGALNIKDFKLEINNIGSSETKKKYSKELVSFLETNLDTLSDTEKNRLSTNPLRILDSKDPITRDILKSAPEYNDFLSKDEKQHLSKLTNAIEENYIKPHIQQNLVRGLDYYSGIVFEVVCNDLGAQKAIAGGGFYSELFEEFGGNSISAFGFAMGIDRLMDLASPAEDKILKVFVLDVTKASSNFAIQVFNRIKMLSHTTQLFFPRTKDSSLKSLLRNVNKKNGDIAIIVGDKEEANK

SEQ ID NO: 188452 - protein, 231 aa, Unknown
  Bacterial polypetide isolated from the Sargasso Sea
MSKIQSLRGMNDIGPQQAKEWSYVEKVIKSLVKSYGYEEIRFPLVEKTELYTRSNEAADIVSKEMYTFQDKGGESISLRPEGTAGCVRAAIDNDLIRTDKPRLWYAGPMFRYERPQKGRSRQFHQFSAEVFGINSPEIDAELILMSARLWRELGLADKVRLELNNLGDEETRNSFSKALVEFLKDQKEDLDEDTQRKLLENPLRILDSKSQTVQNLLENAPLIENFVSEDS

SEQ ID NO: 188453 - protein, 300 aa, Unknown
  Bacterial polypetide isolated from the Sargasso Sea
FHQFGAEVYGLNGPDVDAELIIMTARLWQKLGIGEVLTLQLNTLGSRESRAAYRQDLVVFLQQHMDKLDPDSQRRVTANPLRVLDSKDHATQALLDQAPDFYSYLDANSRRHFERLKMLLDQVGLVYELNPRLVRGLDYYCKTVFEWVTNRLGAQGTVCGGGRYDGLTEQLGGRSTPGVGWAMGVERLVLMLQEMNLVPPELAQQIDVYMVHTVDTAAASMLLAEQLRQQLPNVRILWHCGGGSFKNQMKKADKIGAAVALIMGIDELQNGQVKVKPMRSQSDVQTVLASEVATAVQRLI

SEQ ID NO: 188454 - protein, 293 aa, Unknown
  Bacterial polypetide isolated from the Sargasso Sea
FYAGPMFRYEKPQKGRYRQFNQIGVEAYGFSGPDIDLELILLARDIWEGIGLKEVLTLEINNLGSLEARRKYRLALVEFLQPNKAALDEDSQRRLQTNPLRILDTKNEKTKLILEKAPKLEDFLDSESKERFSRLCALLTEQGQDYVINPFLVRGLDYYTDCVFEWKANNVGAQDTICAGGRYDGLVERLGGRQTPAIGFAIGLERMILALEALEQTQESRVSVDVYVSFLEESLLGKAMNMAELIRKSDAGLRVRVHMGGGNFKKQLKRADAVGAKWAVLIGDEEVKQNISL

SEQ ID NO: 188455 - protein, 298 aa, Unknown
  Bacterial polypetide isolated from the Sargasso Sea
MIYFGEEIDKFNFISNIVSKNANLKEYKEIQTPIFEFSDLFAKPLGEHSDVVLKEMYSFEDRNNEFLTLRPEYTTPMIRAAITNNLLNDLPLKIFGIGPMFRRERPQKGRYRQFNQINFEILGTRDFLADVELISLSNNILKELLPKSKIKLHINSLGDKKTLIDFKKSLTKYFNTHKKKLSEESIRKIETNPLRILDSKNEEDVEISISSPKINEYLTDEAKKHYEDIKRSLNILEIDFEENTNLVRGLDYYCNTVFEYKSDNLGSQDTLLGGGRYDGLIKVLGGPDIPGIGWAAGI

SEQ ID NO: 188456 - protein, 161 aa, Unknown
  Bacterial polypetide isolated from the Sargasso Sea
MNNLKNLTGTVDLLPDQLIKWQNVEKILLEQLARASIKEIRTPILEMTELFIRGIGEGTDVVSKEMYTFLDRGERSCTLRPEGTASVARALIQNGMSSNPLQKLWYMGPMFRYERPQAGRQRQFHQLGVEFIGYDSLRSDVEIVALSWDVLSKLGIKELNL

SEQ ID NO: 188457 - protein, 207 aa, Unknown
  Bacterial polypetide isolated from the Sargasso Sea
MKKIKPSIPRGTRDFGPNEMIKREYIFSILKKIFLNYGFQNIETPSLEKIDILKGNYGEEGDKLLYNILDSGDFLKNATIDPKTNYKTLKRKISQKGLIYDLTVPLARYVSMNRDKISFPFKRYQIQKVWRADRPQKGRYREFYQCDIDYVGTNSILCEIEIIDIISEVFQKLKYEKFKIKLNNRKVLAGIAEQLNIKERFIDLCIS

SEQ ID NO: 188458 - protein, 228 aa, Unknown
  Bacterial polypetide isolated from the Sargasso Sea
MKEMYSFEDRNNEYLTLRPEYTTPMIRAAISNNLLNDLPLKIFGIGPMFRRERPQKGRYRQFNQINFEILGTRDFLADVELISLSNNILKALLPKSKIKLHINSLGDKKTLIDFKKSLTKYFNTHKKKLSEESIKKIETNPLRILDSKNEEDIEISLSSPKIYEYLTDEAKKHYEDIKRSLNILEIDFEENSNLVRGLDYYCNTVFEYKSDNLGSQDTLLGGGRYDGL

SEQ ID NO: 188459 - protein, 282 aa, Unknown
  Bacterial polypetide isolated from the Sargasso Sea
DFQDDNSKKIFYIEDELKKIFNLYNLKEFRTPALEDSSLFSRSVGDISDIVNKEIYSFEDKNKKNISLRPEGTAGIIRSIIQKKLDISSHKLWYIGPMWRYERPQKGRFRQFTQAGVEILGNEEGTSEFEMISIVTSIVNKFKLKNYVIKINHLGNKKTKDSYCTALKKFLENFKDNIHSSDLEKLEKNPLRILDSKSQETQTILKNAPSIKDFLDKESYDLLKKIKDTFSDIEIDFNLVRGLDYYSGFVFEANSSELGAQDAILGGGRYDNLSKDLGGKDL

SEQ ID NO: 188460 - protein, 225 aa, Unknown
  Bacterial polypetide isolated from the Sargasso Sea
MKTKSIQSIKGTQDILPSEVHFWQEMERKIFEEMALFGFSEIRTPAFENTDLFSRSVGEQTDIVSKEMYTFEDRSGGSLTLKPEATASVVRAFIQHNLDKINTLTRLFYIDALFRRERPQKGRYRQFHQFGAELFGSEHPEADVEIVSLASSIFKSIGINEITLKINTIGSKSARDNYKIELKRFLKPHFNKLSEASRERLEKNPLRILDTKNSQEQEILSNAPQ

SEQ ID NO: 188461 - protein, 199 aa, Unknown
  Bacterial polypetide isolated from the Sargasso Sea
MSKSPIRSVKGTQDILPDQSSRWQDLELTIQKIMDRYGYKEIRTPAFENTEVFLRGVGQETDIVSKEMYSWTDQGGNNLTLKPELTAPVVRSFIQHNLGQINSINKLYYIDSLFRRERPQKGRYREFHQFGVEVFGSEYPEVDVEVIALAMYVFNNMGLENLTLNLNSIGSPKCRKNYRDAIKDFLEPHFDDLSKTGQD

SEQ ID NO: 188462 - protein, 234 aa, Unknown
  Bacterial polypetide isolated from the Sargasso Sea
KRIDKNPLRILDSKNVQTKKILENAPRLFDFLSEKSLHRYFAVKEQLKLLKIPFIENFNLVRGLDYYTHTAFEITSGVLGSQSTVCGGGRYDNLINQMGGKETPAIGFAIGLERLILLAGKDLEESRETDIYIVNKGFKAETLAINLSRKLRNYDLIIELDLTGASFSKQFKKANKLNSKSIIIIGDDEALKNEFVIRLFEGKFIENREEVLSFDDSEKLENWLNKNLLKKNPC

SEQ ID NO: 188463 - protein, 284 aa, Unknown
  Bacterial polypetide isolated from the Sargasso Sea
SNVYNFEEIITPIFESTELFKKPLGENSDVVLKEMYTFKDKNEDSITLRPEYTTPMIRAAISNNLLNKLPKKLYGIGQMFRRERPQKGRYRQFNQINFEILGTHDVSADIELIILANNFLKKLLPTKKIDLFINSLGDKNTLSRFNIDLKKYFEKNKEKLSKDSQNKINTNPVRILDSKDPIDTEINTKAPKICDFYSSEANEKFIKVQEILKNMSVDFSINPNLVRGLDYYCHTVFEFKTSDLGSQDTLIGGGRYDGLTKLLGGPDIPGVGWGGGIERLMMLM

SEQ ID NO: 188464 - protein, 278 aa, Unknown
  Bacterial polypetide isolated from the Sargasso Sea
MKNLRTVRGVNDILPDVMHKHNYINQIGTLVCNQSCYEQIDTPIFEFADLFIKPLGETSDIITKENYVFKDKSNNALMLRPEGTTSVVRALINAGLTQVLPKRFFYFGPMFRYERPQKGRLRQFNQFGAELLGVDDVFGDVEVINLGYNFLKKLKLINKVDLVINTLGDQESRLKYREQLVTYFNKYKNDLSEESKIRLEKNPLRILDSKSKKDKEIINTAPDYRKFLNKVSIKYFDDVCRALNVLEISFVRDPNLVRGLDYYSHTTFEFKTNLIGAQ

SEQ ID NO: 188465 - protein, 176 aa, Unknown
  Bacterial polypetide isolated from the Sargasso Sea
MAIKSKYHAVRGMTGSLPKENLLWRTIEDELIQILSSYSFQEIRLPIIEYSGIFNRSIGESSDIVQKEMYSFTDRNGESLTLRPEGTAGCVRATIENNLLSTSAPLRLWYHGPMFRYERPQRGRQRQFHQIGLEIFGSDSVLAETELMVIFSRFWSSLGISDITLQINTLGNQEDR

SEQ ID NO: 188466 - protein, 269 aa, Unknown
  Bacterial polypetide isolated from the Sargasso Sea
MKIRPVRGTHDLYGENIFKYNTIRDVISNYAKLNNFKELQTPIFEFSDLFSKPLGDQSDVVLKEMYTFRDRNNDNLTLRPEYTTPMIRSALSNNLLTNLPLKVFGIGPMFRRERPQKGRYRQFNQINFEIFGTNDFLADLELIILANDILKSMIPKTNFILQINSLGEKNTLNDYKSILSKYFNDKKNQLSEDSKNKIHTNPLRILDSKNENDMNVSNNAPSIREFISSDQKNHFEELKNGLQFNDIEYIENHNLVRGLDYYCSTVFEF

SEQ ID NO: 188467 - protein, 299 aa, Unknown
  Bacterial polypetide isolated from the Sargasso Sea
LTLRPELTASIVRSYIQHNLQSYSPIQRLFYTGPIFRRERPQKGRQRQFHQFGVEAFGSDNPEQDAEVISLAWHLLSKLNIIDNITLKINSLGSPECRKRYRLALRDFIRPHLSTFSETSNIRFKKNPLRILDSKNTHEKNILKSAPSISNFYNSDDEDHFKSVLSFLDKMEISYKVSPQLVRGLDYYTKTVFEFTSKDLGAQDAILGGGRYDSLVKTLGGKPTAGIGFAAGMERFLIALESKGFNFENEPPDIYFVCVEKEAIGLTLALTKKLREKDFSVMIDPIRRSMKAQLREANK

SEQ ID NO: 188468 - protein, 299 aa, Unknown
  Bacterial polypetide isolated from the Sargasso Sea
SDRNDDSLTLRPEYTTPMIRAAISNDLLNKLPCKLFGIGPMFRRERPQKGRFRQFNQINFENFGSNDIFAEVELINIANSLLKKILPKQEIVLYINSLGDRNTLNKYKEKLTNFFEKYKKELSIESKEKILKNPIRILDSKDNNDKKVISKAPLIIDFLSKDSLRKFEELKSFLQKYKINFKEDFSLVRGLDYYCDTVFEFKSSSLGSQDTIIGGGRYDGLIKVLGGKDLPGVGWAAGIERIMILMSEILNKNEKIHFAILNEKFKSHALKAYKSLSDLEIAVYWNYKFNLKKSNYLHS

SEQ ID NO: 188469 - protein, 230 aa, Unknown
  Bacterial polypetide isolated from the Sargasso Sea
MTRCSRIRQVTQLQSLRGMVDLLPEAVQRWQAVEGVAREHFLCSGFGEIRTPLLETTDLFCRGIGEGTDVVGKEMYSFTDRGDRACTLRPEGTASVVRAALQHGLLSQGAQKLWYAGPMFRYERPQAGRQRQFHQIGVEWLGAESARSDVEVIALAWDLLARLGVGGLELEINSLGSPEDRQAYRAALVAWLEQRSEALDSDSQARLSTNPLRILDSKNKDTQAYSSTHP

SEQ ID NO: 188470 - protein, 285 aa, Unknown
  Bacterial polypetide isolated from the Sargasso Sea
INFENFGTSDSFADVEIINIANLLLKKILPNKKIILHINSLGKRENLQKYKETLSNYFKDKKTLLSSESIKKIHTNPLRILDSKNNEDKELILKAPKIIEFLSKEDLKHYEEVKNSLLNLNITFYEDFNLVRGLDYYCNTVFEFKTTEIGSQDTLIGGGRYDGLIKILGGKDLPGVGWAGGIERLIILMDNIYHSNQSIHFAILDSKYKNQALRAYNLLTENGYSVYWNYKYNLKKSLSKASEEKAKYIIIVGESENTKDQFTIKNLSNGNQEVIILSKILDFVK

SEQ ID NO: 188471 - protein, 170 aa, Unknown
  Bacterial polypetide isolated from the Sargasso Sea
MVAVKGMNDILPPESARWEWLEAKVRDLMARYAYRNIRTPIVEPTPLFVRGLGEVTDIVEKEMYSFEDRLNGEQLTLRPEATAGVVRAVAEHSMLYDGGKRLYYMGPMFRHERPQRGRYRQFHQIGAEALGFPGAEVDAELILLASALWRDLGLQNVRLELNSLGQPDER

SEQ ID NO: 188472 - protein, 217 aa, Unknown
  Bacterial polypetide isolated from the Sargasso Sea
MDSKNPDMKGLIFYAPKITDYLDDESKQHFSILLKALESHGIDYKLNSNLVRGLDYYTKTVFEWTSDQLGSQATVCGGGRYDGLVEQLGGKDVCGIGCAIGMERLTELVEVSVEKAENSQPKIYIVAVGEGAEIHASIMAETIRDENQNYAVEVNMDGGNFKQQFRRADKSGAELAIIVGEQEIEQGTISLKPLKSDDEQTTVKQEELIGQLDEFFG

SEQ ID NO: 188473 - protein, 147 aa, Unknown
  Bacterial polypetide isolated from the Sargasso Sea
MNNLKNLRGTVDLLPDQLIKWQNVEKIVLEQLSRASIKEIRTPILEMTELFIRGIGEGTDVVSKEMYTFLDRGERSCTLRPEGTASVARALIQNGLSSNPLQKLWYMGPMFRYERPQAGRQRQFHQLGVEFIGYESVRSDVEIICFS

SEQ ID NO: 188474 - protein, 322 aa, Unknown
  Bacterial polypetide isolated from the Sargasso Sea
LIQRSIGEVTDIVEKEMYTFEDRNGDSLTLRPEGTASCVRAGNEHGLLYNQQQRLWYMGPMFRHERPQKGRYRQFHQFGVETYGMDGPDIDLEVILLSARFWKAFGIEQHVKLQINTLGSNEARAAYRDTLVEFLKQRADQLDEDSLRRLETNPLRVLDSKNPDVQAAIADAPALIDHLDEESKVHFETLCSRLTQAGIEFEINPRLVRGLDYYNRTVFEWVTDSLGAQGTVCAGGRYDGLVEQLGGKATPAVGFAMGIERLVLLLTTLTEEGQDSSFADVYVTAMGEEAQSYAIEVAEHLRNTLSNTRIMMHCGGGNFKNK

SEQ ID NO: 188475 - protein, 202 aa, Unknown
  Bacterial polypetide isolated from the Sargasso Sea
MSKQIQAIRGMNDCLPQDTPAWQYVEQMLRSTVASYGYSEIRFPIVEMTELFKRSIGEVTDIVEKEMYTFADRNGDSLTLRPEGTACCVRAGNEHGLLYNQEQRLWYTGPMFRHERPQKGRYRQFHQFGLEAFGIASADIDAEVIMLSARLWQQLGLTPYVKLEINSLGSSEARAAYRDALVAYLEQHKTVLDEDSLRRMYT

SEQ ID NO: 188476 - protein, 315 aa, Unknown
  Bacterial polypetide isolated from the Sargasso Sea
SDIVQKEMYSFTDSSEKSFTLKPEGTAATCRSFIENGMNNLSKPVRLFYISSMYRHERPQSGRLRQHHQFGAEIFGDESPEIDSELIELALHYLNSLGLKNLKIKINSIGDVTTRSKFSEDLKLFFGPYKSQMNSVDKKRLETNPIRLLDSKDEKLLTLKENSPKSIDYLDEESETHWNSVLNNIQKLTKTYNEFDIEIDHKLVRGLDYYNRTVFEIHPNEEKSQSSILSGGRYDGLMSLLGGPDVPGVGFGSGIERIILNLKNQKILLPDSYDNKGPELMIISVGGQHITDTSIEIATFLRKNNISVILAPKNR

SEQ ID NO: 188477 - protein, 229 aa, Unknown
  Bacterial polypetide isolated from the Sargasso Sea
KINENPLRVLDSKSDSIKNLLNDAPKISDFISENSQSDFNDLIFLLKEAGIKFSINQKLVRGLDYYNQTVYEWKTDQLGAQDTVCGGGRYDNLVEELGGKPCSATGFSIGMERLILLMKETAELNLDNKSVNLFFVCLTKESVQKAIMYSESLREKVSNLGIKINMGLEGAGSQFKKADKSGASLALILGDDELESNTISIKDLRSNSDQEAISYDDLVKRIKKIYKKG

SEQ ID NO: 188478 - protein, 146 aa, Unknown
  Bacterial polypetide isolated from the Sargasso Sea
MSFSVPRGTQDILPIDINKWHLIESTARSLFSVYNFSEIRTPIFENTDVFARGVGENSDIFNKEMYSFEDRGGRSLTLRPEGTAAVTRANIMHSLHKHTNPLKLYYIGPFFRYERPQAGRYRQFHQIGTEYIGEMSPYADAEVIAL

SEQ ID NO: 188479 - protein, 245 aa, Unknown
  Bacterial polypetide isolated from the Sargasso Sea
RLDQLDDDSRARLTTNPLRILDSKNKDTQALLEQAPTLGDALSPESRQRFADVQQGLTALGIPFRLNPRLVRGLDYYGHTAFEITSDQLGAQATVCGGGRYDGLIAQLGGAATPAIGWALGMERLLLVLEAAAKADPHGVAAQLVGAPAPDAYVVNRGELAETMALKLARGLRAAGLTVELDGSGSAFGKQFKRADRCGAPWALVLGDDEAARAEVRLKPLQHKGEERSWAVDDIAAIVEALRNP

SEQ ID NO: 188480 - protein, 252 aa, Unknown
  Bacterial polypetide isolated from the Sargasso Sea
SSDIMQKEVYEFKDRKDELLCLRPEGTAGLVRALITNGLDNDEIKKFYYLGPMFRYERPQKGRKRQFFQAGVELIGDESSDADIEIILIANTILKKLNIKSKLQLNYLGDKKSLQKYNEYLKEYLSETSNLPKYVMKNPIRALDSKDESIKNIMSKAESIKNFLNKTQLEEFKKIKSKLDNIGIEYEENTSLVRGLDYYNGLVFEFLSDDLGAQNAILGGGRYDGLIKNLGGRDLSATGFALGIDRLADIVK

SEQ ID NO: 188481 - protein, 299 aa, Unknown
  Bacterial polypetide isolated from the Sargasso Sea
RFPIVESTDLFKRSIGEVTDIVEKEMYTFADRNGDLLTLRPEGTAVCVRAGNQNGLLYNQEQRLWYMGPMFRHERPQKGRYRQFHQFGLETFGIATADIDAEVILLTAQLWKAFGISEHVRLELNSLGSNEARADYRDALVAYLEQHTDVLDEDSKRRMYSNPLRVLDSKNPDVQAILVDAPKLSEHLDAESKEHFENLCERLDAAGVSYTVNEKLVRGLDYYNRTVFEWVTDSLGAQGTVCAGGRYDGLVEQLGGKATPAVGFAMGLERLVLLLQALECVGDIRRNADVYLAAMGDKA

SEQ ID NO: 188482 - protein, 289 aa, Unknown
  Bacterial polypetide isolated from the Sargasso Sea
MKLRPVRGTHDLYGDNIKKYNNIFDTVTELAKLFSFSEIQTPIFEFSNLFLKPLGEQSDVVLKEMYTFKDRNDELLTLRPEYTTPMIRSALTNNLMDDLPLKVYGIGPMFRRERPQKGRYRQFNQINFEVFGSNNFMVDLELIILAYEILKKLLPSKNLILNLNSLGTSQNLIDYKDKLKKFFNDNKSKLSQESYEKINSNPLRILDSKQDTDIALSSKAPSINEFLSIETKNHFEELKKGLEYHNIKYTENHKLVRGLDYYCSTVFEFKTNNLGSQDTILGGGRYDGL

SEQ ID NO: 188483 - protein, 247 aa, Unknown
  Bacterial polypetide isolated from the Sargasso Sea
NIFHSFDTHEIRTPLLESTELFSRSVGNSSDIVNKELYSFLDRNEESISLRPEGSASVIRAVIQKKQEQEKHKFWYQGPMFRYERPQKGRFRQFHQVGVEYLGFEEGIAEYELMSMVLQINKLIGISDYTIKINHLGDRDAKESFCDSLVTFLKPHINELHEKDQVRLKSNPLRVLDSKEKPTQELLKEGPKFQDFISDDSKIFLQNLVDAYSNQCDIQIDQSLVRGLDYYTGIVFETVSQNLGAQD

SEQ ID NO: 188484 - protein, 176 aa, Unknown
  Bacterial polypetide isolated from the Sargasso Sea
MNNLKNLRGTVDLLPDQLIKWQNVEKILLEQLARTSIKEIRTPILEMTELFIRGIGEGTDVVSKEMYTFLDRGERSCTLRPEGTASVARALIQNGMSSNPLQKLWYMGPMFRYERPQAGRQRQFHQLGVEFIGYDSVRSDVEIIALAWDILGKLGIKELNLEINTLGDVSDRLNFQ

SEQ ID NO: 188485 - protein, 175 aa, Unknown
  Bacterial polypetide isolated from the Sargasso Sea
MQSLRGMVDLLPEVVQRWQAVEAVAREHFRRSGFGEIRTPLLETTDLFCRGIGEGTDVVGKEMYSFTDRGDRACTLRPEGTASVVRAALQHGLLSQGAQKLWYAGPMFRYERPQAGRQRQFHQIGVEWLGAESARSDVEVIALAWDLLAQLGVGGLELEINSLGTPDDRQAYRAA

SEQ ID NO: 188486 - protein, 179 aa, Unknown
  Bacterial polypetide isolated from the Sargasso Sea
MFSFADKKGRNLVLRPEGTAGVVRHHVDKNYNSLNKYYYSDQMFRYERPQKGRYREFHQVGAEIIGYETGSVLEIFSILQLSNDFLENCVPTNTKYRFEINSIGSSDDRKNYNKELTAYFKKNITKLSDDSVNRLDKNPLRILDSKDKNDITISKDAPKISEYRSDESNKQFSELTQKL

SEQ ID NO: 188487 - protein, 172 aa, Unknown
  Bacterial polypetide isolated from the Sargasso Sea
MDLIENKANKADTANGIFYTEHILKDIFETYSISEIRTPALEDSSLFKRSVGDTSDIVNKELYSFMDKNDKSITLRPEGTASVIRSIIEKKIDNESNKFWYLGPMWRYERPQKGRYRQFSQAGVEILGYSEGIAELEIVSIICSINKALGIENSILKINHLGDKESKEKYCN

SEQ ID NO: 188488 - protein, 218 aa, Unknown
  Bacterial polypetide isolated from the Sargasso Sea
MSKITSVRGMNDLPPEEVRVWTIAEETIKKVFNSYGYEEIRFPIVEKTELFTRSNESADIVTKEMYTFEDKGGDSISLRPEGTAGCVRAAIDNDLVRIDCPRLWYQGPMFRYERPQKGRSRQFQQSSAEAFGIRSAEIDAELIILSSRIWKELGVISNLNLQINNIGDEETRQSYAKSLQNYFKKYERDLDEDSLRKLSENPLRILDSKSESIQGLLK

SEQ ID NO: 188489 - protein, 210 aa, Unknown
  Bacterial polypetide isolated from the Sargasso Sea
MPKIKSIRGMNDVTPLDIRVWQYAEKSIRSIFTSYGYQEIRLPLVERTELFARGVGKSTDIVSKEMYTFEDKGGETISLRPEGTASCVRACLENDLLRVDSPRLWYMGPMFRYERPQKGRSRQFHQASLEAYGNEGPHIDAEIILVASSLWKDLEIKDKVKLEINNLGNDETRKKYKKLLQDFFEPFTNDLDEDTMRNLKENPLRILDSK

SEQ ID NO: 188490 - protein, 321 aa, Unknown
  Bacterial polypetide isolated from the Sargasso Sea
MYDFIDKNGESICLRPEGTASIVRAVIEHNLVYDRGLKKQKYMYYGPMFRHEKPQKGRYRQFNQFGIEYFGFKNINSDLEIIILGNHIFNKIGLNNIELYINSLGNELDKNKYSKIIMDYFSSFKDILDEYQLKTLSNNPLRLLDSKKDNIINLLDDIPKMIDTLSTESKSRFQALLNKLDDMGIEYHVDNSIVRGLDYYNDTVFEWRDKSLGSQNAICAGGRYDSLVENTGGNNVPAIGFAIGVERIVELLKTNNINYASDKPIIPFMSTISESESYDIELVTTLRNKYPKTCFLTTDNSASLSSQTKHALKTNESIIIL

SEQ ID NO: 188491 - protein, 214 aa, Unknown
  Bacterial polypetide isolated from the Sargasso Sea
DLFGKEINKFNKVVYEVKDIAKKFGFNELITPIFESSELFKKPLGEQSDVVLKEMYTFKDRNNDEITLRPEYTTPMIRAALSNGLLNNLPAKFFGTGQMFRRERPQKGRYRQFNQINFENFGTNDIFADIEIINLASTILKNILPDRKITLHLNTLGSRENLKDYKNTLSKYFTENKNLLSADSVNKINSNPLRILDSKNIEDHKYNKKMSKAY

SEQ ID NO: 188492 - protein, 130 aa, Unknown
  Bacterial polypetide isolated from the Sargasso Sea
MQSLRGMVDLLPAATSRWQWLEQTAREHFHRSCIREIRTPLLEATELFARGIGEATDVVGKEMYSFNDRGDRSCTLRPEGTASVVRAAIQHGLLSQGAQRLWYGGPMFRYERPQGGRQRQSTKSASSFWA

SEQ ID NO: 188493 - protein, 242 aa, Unknown
  Bacterial polypetide isolated from the Sargasso Sea
MFEVEKVIKNIFINYKFQEIRTPVLEDANLFKRSVGDSSDIVNKEIYSFNDRNDKTIAMRPEGTASVIRSIIEKKLDQANHKLWYVGPMWRYERPQKGRYRQFNQAGIEILGIPEGLPEYEMISVVCNVIDQFKLKNCCIKINHLGTRENKESFCKALVEFLEPFKKDLDAKDLERLSKNPLRVLDSKNSETQVILKNAPSIREFIDRASIEMLDSIKYEFSDICKIEIDHNLVRGLDYYSG

SEQ ID NO: 188494 - protein, 139 aa, Unknown
  Bacterial polypetide isolated from the Sargasso Sea
MNNFKNLRGTVDLFPEQLIKWQNVEKILLEQLSRASIKEIRTPILEMTELFIRGIGEGTDVVSKEMYTFLDRGERSCTLRPEGTASVARALIQNGISSNPLQKLWYMGPMFRYERPQAGRQRQFHQLGVEFIGYDSVRS

SEQ ID NO: 188495 - protein, 233 aa, Unknown
  Bacterial polypetide isolated from the Sargasso Sea
FRYEKPQKGRYRQFYQMGVEAFGFEGPDIEAELVLLITKYFEEIGLNQYLTLEINTLGSHEDRGRYREALVSYLTPFYGELDEDSQRRLKTNPLRILDSKIEKVRDIVFDAPKLIEFVGSHAREHFERFQELLCKMNLSFKLNDRLVRGLDYYTNTVFEWVTEELGSQGAVCAGGRYDGLVEQLGGKSTPAVGLAMGLDRIVLLHEKFQGDTGRPSLDLYICILDESKMDRAF

SEQ ID NO: 188496 - protein, 134 aa, Unknown
  Bacterial polypetide isolated from the Sargasso Sea
MNSCSPIRHVSQLQSLRGMVDLLPETLQRWQAVEAEAREHFSCAGFGEIRTPLLETTDLFCRGIGEATDVVGKEMYSFQDRGDRSCTLRPEGTASVVRAALQHGLLSQGAQKLWYAGPMFRYERPQAGRQRQFH

SEQ ID NO: 188497 - protein, 260 aa, Unknown
  Bacterial polypetide isolated from the Sargasso Sea
MRPEGTASVMRSIIEKKLDGETHKLWYLGPMWRYERPQKGRYRQFNQAGIEILGYPEGASEFEMISIICELNRKLLIRKPLIKINHLGDSDTKKLFCEALVDYLTPLKSNLDEKDLLRLDSNPLRILDSKNPNTLEILKKAPSISDYLEDSSKELLKSIQELFSNKCEIQIDYNLVRGLDYYTGFVFEAISEDLGAQDAYLGGGRYDNLSTQLGGKDLPAIGMAIGIERLALISNYDNKSNTLISFIIISSNFEAKAYKN

SEQ ID NO: 188498 - protein, 306 aa, Unknown
  Bacterial polypetide isolated from the Sargasso Sea
AENTDLFCRGIGEGTDVVGKEMYSFTDRGDRSCTLRPEGTASVVRAAVQHGLLSQGAQKLWYVGPMFRYERPQAGRQRQFHQLGVEWLGVESARSDVEVIALAWDLLARLGVGGLELEINTLGTPEDRQTFRAALVGWLEQRQDQLDDDSRARLTTNPLRILDSKNKTTQALLEQAPTLADALSPESRQRFEAVQRGLTALAIPFRLNQRLVRGLDYYGHTAFEITSDQLGAQATVCGGGRYDGLIAQLGGAATPAVGWALGMERLMLVLEAAAKADPNGPAARLVSPPPPDAYVVNRGDRAEAAA

SEQ ID NO: 188499 - protein, 247 aa, Unknown
  Bacterial polypetide isolated from the Sargasso Sea
LKWLEINKNSLDLDSQNRITKNPLRILDSKDIQTKKALENAPRLFNFLSEKSYKRYSDFKKQLEVLKIPYVENFNLVRGLDYYTHTAFEITSGALGSQATVCGGGRYDNLIKQMGGPNTPAIGFAIGLERLILLAGKELEVPRNTDIYIINQGFIAEPLAMDLSRKLRNYDLLVELDLSGSSFSKQFKKANKLKSKSIIVIGDDEATKREFIIRLFDQSGNGNKEEVISIENDFDLEKWINNNLLAK

SEQ ID NO: 188500 - protein, 226 aa, Unknown
  Bacterial polypetide isolated from the Sargasso Sea
PMRILDSKNPEVQSVIESAPILSDFLSEDSKSHYAKLKGMLDATGVNYIENARLVRGLDYYNNCVYEWTTSVLGAQGSVCGGGRYDGLVKQLGGKDTYACGFAIGMERLVLMLDSLEKVPISQLKQIDIFIATIGANLVSEGLSLANKIRKDYPNLGTLCHCGGGKFNSQLKKAYNCGADVAIILEEESCEGKPINAKIRRLDDSNESKVVKINEISQELRGFLSI

SEQ ID NO: 188501 - protein, 232 aa, Unknown
  Bacterial polypetide isolated from the Sargasso Sea
MNKIQPVRGTTDLYASEMQVYRKVINDAKLVSELFGYEEASFPIFEKDEVFSRPLGHSSDVVSKETYTFNDRGGERITLRPEGTAGIMRSILSEGKTNDLPLKLFYSGPMFRYERPQKGRLRQFIQIGIENIGNHSPLEDAEVIACGASLLKRLGFNKDCVLNLNSLGDTESRNLYRKSLVEYFSKNLEKLSQLSQSRLSLNPLRILDSKEPQDQEIINNAPLYSSYLNNSS

SEQ ID NO: 188502 - protein, 138 aa, Unknown
  Bacterial polypetide isolated from the Sargasso Sea
MTEKIKSIRGMPTLLPAELKLWQPVESEIKKILSSYAYQEIRTPLLERTELFQRTIGEQTDVVSKEMYSFLDRKDQSLSLRPEATAGVVRAGIEHGLFYNQTQKFWSMGPMYRYERPQKGRYRQFHQVNMEAFGYEGP

SEQ ID NO: 188503 - protein, 397 aa, Unknown
  Bacterial polypetide isolated from the Sargasso Sea
MEKFEFIIESFYSVCKKFNFQSIQTPIIEQQELFSRAVGEQTDIVSKEMYSFLDKGEINICLRPEATSGLARFAASNYQSGLMKLVTHGPMFRRERPQKGRYRQFHQINIETIGEKSPYIDFELILVARLLLDELGVIKNKYKLLINSLGSKEDQLSYSKLLKKYLSDFKNQLSETSISRLDKNPLRILDSKDPEDTEILKNAPKISEHLSTESKNYFEQVKKLLNSNEIEFFEEPKLVRGLDYYSHTAFEFQTTEDKRQNAILAGGRYDKLISMISSRDIPGIGWAAGVERLMDLITIEDEKSKSKNKILFAVQDEAYLINNRILKQIYNFKYNHEVRVNKNIKKLFSYADKNNFSFILLIGEEEINSNKIILKDLKNKSQQTFEISKFELKNEIR

SEQ ID NO: 188504 - protein, 230 aa, Unknown
  Bacterial polypetide isolated from the Sargasso Sea
MTCCCRFRHVSQLQSLRGMVDLLPETLQHWQAVEAEAREHFRCAGFGEIRTPLLETTDLFCRGIGEATDVVGKEMYSFQDRGDRSCTLRPEGTASVVRAALQHGLLSQGAQKLWYAGPMFRYERPQAGRQRQFHQIGVEWLGAESARSDVEVIALAWDLLSRLGVGGLELELNSLGSSEDRQAYRAVLVQWLEQRSESLDPDSQARLSTNPLRILDSKNKDTQALLKDAP

SEQ ID NO: 188505 - protein, 348 aa, Unknown
  Bacterial polypetide isolated from the Sargasso Sea
LRPEGTASVVRALIQNGISSNPLQKLWYIGPMFRYERPQAGRQRQFHQLGVEFIGHDSVRSDVEIIALAWDILGKLGIKELNLEINTLGDTNDRSKFQKSFLKWLEINKDSLDLDSQNRITKNPLRILDSKNIQTKKALANAPRLFNFLSEKSHMRYSDLKKQLEVLKIPYVENFNLVRGLDYYTHTAFEITSGALGSQATVCGGGRYDDLIKQMGGPNTPAIGFAIGLERLILLAGKELEVPRNTDIYIINQGLIAESLAMDLSRKLRNYDLIVELDLSGASFSKQFKKANKLKSKSIIVIGDDEAAKSEFLIRLFDQSGNGNKEEVISFENDIKLEKWIYNNLLAK

SEQ ID NO: 188506 - protein, 425 aa, Unknown
  Bacterial polypetide isolated from the Sargasso Sea
MNNLKNLRGTVDLLPDQLIKWQNVEKIVLEQLARASINEIRTPILEMTELFIRGIGEGTDVVSKEMYTFIDRGERSCTLRPEGTASVARALIQNRILSNHPLQKLWYMGPMFRYERPQAGRQRQFHQLGVEFIGYDSVRSDVEIIALAWDILGKLGIKELNLEINTLGDLNDRLNFQKSFLKWLEINKSALDLDSQNRITKNPLRILDSKNIQTQKALENAPRLFNYLSEKSHKRYSNLKKNLEFLKIPYIENFNLVRGLDYYTHTAFEITSGALGSQATVCGGGRYDDLIKQMGGPNTPAIGFAIGLERLILLAGKELEIPRNTDIYIINQGLIAESLAMDLSRKLRNYDLLVELDLSGASFSKQFKKANKLKSKSIVVIGDDEAVNGEFIIRLFDQSGNGNQEEVISFENDNKLEKWINNNLL

SEQ ID NO: 188507 - protein, 411 aa, Unknown
  Bacterial polypetide isolated from the Sargasso Sea
MKFRSIKGTYDVLPDVSNKWKSIESYIHKNLNRAGYNEIRTPIFENTELFKRSVGSDSDVVSKEMYSWIDQGGTDLTLKPEYTASVVRSYIQNNLGASLPVSKLYYIGDLFRRERPQKGRYRQFRQFGIEAIGSKYPEQDSEVISIAYNLITGLGINDITLKLNSIGSSETRKNYRQALLKFLKPKYDQLSETSRNRFDSNPLRILDTKNKSEIELLKKAPKITEYLSKEDDLHFSEVKTYLNDLNIPFTLDANLVRGLDYYTRTTFEIASNTLGAQDAICGGGRYDKLVGSLGGKPSPAVGFAAGLERLLLAMGDKNELANKEIKKIYLIGLGDKARSTMMKILNNIRSSGYFVEFDSLRRSLKAQLRESNKLGASITIIIGEQEMEEQCAQIKDLKSGNQESVPFDSII

SEQ ID NO: 188508 - protein, 407 aa, Unknown
  Bacterial polypetide isolated from the Sargasso Sea
MKSKFQKIKGTYDILPPESKKWNEAISILQSISSQFGYEEIKTPIIENIDLFKQNIGYETDVSKEMFSWEDSSSNQLVLKPEMTAPVVRAYIESGFFRSKPLCKLFYIDALFRREKPQKGRQRQFHQFGIEALGSSEVEQDVEVILLATKVLCHLGITNTTLQINNIGNHETRKKYEEKLNGYFSDYKSKLSKLSQNRLENNSLRILDSKEKEDLEIIKNAPLINEFLTKDELNNFKTLLSHLDALEISYKESGHLVRGLDYYNGTTFEISNMSSRSQNALLGGGRYDYLVESMGGPSTPAVGFAAGIERLLIESSMHDKNEEIDFFIGFDSHAEKAIRIANQLIDEGYSIHIDTLKKSEKNQLKNAIKMNASFYLRCNELIELKNLSSKEECVINNITDLKKFIKS

SEQ ID NO: 188509 - protein, 292 aa, Unknown
  Bacterial polypetide isolated from the Sargasso Sea
SDVEVIALAWDLLARLGVGGLELEINSLGSPEDRQAYRAALVSWLEQRLDQLDDDSRARLTTNPLRILDSKNKDTQALLEQAPTLADALSPESRQRFAAVQQGLTALGIPFRLNPRLVRGLDYYGHTAFEITSDQLGAQATVCGGGRYDGLIAQLGGAATPAIGWALGMERLLLVLEAAAKADPNGAAAKLVATAAPDAYVVNRGVQAETMALTLARGLRAAGLSVELDGSGSAFGKQFKRADRCGARWALVLGDDEAARAEVRLKPLQYNGEERSWAVDDIAAIVEALRNP

SEQ ID NO: 188510 - protein, 419 aa, Unknown
  Bacterial polypetide isolated from the Sargasso Sea
MVDLISKKIRGFRDILPDESQKFLFLEEKIHNICPLFNTKQIRIPALESLNLFKRSIGECSDIVTKEMYSFKDKNDETVCMIPEGTASAMRLAFENNLIYDRGIKKNRFYYITQMFRHERPQKGRYRQFTQFGVEFMGNESIHEDIDLLLMSKIFFDVIKLDNLKLNINSLGLAEDRNKYSQDLQSYFNNYHESFSDQQINTIKNNPLRILDSKDQRLTEIINGAPNISNYINKESLKRFDDMVQILNDLKIDYTINDKLVRGLDYYNDLVFEWKTDQLGTQDAICAGGRYDNLSNIIGNKAVPAVGFAIGVDRVVDLMSYKDTDLVVGLSVISNSKSDMSKISSILRNTDNKFTLIQMDAEKSLTKQIKTAVKSNCDILVIVGSEEISNNILTIKDLRSDRDDMSISFDDFSKFIEEY

SEQ ID NO: 188511 - protein, 356 aa, Unknown
  Bacterial polypetide isolated from the Sargasso Sea
MGNKINSIKGFQDILPKDAIFYRDIEKMLLSLTNSFGIKEVRTPILERSELFNRSIGDSTDIVNKEMYAFEDKNGDNICLRPEGTAGILRSMIQHNMIYDRGIKKQKIWYYGPMFRHENPQRGRYRQFTQFGIEYFGYDDTNSEIELILMMSTFFKSLNLKNIKLHINSLGSLADRNNYKEIIKSNISDKIESFEESIKLTFNKNPLRLLDSKNENIAKICAELPNLLENINSDSKNKFDDFVKKLEDLGIEYIIDNSIVRGLDYYNDLVFEWKADQLGAQNAICAGGRYDNLVNELSDTSVPAIGLAMGVERIIELLKNENYQNNHIILPFVDEHGGNNVNFIKITNKIREKHKN

SEQ ID NO: 188512 - protein, 380 aa, Unknown
  Bacterial polypetide isolated from the Sargasso Sea
MDKISSIRGMPDVFESDTNYLAELNEVLSKIFLSHNLNEVNTPILEQTELFVRSTGITSDIVNKEIYSFNDRNEQSLSLRPEGTAGVVRSIIQKKLDNAEHKLWYQGPMFRYERPQKGRFRQFNQAGVELLGFEEGSSDLEIISIVCDIFIELELEDAVLRINHLGDKDTKQKFLSELLRYLKSYKGNINENDKEKLNKNPLRLLDSKDVDLKEFLDKGPKIIDFLSPEQLNLLDKIQSIFGKYVEIELDSSLVRGLDYYTGLVFEAVSSNLGAQDSFLGGGRYDDLSKDLGGKEMPAIGFAIGLERLNLIKKHKNIKSNKVISFVTTSSKMNALAFKIAQLLRSHNYDIRLETNFTDASLKAKLRKASKLGAKFVFIMG

SEQ ID NO: 188513 - protein, 273 aa, Unknown
  Bacterial polypetide isolated from the Sargasso Sea
MPDLFPEDLERWHIFESKLSKIFHSFDTHEIRTPLLESSELFSRSVGNSSDIVNKELYSFLDRNEESISLRPEGSASVIRAIIQKKQEQEKHKFWYQGPMFRYERPQKGRFRQFHQVGVEYLGFEEGIAEYELLSMVLQINKLIGISDYTIKINHLGDRDAKKIFCDSLVTFLKPHINELHVKDQARLKSNPLRVLDSKEKPTQELLKEGPKFQDFISDDSKIFLQNLVDAFSNHCDIQIDQSLVRGLDYYTGIVFETVSQNLGAQDAFLGGG

SEQ ID NO: 188514 - protein, 357 aa, Unknown
  Bacterial polypetide isolated from the Sargasso Sea
MVNKINSIKGFQDILPKDAIFYRDIEKMLLSLTNSFGIKEVRTPILERSELFNRSIGDSTDIVNKEMYAFEDKNGDNICLRPEGTAGILRSMIQHNMIYDRGIKKQKIWYYGPMFRHENPQKGRYRQFTQFGIEYFGYDDTNSEIELILMMNTFFKSLNLKNIQLHINSLGNLADRNNYKEIIKSNISDKIESFEESVKLTFNKNPLRLLDSKNENIAKLCAKLPNLLENINSDSKNKFHDFVKKLEDLGIEYIIDNSIVRGLDYYNDLVFEWKADQLGSQNAICAGGRYDNLVNELGDTSVPAIGLAMGVERIIELLKNENYQNNHLILPFVDEHGGNNINFIKITNKIREKHKAF

SEQ ID NO: 188515 - protein, 431 aa, Unknown
  Bacterial polypetide isolated from the Sargasso Sea
MDKEIKPVSKDIQAIRGMNDCLPADTPAWQFVEQVLRKTVRNYGYEEIRFPIVEMTELFKRSIGEVTDIVEKEMYTFADRNGDSLTLRPEGTAVCVRAANQNGLLYNQEQRLWYMGPMFRHERPQKGRYRQFHQFGLEAFGMAGPDIDAEVILLSARLWKSLGLSSHVTLELNSLGSNQARADYRAALVAYLEQHKELLDEDSLRRMYSNPLRVLDSKNPVMQDMLGKAPQLLEYLDDESKADFDGLQKRLKAAGVEFVINPRLVRGLDYYNKTVFEWVTSSLGSQGTVCAGGRYDGLVEQLGGKATPAVGFALGMERLVLLLQTLELLPEAQPQTDIYLMALGESAELAAVSIAESLRNELPELRLMTHCGGGNLKKQMKKADKSGASLGLLLGETELAAGEITLKWLREEKPQQNIKLTELSSALKQLV

SEQ ID NO: 188516 - protein, 406 aa, Unknown
  Bacterial polypetide isolated from the Sargasso Sea
SDLLPDKQKFSRHIESIASQLSSLYGYSRVDTPTFEDSSLFVRSVGEGTDIVDKEMYSFDDRGGDSMTLRPEGTASICRAYLEHGMHNFAQPVRMHYFCSVFRYERPQAGRYREHHQFGIEAIGDPDPSIDVEIIKFAHDLITGIGLNQINLFINSIGDSNCRPAYVESLKKYYETYRDELCKDCLTRIDRNPLRLLDCKNEECSQLSIEAPKSINYLCEECESHWESVLDYLKELEIPYTIDHKLVRGLDYYTKTVFEIQPKDVGGQSTILGGGRYDALIEQIGGRAVPAMGFATGIERLTLNLIKESVDIPDIKSPKYLVINVGDKARIRAIKIADQIREKGTGAMVANGTRGLRGQMRQANSLNVPFVIIIGESELERNELVVKDMATAEQNICSISDFMSAL

SEQ ID NO: 188517 - protein, 292 aa, Unknown
  Bacterial polypetide isolated from the Sargasso Sea
FGLQGPDIDAELIMLTARWWRALGISQHVSLELNSIGSLEARANYRDALVAYLELHKEKLDEDCKRRMYTNPLRVLDSKNPEVQALLNDAPALGDYLDDDSREHFAGLCKLLESAGIAYTVNQRLVRGLDYYNRTVFEWVTSSLGSQGTVCAGGRYDGLVEQLGGRATPAVGFAMGLERLVLLVQAVNPEFNADPVVDIYLVASGADTQSAAMTLAERLRDEVPGVKLMTNHGGGNFKKQFARADKWGARVALVLGESEVADGTVVVKDLRSGEQTAVAQDSVAAHLRTLLG

SEQ ID NO: 188518 - protein, 422 aa, Unknown
  Bacterial polypetide isolated from the Sargasso Sea
MEKIHSLTGMIDLIGHKTSKEDISERIFYAEEILRDIFESYSISEIRTPALESSNLFKRSVGDASDIVNKELYSFLDKNEKSITLRPEGTASVIRSVIEKKIDNDTHKLWYLGPMWRYERPQKGRYRQFNQAGVEILGYPEGLAELEIVSLICSINRALGIDDSVLKINHLGNNETKQNYCKALEDFLIPLSSKLDAKDLERLNKNPLRVLDSKNLNTQAILKDAPKIIDYLSEDAISILNTIKNTYSNDCKIEIDHNLVRGLDYYTGFVFEAVSSSLGAQDSYLGGGRYDELCKQLGGKSLPAIGMAIGIERLASLAKTYKDNMTMVSFIILSNKIEPKAYKIAHNLRSINNSINIDVQLSDGSLKSKLRRANKDNAAYALIIGEDELKAKKIIVKPLLDKSSEQVTLGLDEIDGFIKKLK

SEQ ID NO: 188519 - protein, 424 aa, Unknown
  Bacterial polypetide isolated from the Sargasso Sea
MTEKIKSIRGMPTLLPAELKLWQSVESTVKKILSNYAFQEIRTPLLERTELFQRTIGEQTDVVSKEMYSFLDRKEQSLSLRPEATAGVVRAGIEHGLFHNQTQKFWSMGPMYRYERPQKGRYRQFHQVNMEAFGYEGPGIDAELILLTSRIWRKLGVEDIQLELNSLGTAESRKGYRTILVEYFNDHTDSLDEDSILRLEKNPMRILDSKNPEMADVIHSAPKMNDHLDQESEDHFNGLLEYLDGHRIQYVLNPRLVRGLDYYTKTVFEWTTDKLGAQATVCGGGRYDDLVKQLGGKDVFAIGCAIGFERLVELVELSGKKDQNGHPKIYLVAVGDQAEAKSSELAEMIRDQFEDCVLELNQDGGSFKQQFKRADRAESDIALILGDEEIENDTIGIKLMKEGGDQETISQDKLLESIADKIGA

SEQ ID NO: 188520 - protein, 255 aa, Unknown
  Bacterial polypetide isolated from the Sargasso Sea
MTDKIKSIRGMPTLLPAELKLWQSVESTIKKILSNYAFQEIRTPLLERTELFKRTIGEQTDVVSKEMYSFLDRKEQSLTLRPEATAGVVRAGIEHGLFHNQAQKFWSIGPMYRYERPQKGRYRQFHQVNMEAFGYEGPGIDAELILLTSRIWRKLGVDDIQLELNSLGTAESRKTYRSILVEYFNDHIESLDEDSILRLEKNPMRILDSKNPEMSDVIHSAPKMNDHLDQESANHFNRLLEHLDAHDIQYVLNPR

SEQ ID NO: 188521 - protein, 446 aa, Unknown
  Bacterial polypetide isolated from the Sargasso Sea
MTEQKRKIEKLTGVKGMNDILPQDAGLWEFFEATVKSLLRAYGYQNIRTPIVEHTQLFTRGIGEVTDIVEKEMYSFTDALNGENLTMRPENTAAVVRASIEHNMLYDGPKRLWYIGPMFRHERPQRGRYRQFHQVGVEALGFAGPDADAEIIMMCQRLWDDLGLTGIKLEINSLGLAEERAAHRVELIKYLEQFADVLDEDAKRRLYTNPLRVLDTKNPALQEIAQNAPKLIDFLGDESRAHFEGLQRLLLANNIPFKINPRLVRGLDYYNLTVFEWVTDKLGAQGTVAAGGRYDPLIEQLGGKPTAACGWAMGIERILELLKEEDLAPEQEGVDVYVVHQGETAREQAFIAAERLRDTGLDVIFHCSADGAPASFKSQMKRADASGAAFAVIFGEEEVANGTVGVKALRGAGGDGEKNVQQTVPVEGLTEFLINAMVASAEDGDD

SEQ ID NO: 188522 - protein, 298 aa, Unknown
  Bacterial polypetide isolated from the Sargasso Sea
MAQVKSIKGTHDILPDQTKDWQELEMQVHKTSNLYGYSEIRTPIIETASLFNRGVGEETDIVSKEMYSWEDKDKSIISLRPELTAPVVRSYIQHNLGGQSPLQRLYYIGPSFRRERPQKGRQRQFHQFGVEAIGSANPEQDAEVISLGWDILKSFGIKSLELKLSSIGSKSCRENFKSELVKYLNPFIPKLSEVSQRRLEKNPLRILDTKNKDEIEIVKSAPKIEQFYTKDDQNYFFSVQKFLNDLEIPFKIDPLLVRGLDYYTQTTFEICSENLGAQDALLGGGRYNGLVGSLGEKM

SEQ ID NO: 188523 - protein, 143 aa, Unknown
  Bacterial polypetide isolated from the Sargasso Sea
MKFRSIKGTYDVLPDVSNKWKSIESYIHKNLNRAGYNEIRTPIFENTELFKRSVGLDSDVVSKEMYSWIDQGGTDLTLKPEYTASVVRSYIQNNLGASLPVSKLYYIGDLFRRERPQKGRYRQFRQFGIEAIGSKYPEQDSEV

SEQ ID NO: 188524 - protein, 334 aa, Unknown
  Bacterial polypetide isolated from the Sargasso Sea
WYIGPMFRHERPQRGRYRQFHQVGVEALGFAGPDTDAEIIMMCQRLWDDLGLMGIKLELNSLGLAEERAAHRVELIAYLEKHMDVLDEEAKRRLYTNPLRVLDTKNPAMQEVAQNAPKLIDFLGEESRAHFEGLQRILKANNIPFTINPRLVRGLDYYNLTVFEWVTDKLGAQGTVAAGGRYDPLIEQLGGKPTGACGWAMGVERILELLKEEQLVPEDEGCDVYVVHQGDAAREQAFIIAERLRDTGLDVILHCSADGQTASFKSQMKRADASGAAFAVVLGEDEIANGTVGVKPLRDTSSNGGKNEQHNVPAEDLTEFLINAMVATAEDGDD

SEQ ID NO: 188525 - protein, 293 aa, Unknown
  Bacterial polypetide isolated from the Sargasso Sea
YDSVRSDVEIVALAWDVLSKLGIKELNLEINTLGDVSDRLNFQKSFLKWLEINKNSLDLDSQNRITKNPLRILDSKDIQTKKALKNAPRLFNFLSEKSHKRYSEFKKQLEVLKIPYVENFNLVRGLDYYTHTAFEITSGSLGSQATVCGGGRYDNLVKQMGGPNTPAIGFAIGLERLILLAGKELEVQRNTDIYIINQGSIAEPLAMDLSRKLRNYDLLVELDLSGSSFSKQFKKANKLKSKSIIVIGDDEATKREFIIRLFDQSSNGNKEEVISLENDFELEKWINNNLLAK

SEQ ID NO: 188526 - protein, 422 aa, Unknown
  Bacterial polypetide isolated from the Sargasso Sea
MDKIQSLKGMIDLIANRSDPDDFAESIFRTEDALKNIFVNFGYSEIRTPTLEDADLFKRSVGDSSDIVNKELYSFLDKNEKNITLRPENTAGVIRSVIEKKIDVNTHKFWYLGPMWRYERPQKGRYRQFNQAGIEIIGHPEGVAELEIISMICSINNALNIKNSVIKINHLGNQGTKTNYCNALLEYLKPFSSQLDQLDQSRLEKNPLRILDSQNQNTQKILKDAPTIKDFLSDESLKMLQMLKDTFSKDCKIEIDYGLVRGLDYYTGLVFEAISDELGAQDAYLGGGRYDNLSEQLGGKDLPCIGMAIGIERLALLSNIVIEDKTLISFIILSSNFEEKAYKIAHDLRTINPEIIIDVQLAEGSLKSKLRKASKNNAKFAIIIGEEEIETNTIIIKPLIEKNSEQTVMDINEISSFFEDIT

SEQ ID NO: 188527 - protein, 454 aa, Unknown
  Bacterial polypetide isolated from the Sargasso Sea
MSSKPNTPKGTRDFSSDQIVKRNYILKILVDSFKYFNYSEIQTPSFENLETLIGEYEDDQDGQMFKIISSGEKILRADIDSLNKGELIKFSNSISDKALRYDLTVPLARYVSQNLNNINFPFKRYQTQLVWRAERPQRGRYREFLQCDVDVVGDSSYLQVVESIQLCDMVFDKLGFKNLKLRINDRRILESLSKTAGLENFVEFAIIIDKLDKIGLDEVIKLLKDKGANDDSINNIKNLFSLSESPKDKIQKVIGSFESNLFDELSSIISALSKIKLNVLEIDFDLSLARGINYYTGIVLEVSSPENSSIGSIAGGGRYDNLIQQVGKNIDLSGFGLSFGFDRIYLILEELNLFPNNINNQKTFLFLNFDNNISEQILNSMSNLRYQGIICELYPSNVKIKKQLDYANKKNFDFVILIGEEEVKNDSFILKNMSSGEQNSYKIDTLEDQIKKLI

SEQ ID NO: 188528 - protein, 375 aa, Unknown
  Bacterial polypetide isolated from the Sargasso Sea
FENTELFKRSVGLDSDVVSKEMYSWIDQGGTDLTLKPEYTASVVRSYIQNNLGANLPVSKLYYIGDLFRRERPQKGRYRQFRQFGIEAIGSKYPEQDSEVISIAYNLITGLGINDITLKLNSIGSSETRKNYKQALLKFLKPKYDQLSETSRNRFDSNPLRILDTKNKSEIELLKKAPKITEYLSKEDDLHFTEVKTYLNDLSIPFTLDTNLVRGLDYYTRTTFEIASNTLGAQDAICGGGRYDKLVGSLGGKPSPAVGFAAGLERLLLAMGDKNELANKEIKKIYLIGLGDKSRSTMMKILNNIRSSGYYVEFDSLRRSLKAQLRESNKLGASITIIIGEQEMEEHCAQIKDLTSGNQESVPFDSIISYIEDLK

SEQ ID NO: 188529 - protein, 359 aa, Unknown
  Bacterial polypetide isolated from the Sargasso Sea
AIRPEMTPTVARMVAQVYREVPKPIRWYSIPNLMRYERPQKGRLREHWQFNVDIFGENSIFMELEVLQVAVDLFEQFGANQKHFEIRINNRKLIDHFFSNSLSLDENQSLKLYKLLDRVKKIKPEAFEEELASFNFSEKDNELFSNYLKISSHKELETFLGKIEFPIESWDYSAFFKVVSELGLSDYIHYDPTIVRGLDYYTGLVFEIYDKHPDNRRALCGGGAYEGLMSIFGEDQLPGVGFGLGDVTLKDFLEVHKLLPSFNQQAPSVFIASESEGLASSVMKTARFLRKENLSTVHEASKLKYKKIFQSANKMGAKNVIILQLNDSEEVQLKVKNMASGDQKVFSMEELEQCSSFCQ

SEQ ID NO: 188530 - protein, 412 aa, Unknown
  Bacterial polypetide isolated from the Sargasso Sea
MDLIGHKTDKTEIADKIFFTEKILRNIFQNYSLSEIRTPALEDEGLFKRSVGDSSDIVNKELYSFLDKNDKSIVLRPEGTASVIRSMIEKKIDNDTHKLWYLGPMWRYERPQKGRFRQFYQAGVEILGYEEGLAELEIMSLICAINKELDIKNSVIKINHLGNKDCKKNYCKELINYLKPMSANLDKKDLDRLNNNPLRILDSKNPETQNILKDAPVIADYLPKESKDLLDLIKETFSNDCNIKIDYKLVRGLDYYTGFVFEAISEELGAQDAYLGGGRYDDLCSQLGGKRLPAIGMAIGIERLASLINAHEINKTLISFIILSSKIEQKTYKIAHNLRLLNSKINLDIQLSDGSLKSKLRRANKDNASYALIIGEEELKSNTVIVKPLLDKNSEQSTMNLNELDDFIKSLT

SEQ ID NO: 188531 - protein, 126 aa, Unknown
  Bacterial polypetide isolated from the Sargasso Sea
MQAIRGMNDILPEQTPAWRYLESTLVSLLDGYGYKEIRLPIVEYTELFARGIGEGTDVVDKEMYTFLDRNEESLTLRPEGTAGCVRAVLEHGLSGGGQVQKLWYAGPMFRYEKPQKGRYRQFHQVG

SEQ ID NO: 188532 - protein, 414 aa, Unknown
  Bacterial polypetide isolated from the Sargasso Sea
MKIQSLRGMPDLFPEDLERWHIFESKLSKIFHSFNTHEIRTPLLESTELFSRSVGSSSDIVNKELYSFLDRNEESISLRPEGSASVIRAIIQKKQEHEKHKLWYQGPMFRYERPQKGRFRQFHQVGVEYLGFEEGVSEYELISMVLQINKLIGISDYTIKINHLGDQLSKESFCNSLVAFLQPHINELHEKDQARLRSNPLRVLDSKEESTQALLKKGPKFQDYISEDSRNFLQNLVNTYSNHCDIQVDQSLVRGLDYYTGIVFETVSEKLGAQDAILGGGRYDNLSKQLGGKDMHAIGFAIGVERIIELLSIQNIKQPLKVGFIIAGEQIDKKTYKIADDLRSANNSIILDTFLSEGSLKSQLRRANKNNCSYAIIVGEDEFKNDQVIWKDLSDGGEQELLTSKEVIDKYTNL

SEQ ID NO: 188533 - protein, 307 aa, Unknown
  Bacterial polypetide isolated from the Sargasso Sea
MKIAPIRGTHDFFGQQVLKYRAIQDLISHYSRIYNFEEIITPIFESTELFKKPLGENSDVVLKEMYTFKDKNEDFITLRPEYTTPMIRSAISNNLLEKLPKKLYGIGPMFRRERPQKGRYRQFNQINFEILGTHDISADVELIILANNFLTNLLPEKKINLFINSLGDKDTLSNFSETLRKYYKQNKKKLTEESQNKIISNPIRILDSKDPADKEINVNAPTISDFYSNEAKEKFSNIQKILKDMSIDFSINKSLVRGLDYYCHTVFEFKTLDLGSQDTLIGGGRYDGLTRLLGGPDIPGVGWAGGI

SEQ ID NO: 188534 - protein, 144 aa, Unknown
  Bacterial polypetide isolated from the Sargasso Sea
MKKLQAIRGMNDILPDQSIIWQFLEKTFSRVVRRFGYQEIRFPVVEQTQLFKRSIGEITDIVEKEMYSFDDRNGVNLSLRPEGTAGCVRAGEQNGLFYNQQRRLWYQGPMFRHERPQKGRYRQFHQFGVEALGMPGPDIDVEVL

SEQ ID NO: 188535 - protein, 426 aa, Unknown
  Bacterial polypetide isolated from the Sargasso Sea
MNNLKNLRGTVDLFPDQLIKWQNVEKILLEQLSRASIKEIRTPILEMTELFIRGIGEGTDVVSKEMYTFLDRGERSCTLRPEGTASVARALIQNGISSNPLQKLWYMGPMFRYERPQAGRQRQFHQLGVEFIGHDSVRSDVEIIALAWDILGKLGIKELNLEINTLGDTNDRSNFQKSFLKWLETNKDSLDLDSQNRISKNPLRILDSKNIQTKKVLENAPRLFNFLSEKSHNRYLDLKRQLEALKIPYIENFNLVRGLDYYTHSAFEITSGALGSQATVCGGGRYDDLIKQMGGPNTPAIGFAIGLERLILLAGKELEIPRNTDIYIINQGLIAESLAMDLSRKLRNYDLLVELDLSGASFSKQFKKANKLKSKSIIVIGDDEAVNGEFIIRLFDQSGNGNEEEVISFENDIKLENWINNNLLVK

SEQ ID NO: 188536 - protein, 408 aa, Unknown
  Bacterial polypetide isolated from the Sargasso Sea
MSDLKTIRGMPDLYGENIEAISMVEETCLKTFKSFNFQEFRTPVLENKSLFDRSVGESSDIMQKEVYEFKDRKDELLCLRPEGTAGLVRALITNGLDNDEIKKFYYLGPMFRYERPQKGRKRQFFQAGVELIGDESSDADIEIILIANTILEKLNIKSKLQLNYLGDQKSLQKYNEYLKEYLSETSNLPEYVIKNPIRALDSKDKDIRNKMSKAESIKNFLSKTQLEEFKKIKSKLDEIGIQYEENASLVRGLDYYNGLVFEFLSDDLGAQNAILGGGRYDGLIKNLGGRDLSATGFALGIDRLADIVKLSSIEKDLFIGCVDKESRTYAQALGYKIRKDNSLLVVENYLGNANVGKQLKKADSQGFKFAIIVGQDELKSKTLKLKNLREDKPDLELKEKDLLEYFEC

SEQ ID NO: 188537 - protein, 229 aa, Unknown
  Bacterial polypetide isolated from the Sargasso Sea
MNNLKNLRGTVDLFPDQLIKWQNVEKIVLEQLSRASIKEIRTPILEMTELFIRGIGEGTDVVSKEMYTFLDRGERSCTLRPEGTASVARALIQNGISSNPLQKLWYMGPMFRYERPQAGRQRQFHQLGVEFIGHDSVRSDVEIIALAWDILGKLGIKKLNLEINTLGDTNDRSNFQKSFLKWLETNKESLDLDSQNRINKNPLRILDSKNIQTKKVLENAPRLFNFLSE

SEQ ID NO: 188538 - protein, 197 aa, Unknown
  Bacterial polypetide isolated from the Sargasso Sea
MSKEQIRSIKGTQDILPDQSHKWQNLENRIHSIMKLYNYKEIRTPVFEKTELFNRGVGTETDIVSKEMYSWTDQGGENLTLKPELTAPVSRAFIQHNLGNQQPLTKLYYIDASFRRERPQKGRYRQFHQFGVEAFGSEHSEIDSEIIAMAITLFNQIGVKDLSLNINSIGSESCRKNYIEQLKGFLKPHFGDLTQTS

SEQ ID NO: 188539 - protein, 404 aa, Unknown
  Bacterial polypetide isolated from the Sargasso Sea
MEKINSLTGMLDLISSKSDQNEFANKIFSTEESLRVIFENFSLCEIRTPALENTNLFKRSVGDTSDIVNKELYTFLDKNEKSISLRPEGTASVIRSVVEKKLDGQLHKLWYLGPMWRYERPQKGRFRQFNQAGVEILGYEEGVAEFDLVSLICSINKELKIHEPILKINHLGDKDAKKEYCKALTDFLKPMENDLDEKDQERLKKNPLRILDSKNEEIKKILVNAPSISDFLPSSSIDLLTKLKKTFSDDCNIQIDYNLVRGLDYYTGLVFEAISSDLGAQDAYLGGGRYDSLCKNLGGKDLPAIGMAIGIERLTLISNYKHKNKTSISFIIISGNEEPKAYKIAHDLRALNKQINIDVQLSYASLKSKLRKANKNNASYAVIIGDEELTSNTAILKSLKEKDL

SEQ ID NO: 188540 - protein, 322 aa, Unknown
  Bacterial polypetide isolated from the Sargasso Sea
MTKLQAIRGMHDILTHETPNWQFVEKKIQYILNQYAYKEIRLPILEKTELFENSIGGNTDIVSKEMYSFEDKNKMSLTLRPEGTASCVRAGIEHGLFHNKTQRLWYIGPMFRYERPQKGRQRQFHQLGIEAFGLKGPDVDAEQIMMSNRIWKELNIKNINLEINSLGTTESRKNYRKILVDYFTDNKNKLDDDSLVRLETNPLRILDSKNSEMKSLIANAPSISEYHDSESKDHFAQLTEILEHGNIKFTINSKLVRGLDYYGKTVYEWTTTELGTQDTVCAGGRYDNLIENHGSASTPAVGFAIGIERLLELINFENTLEK

SEQ ID NO: 188541 - protein, 420 aa, Unknown
  Bacterial polypetide isolated from the Sargasso Sea
MSKRPIRSIKGTQDILPDQSFRWQALESIIRDTMDKYNYHEIRTPAFENTALFLHSVGEETDIVSKEMYSWEDQGGENLTLKPELTAPVARSFIQNNLGGLNPINKLYYIDSLFRRERPQKGRYRQFHQFGIEAFGSEFPEIDVEVIALAMSTFNNLELNGLTLELNSIGSKDCRDNFRKAIKEYLKPNFDKLSETSQTRFNKNPLRILDTKSPDEKRLLKDGPKISDYWTSDDKNHFNEVCELLDKINIKFELSPNLVRGLDYYTRTTFEVTSDLLGAQNAICGGGRYDGLVEQLGGKPTPGIGFAAGMERLLLADQRNFEPTKSQIYIVGLGDSVRSLIVNLAEELRKNNFRTNFDVLRRSIKSQMRDANKLDAQYVIIIGEEELSKNIATIKDLSSGDQKEIPFESILNHIKSLPLK

SEQ ID NO: 188542 - protein, 253 aa, Unknown
  Bacterial polypetide isolated from the Sargasso Sea
HLGDSNTKKLFCKALVDYLTPMKSNLDEKDLLRLDSNPLRILDSKNPNTIEILKKAPSISDYLQDSSKDLLKSIQELFSDKCEIQIDFNLVRGLDYYTGFVFEAISEDLGAQDAYLGGGRYDNLSAQLGGKDLPAIGMAIGIERLALISYQENKNRTLISFIIISSNSEAKAYKISHELRSINKNIDIDVQLSQGSLKSKLRRANKNGAAYAFIVGDDEIESETVIIKPLNKEDSDQSSMNLNEIENFIKNLS

SEQ ID NO: 188543 - protein, 390 aa, Unknown
  Bacterial polypetide isolated from the Sargasso Sea
MTDLIETKADEDVLANKVFQTEKILKEIFTNYAMSEIRTPALENTNLFKRSVGDTSDIVNKELYTFSDKNDKSITLRPEGTASVIRSIIEKKLDGETHKLWYLGPMWRYERPQKGRYRQFNQAGIEILGYSEGAPEFEMISLICELNRKLQIRKPLIKINHLGDSNTKKLFCKALVDYLTPMKSNLDEKDLLRLDSNPLRILDSKNPNTIEILKKAPSISDYLQDSSKELLKSIQELFSDKCEIQIDFNLVRGLDYYTGFVFEAISEDLGAQDAYLGGGRYDNLSAQLGGKNLPAIGMAIGIERLALISYQENKNRTLISFIIISSNSEAKAYKISHELRSINKNIDIDVQLSQGSLKSKLRRANKNGAAYAFIVGDDEIESNTVIIKPL

SEQ ID NO: 188544 - protein, 412 aa, Unknown
  Bacterial polypetide isolated from the Sargasso Sea
MDLVGKKADKSEVSNRIFFTEKVLKNIFQSYCLSEIRTPALEDENLFKRSVGDTSDIVNKELYSFLDKNDKRIVLRPEGTAGVIRSIIEKKIDGDAHRLWYLGPMWRYERPQKGRFRQFYQAGVEILGHEEGLAELEMVSLICSINTQLEIKNPVIKINHLGNKECKNLFCKELVSYLKPFSSKLDKKDLERLDRNPLRILDSKNSETQNILKEAPKISDYLSKESLDLLNLIRDTFSNDCNIEIDHTLVRGLDYYTGFVFEAISPELGAQDAYLGGGRYDQLCSQLGGKDLPAIGMAIGIERLASIANTSEINKTLVSFIILSNKIEQKAYKIAHDLRSVNKKLNLDIQLSDGSLKSKLRRANKDNASYALIVGEEELKSNTVIVKSLLDENSEQSNMNINELHDFIKSIV

SEQ ID NO: 188545 - protein, 417 aa, Unknown
  Bacterial polypetide isolated from the Sargasso Sea
MKDFENIEIQKIEYIRQHFIETANTFGFDLMEPSPIELMSVIEAKSGPTIRDDVYFFNDKGDREVSLRFDFTIGLTRYIAGQKSMKLPAKISAFGGVWRYDEPQKGRYRFFHQWDIEIFGKQNTETDAEIIEFTSKFFSNLGLENIVLSISHRKITQSYISSIFESENSEVISDILRAIDKIQKKSEQEIISEYEKKGYSKEKLEKIIEFSKLKGSPDEISKKFDVTQFENWTELTSLFESLKNRNVNNIQIDFGIVRGLDYYSGIVFEAFDKNFDIGALVGGGRYDNLPSVFGRDDLGATGVAGGVERIILALENQNSSFLQKTNRISVLYVNEDVKLNAMKIASILRENSIPTDIDLSGRALKKQMEQSTNSKFVIIVGPDELSKNMVVVRNMSDRTENKILISELLEHVKKLLM

SEQ ID NO: 188546 - protein, 315 aa, Unknown
  Bacterial polypetide isolated from the Sargasso Sea
MVDSVRGIRVLDGEDANKYLEIINIFHNVAQKYDCRYIKLPTIEKDELFTRTVGENTDIVTKQMFSFADKKGRNLVLRPEGTAGVVRHHIDKNYNNMIKYYYSDQMFRYERPQKGRYREFHQVGAEIIGYETGSVLEIFSILQLSNDFLENCVPTNTKYRFEINSIGSSDDRKSYNKELTEYFKKNITKLSDDSINRLDKNPLRILDSKDKNDITISKNAPKISEYRSEKSNKKFSELTQKLNDSKIPYLENPHLVRGLDYYNDFTFEIVPENSKGSQDALGGGGQYDDLSNLLGGKEINGVGVAFGVDRIMELS

SEQ ID NO: 188547 - protein, 267 aa, Unknown
  Bacterial polypetide isolated from the Sargasso Sea
MNKFPPIKGMHDNFSPKTDQLRSLEAILINSAEKLGYNEVRTPILENLNLFKKTIGSDSDIVEKEMFTFNTSKDDVIALRPEGTCATARFVANNDLNDQINKFWYLGPFFRHERPQKGRYRQFHQFGVELFGSKSMFYEAELFLLINKIWKNLDLQVPTFEVNNIGTYREREEYSIKLKDFFKKHLESFDENTQKKMMSNPLRVLDSKDPKIKNIIDDIPIIENYLSSKTNDQFKIFLETLDTLGVKYKINSHLVRGLDYYNDIVLR

SEQ ID NO: 188548 - protein, 287 aa, Unknown
  Bacterial polypetide isolated from the Sargasso Sea
MPIIENTDLFSRSVGEETDIVNKEMFSFESKSGKSLSLRPEGTASCLRAAIEMGLTDLGPQRLYYHGPMYRYERPQKGRNREFYQLSIEAYGFKKFNIELEMIDLSYKLFSRLNLFEPILEINSLGSEVSQKKFSDALKEYLLPLKDQLDLDSQKRLSLNTLRILDSKNPETQKLLKKGPKLSQFIETHSLEKFEELKERISKKNIPFTINENLVRGLDYYNDVVYEWKSNQLGSQNTFCAGGRYDSLSKKLGGRDIPAAGFSIGLDRLMLTIPDDSFKKSKKKIMI

SEQ ID NO: 188549 - protein, 248 aa, Unknown
  Bacterial polypetide isolated from the Sargasso Sea
MSKIQTLRGMNDIHPKQVKEWSYVEEIIKSLVESYGYEEIRFPVVEKTELYTRSNEAADIVTKEMYTFSDKSGESISLRPEGTAGCVRAAIDNDLLRTDKPRLWYSGPMFRYERPQKGRSRQFHQFSAEVFGLSSPEIDAELIMISARLWKELDIFEGLRLEINNLGDEQTRKSYSKALVDFLTKFSKELDEEAIRKLTENPLRILDSKSPAIQEILKDAPLIEDFTNQDSKNYQANLLEILDELGIG

SEQ ID NO: 188550 - protein, 419 aa, Unknown
  Bacterial polypetide isolated from the Sargasso Sea
MSKEQIRSIKGTQDILPDQSHKWQNLENRIHSIMKLYNYKEIRTPVFEKTELFNRGVGTETDIVSKEMYSWTDQGGENLTLKPELTAPVSRAFIQHNLGNQQPLTKLYYIDASFRRERPQKGRYRQFHQFGAEAFGSEHSEIDSEIIAMAITLFNQIGIKDLSLNINSIGSEDCRKNYIEKLKEFLKPHFDDLTKTSQQRFEKNPLRILDSKAPDEVELIKGAPLISEFWTQDDRDHFNELCSYLDAMDINYNIDPKLVRGLDYYSRTTFEITSSSLGAQDAICGGGRYDQLVETIGGKPTPGIGFAAGMERILMALDGDDVQNNIKIFVVGLGSKARTVVAKLTKELRQENLSCEYDMLRRSMKSQMREANKLGAKYVIIIGENELQQNQAELKDLTTGNQEKVGLDSIVKHMSSLSF

SEQ ID NO: 188551 - protein, 391 aa, Unknown
  Bacterial polypetide isolated from the Sargasso Sea
MDKISSIRGMPDVFESDTNYLAELNEVLSKIFLSHNLNEVNTPILEQTELFVRSTGVTSDIVNKEIYSFNDRNEQSLSLRPEGTAGVVRSIIQKKLDNAEHKLWYQGPMFRYERPQKGRFRQFNQAGVELLGFEEGSSDLEIISIVCDIFIELELEDSVLKINHLGDKDTKEKFLSELLKYLKSYKGDLNDNDKEKLNKNPLRLLDSKDVDLKEFLDKGPKIIDFLSSEQLNLLDKIQSIFGKYVEIELDSSLVRGLDYYTGLVFEAASSNLGAQDSFLGGGRYDGLSTDLGGKEMPAIGFAIGLERLNLIKKHKNIKSNKVISFVTTSSKMNALAFKIAQLLRSHNYDIRLETNFTDASLKAKLRKASKLGAKFVFIMGEEEFESDTITV

SEQ ID NO: 188552 - protein, 415 aa, Unknown
  Bacterial polypetide isolated from the Sargasso Sea
MDKISSIRGMPDVFESDSNYLAELNEILSKIFLSHNLNEVNTPILEQTELFVRSTGVTSDIVNKEIYSFNDRNEQSLSLRPEGTAGVVRSIIQKKLDNAEHKLWYQGPMFRYERPQKGRFRQFNQAGVELLGFEEGSSDLEIISIVCDIFIELELEDSVLKINHLGDKETKERFLSELLKYLQTYKGELSDNDKEKLNKNPLRLLDSKDIDLKEFLHQGPKIIDFLSPGQLNLLDKIQSIFGNYVEIELDSSLVRGLDYYTGLVFEAVSSNLGAQDSFLGGGRYDELSKDLGGKEMPAIGFAIGLERLNLIKKQKNTKSNKVISFVTTSSKMNALAFKIAQLLRSHNYDIRLETNFTDASLKAKLRKASKLGAKFVFIMGEEEFESDTITVKSFDKDGYQVNMSFDEILDFYKDI

SEQ ID NO: 188553 - protein, 159 aa, Unknown
  Bacterial polypetide isolated from the Sargasso Sea
MNNLKNLRGTVDLLPDQLIKWQNVEKIILEQLSRASIKEIRTPILEMTELFTRGIGEGTDVVSKEMYTFLDRGERSCTLRPEGTASVARALIQNGISSNPLQKLWYMGPMFRYERPQAGRQRQFHQLGVEFIGHDSVRSDVEIIALAWDILGKLGIKEL

SEQ ID NO: 188554 - protein, 424 aa, Unknown
  Bacterial polypetide isolated from the Sargasso Sea
MTEKIKSIRGMPTLLPAELKLWQSVESEIKKILSSYAYQEIRTPLLERTELFQRTIGEQTDVVSKEMYSFLDRKDQSLSLRPEATAGVIRAGIEHGLFYNQTQKFWSMGPMYRYERPQKGRYRQFHQVNMEAFGYEGPGIDAELIIMTSRIWKNLGIDAIQLELNSLGTSKSRKNYRATLVEYFKDHIDSLDEDSLLRLEKNPMRILDSKNQEMSALIDSAPKMNDHLDQESRDHFNDLLERLDSHGINYRLNQRLVRGLDYYTKTVFEWTTDKLGAQATVCGGGRYDDLVKQLGGKDVFGIGCAIGFERLVELVELSDKKDQNSQPKIYLVAVGDQAEAKSSELAELIRDRFEDCVVELNQDGGSFKQQFKRADRSESDIALILGDEEIENETIGIKAMKEGGEQETISQHKLLDSISEKIGI

SEQ ID NO: 188555 - protein, 361 aa, Unknown
  Bacterial polypetide isolated from the Sargasso Sea
MTRVNKVRGMNDLIPEQIGNWQVIENQIKKIFHSYGYNEIRFPLIEKTELFSRGVGQSTDIVNKEMYTFEDKGGESMSLRPEGTAGCVRAALDNDLIRVDSPRLWYMGPMFRYERPQKGRSRQFHQASAEFFGIKDPFADAELLFLSKKIWEVLGISDQVELEINSLGDHQTRSSYKEALTNYFRDYQKDLDKDSLRQLDENPLRILDSKNPEIRTLLEDAPKITQFLDPESVDHHSILLELLNSNGLTYRENPQLVRGLDYYNKTVFEWKSSSLGAQDTICGGGRYDSLVEELGGKPCPAIGFSIGLERLVLISEKIDENINSSKVISFIALGEEAISKSVLIAEQLKNELVDVQIVLKF

SEQ ID NO: 188556 - protein, 263 aa, Unknown
  Bacterial polypetide isolated from the Sargasso Sea
INTLGSNEARAAYRDTLVEFLKERADQLDEDSLRRLETNPLRVLDSKNPDVQAAIADAPALIDHLDEESKVHFETLCARLTQAGIEFEINPRLVRGLDYYNRTVFEWVTDSLGAQGTVCAGGRYDGLVEQLGGKATPAVGFAMGIERLVLLLTTLTEEGQDLSFADVYVTAMGDEAQSYAIEVAEHLRNTLPNTRIMMHCGGGNFKKQLKRADKTGARLALLLGNDEMQSREVGVKPLRDGQEQVTVSFDTLSDKVAEMLSAK

SEQ ID NO: 188557 - protein, 406 aa, Unknown
  Bacterial polypetide isolated from the Sargasso Sea
MPDVFESDTNYLAELNEVLSKIFLSHNLNEVNTPILEQTELFVRSTGVTSDIVNKEIYSFNDRNEQSLSLRPEGTAGVVRSIIQKKLDNAEHKLWYQGPMFRYERPQKGRFRQFNQAGVELLGFEEGSSDLEIISIVCDIFIELELEDAVLRINHLGDKDTKEKFLSELLRYLKSYKGDLNENDKEKLNKNPLRLLDSKDVDLKEFLDKGPKIIDFLSPEQLNLLDKIQSIFGKYVEIELDSSLVRGLDYYTGLVFEAVSSNLGAQDSFLGGGRYDDLSKDLGGKEMPAIGFAIGLERLNLIKKHKNIKSNKVISFVTTSSKMNALAFKIAQLLRSHNYDIRLETNFTDASLKAKLRKASKLGAKFVFIMGEEEFESDTITVKSFDEDGYQVNMSFDEILDFYKDI

SEQ ID NO: 188558 - protein, 243 aa, Unknown
  Bacterial polypetide isolated from the Sargasso Sea
MKFRSIKGTYDVLPNVSNKWKIVESHIHQYLTRCGYNEIRTPIFENTDLFKRSVGEDSDVVSKEMYSWIDQGGTDLTLKPEYTASVVRSYIQNNLNSISPISKLYYIGDLFRRERPQKGRYRQFRQFGIEAIGSKFPEQDAEIIAIAWNILSELGIKDITLNLNSIGSSETRKKYRNVLLDFLKPNINELSESSAKRLKTNPLRILDTKNKSEIEILKQAPKITEYLSEEDKLHFDAVQQGLK

SEQ ID NO: 188559 - protein, 495 aa, Unknown
  Bacterial polypetide isolated from the Sargasso Sea
MTSDNKKKIKAERPRGFEDLSGEDLLLLEKITSTIEKTYKFYGFEKLETSIVELSNVIGSFLPDQDRPNEGVFSLEDDDSRWLSLRYDLTSGLARYVAENYDALPKPYRRYQSGWVFRNEKPGPGRFRQFMQVDADTVGSKNPLADAEMCMMFSDVFENIGIQRNDYLIRLNNRNLLDALLDQLGLNSINDSDQYLTVMRSIDKLDRLGFSGVTELLGKGRKDKSGDFTKGAELKTEQIDKIINFLKQGDKSQKTDRKSALEKLEKDFCDSDKFSEAVIELLAISDILDGAGYNEDRVAIDPSVVRGLGYYTGPVYEADLIFPKNNDLQNFGSVGGGGRYDSLVERLKGVKVPATGISIGVSRLMTALKILDQKVNNKSDIDVVVLLMNKDDQVYYFNLASKLRDEGLLADLYVGDGSMKAQLKYADKRNAKIALIIGDDEIENNTVTIKDLNKGAELSKDISKNEEWRSSKDTQVNVPQSEMIKMIKSILSKSS

SEQ ID NO: 188560 - protein, 417 aa, Unknown
  Bacterial polypetide isolated from the Sargasso Sea
MSKVTKPRGFNDLDPSEFDHKSNLLNEIKTIFNSYFFKEIETPIVEKKELFIRSVGEETDIVNKEMFTFQDRKGEDLVLRPEGTAGCLRFAIDSGLLDLGPIKLSYAGPMFRYERPQKGRSRQFFQVSAETYGVRGFEADLELLMMANEIFQRFGIGNVSLNINSLGDEESQKKYASDLKKYLSDFSEALDEDSLRRLETNPLRILDSKNEETQKVIKDAPKISSFLSQKSADNYELIKEGLNDLGISYKEDEKLVRGLDYYNDLVFEWTSPDLGSQNTFCGGGRYDRLSKQLGGRDCPAAGFSIGLDRLALITKANESTSSSSLQIILTDESYVSDGLKLSQKLRKDNKDLRVLFSGYQSSLKNQLKKADKNNIDFAVIIGPEEVRSKNYSLKKLKDDEDQLTLEYDQLVKELKNE

SEQ ID NO: 188561 - protein, 421 aa, Unknown
  Bacterial polypetide isolated from the Sargasso Sea
MNQIRNIKGTHDILPENSHKWQELESIVKNVCSRFGYQEIRTPIFEETGLFSRSVGEETDIVSKEMYTWEDRDGTSLTLRPELTASVVRSFIQHNLGGQSPIQRLFYMGPLFRRERPQKGRQRQFHQFGVEAFGSANPEQDAEIIAIAWHILSQCGLIENTVLNLNSIGSGECRNAYRNALKDYISPHLDQLSETSQKRFINNPLRILDTKSERELDLLKDAPKISNYYTEDDDTHLESLKNFLEAMNIPFTINHRLVRGLDYYTKTVFEFNSSQLGAQDAMLGGGRYDGLVEVLGGRPTPGIGFAAGMERFLIAMDDQDRGNNDPVVDIYFVCLDEKGLPLTLQLSNELRNNGFKVIFDPLRRSMKSQLRDANRSGARFALILGETEMNDNAIGFKDLKQGTQKTIAQSEVTNFFDNLTN

SEQ ID NO: 188562 - protein, 440 aa, Unknown
  Bacterial polypetide isolated from the Sargasso Sea
MTFFINLAKIGRVDTVAKQIQAIRGMNDILPTQSPLWQKVEAVLRASVAAYGYSEIRTPIVENTDLFKRSIGEVTDIVEKEMYTFEDRNGDSLTLRPEGTASTVRAGNEHGLLYNQEQRLWYMGPMFRHERPQKGRYRQFHQFGVEVYGIGSADIDAEVLMLSARLWEKLGISEHVTLELNTLGDPAERAAYREALIAFLEQHKDKLDEDSQRRMYSNPLRVLDSKDPQVQSILADAPALMDYLGEESSQHFAQLRELLDAVGIQYRVNPRLVRGLDYYNRTVFEWVTNSLGSQGTVLAGGRYDGLVAQLGGKDTPAVGFAMGLERIVLLLETLELTQDIPAAVDVYVAAMGDSCLVEAIKVAQELRSTLPTLRVMSHCGGGNFKKQIKRADKSGAQVALLIGEEELAEGVVTVKYLRNDNEQQRVARNALSAFLAELTK

SEQ ID NO: 188563 - protein, 292 aa, Unknown
  Bacterial polypetide isolated from the Sargasso Sea
QAGIEILGYPEGAPEFEMISLICELNRKLQIRKPLIKINHLGDSNTKKLFCKALVDYLTPMKSDLDEKDLLRLDSNPLRILDSKNPNTLEILKKAPSISDYLQDSSKELLKSIQELFSDKCEIQIDFNLVRGLDYYTGFVFESISEDLGAQDAYLGGGRYDNLSVQLGGKDLPAIGMAIGIERLALISYQENKNRTLISFIIISSTSEAKAYKISHELRSINKNIDIDVQLSQGSLKSKLRRANKNGAAYAFIVGDEEIESKTVIIKPLNKEDSDQSTMNLNEIEKFIKNLS

SEQ ID NO: 188564 - protein, 384 aa, Unknown
  Bacterial polypetide isolated from the Sargasso Sea
MTNLKNLRGMVDLLPAQSQGWQKVESIALEHFSRAGLQEIRTPIIEQTELFSRGIGENTDVVGKEMYSFDDRGGRSCTLRPEGTASVARSIVQHGLLNKGPQRLWYRGPMFRYERPQAGRQRQFHQIGVEFVGLASVMSDAEVISIGWNFLKDVGLNDLTLEINSLGSNEDRNIFKEELKGWLNQRFDLLDEDSQKRINVNPLRILDSKNNSTKELLSEAPSLNDFLSNESKTRFDYLQELLVNLKIPYEINYNLVRGLDYYSHTAFEITSDHLGSQATVCGGGRYDGLIGELGGPQAPSIGWAIGMERLIILAGDKILQSKSPDVYVIHKGKKAEQLALEITCQLRSSNLMIELDYSGSSFSKQYKRADKSRAKWALVIGEDE

SEQ ID NO: 188565 - protein, 422 aa, Unknown
  Bacterial polypetide isolated from the Sargasso Sea
MSKIQTLRGMNDIHPKQVKEWTFVEEVIKSVVESYGYEEIRFPVVEKTELYTRSNEAADIVTKEMYTFSDKSGESISLRPEGTAGCVRAAIDNDLLRTDKPRLWYSGPMFRYERPQKGRSRQFHQFSAEVFGLSSPEIDAELIMLSARLWKKLDIFEGLKLEINNLGDEQTRKSYSKALIDFLTKFSKELDEEAKRKLTENPLRILDSKSQAIQEILKDAPLIEDFTNQDSKNYQANLLEILDEMGIGYRVNPRLVRGLDYYNQTVFEWKTNLLGSQDTLLGGGRYDDLVEELGGKPCPAIGFSIGLERLILLLNQEDKIKLETNLDIYFICFSESTAQEAIMCAEKLKDNIPSLSIKTNLGLESAGSQFKKADKSGAKIALVIGEEELKDKKITFKDLRSNSDQETLTFEELVEKINKIKN

SEQ ID NO: 188566 - protein, 421 aa, Unknown
  Bacterial polypetide isolated from the Sargasso Sea
MDKINSLTGMPDLIGQKSNESNSSNKIFETEIALIKIFESYSLNEIRTPALENESLFNRSVGDSSDIVNKELYTFLDKNKKKISLRPEGTAGVARSIIEKKLDNETHRFWYLGPMWRYERPQKGRYRQFYQAGIELLGYSEGLAELEMISMILSINDALGIKNSKIKINHLGNKDAKDQFCEALKNYLEPFNSKLEKLDLDRLNKNPLRVLDSKSEQTKDILKDAPKMNEFVSKESLDLLNLIKNSFSEHNIEIDFSLVRGLDYYTGFIFEAISDDLGAQDSYLGGGRYDNLFSDLGGKKLPAIGMAIGIERLAEISNYSVENKTLISFIVLSDKIEQNAYKIAHEFRYLNNNIIIEVQLSDGSLKSKLRKANKDKADFAIIIGDEELKNKTLVLKSLKENDSDQKILSIEDAKKFISSLN

SEQ ID NO: 188567 - protein, 368 aa, Unknown
  Bacterial polypetide isolated from the Sargasso Sea
MNQIRNIKGTHDILPEDSRKWQELECIINEVCSQFGYHEIRTPIFEETGLFSRSVGEETDIVSKEMYSWEDKDGTSLTLRPELTAPVARAYIQHNLASKSPLQRLFYMGPLFRRERPQKGRQRQFHQFGVEAFGSSNPEQDAEVIAIAWQILFRCDLIKDISLNLNSIGSKECRNEYRNALKDFLSPLLDQLSETSQKRFLNNPLRILDTKSEKELELLKDAPKISNYFSEDDHTHFESLKSFLESMNIPFSINDKLVRGLDYYTRTVFEFNSTKLGAQDAILGGGRYDGLVETLGGKSTPGIGFAAGMERFLIAMDDEKVTNSSIDIYFVCPDEYGLSKTLQLSNQLRSSGLKVISDPLRRSMKSQL

SEQ ID NO: 188568 - protein, 315 aa, Unknown
  Bacterial polypetide isolated from the Sargasso Sea
MVDGVRGIRVLDGEEANKYLEIINIFHNVAQKYDCTFIKIPTIEKDELFTRTVGENTDIVTKQMFSFPDKKGRNLVLRPEGTAGVVRHHIDKKYNKIKKYYYSDQMFRYERPQKGRYREFHQVGAEIIGYENDSIAEIFSIIQLSNDFLENCIPTNTKYTFEINSIGTNEDRKIYNQKLKEYFKKNIDNLSDDSIKRLDKNPLRILDSKDKSDIAVSRNAPKLSEFRSEESNKKFNELIQMLKNSKIPYLENPFLVRGLDYYNDFTFEIVPENSKGSQDALGGGGQYDNLSKLLGGKDINGVGVAFGVDRIMELS

SEQ ID NO: 188569 - protein, 294 aa, Unknown
  Bacterial polypetide isolated from the Sargasso Sea
RSDVEVIALAWDLLAQLGVGGLELEINSLGTPEDRQAYRTALVAWLEQRLDQLDDDSRARLSTNPLRILDSKNKDTQALLEQAPTLADALSSESRQRFDAVQQGLTALGIPFWLNPRLVRGLDYYGHTAFEITSDQLGAQATVCGGGRYNGLIAQLGGAPPTPAIGWALGMERLLLVLEAAATADPDGAAARLVATSAPDAYVVNRGEKAETMALTLTRGLRAAGLAVELDGSGSAFGKQFKRADRCGARWALVLGDDEAARAEVRLKPLQHEGEDRSWAVADIAAIVETLRTP

SEQ ID NO: 188570 - protein, 233 aa, Unknown
  Bacterial polypetide isolated from the Sargasso Sea
YFNTHKNKLSEESIKKIETNPLRILDSKNEEDVEISLTSPKIFEYLTDEAKKHYEDLKRSLNILEIDFEENANLVRGLDYYCNTVFEYKSDNLGSQDTLLGGGRYDGLIKVLGGPDIPGIGWAAGIERIALLMESEKKISSTIHIAVTNEKFTDFFLYLQKYLSENRISYYWNYKYNLKKSFTKANASSASHIIIIGENEFNGDFFTIKNLTTGEQKELKLNQILNHLNDKSR

SEQ ID NO: 188571 - protein, 401 aa, Unknown
  Bacterial polypetide isolated from the Sargasso Sea
FCRRTIKKVFLSYGYEEIIFPIIEKSELFTRSNESADIVTKEMYSFKDKSGDSISLRPEGTAGCVRAAIDNDLIRVDSPRLWYQGPMFRYERPQKGRSRQFHQSSAEVFGIRSAEIDAELIILSARIWKELGVEENINLEINNLGDEKTRKSYAKSLQDYFKAYKNDFDDDSKRKLDENPLRILDSKSDFIQGLLNDAPKISEFISQDSQNEFNELTDLLKVADVKFSINQKLVRGLDYYNQTVYEWKTGLLGAQDTVCGGGRYDNLVEELGGKPCPATGFSIGMERLILLIKASSELNLDNSKLDLFFVCLSKEGIQKAIMYTESLRERVTNLNVRINMGLEGVGSQFKKADKSGAKFALVLGDDELKNNTISIKDLRTKSDQETFSYEDLEKRIEKTYK

SEQ ID NO: 188572 - protein, 374 aa, Unknown
  Bacterial polypetide isolated from the Sargasso Sea
VERTVGEDTDIVEKEMYSFDDKGGDNISLRPENTAGVCRAFIENGLHNTTLPSRLFYYGPMFRYERPQSGRYRQFHQFGIECIGDDSPDVDFEVIKIAWDILSNLNFNNVLLNVNSLGDSKDRFIYTEELKKYFSKYLNDLPKVDKLRFERSPLRILDSKEDITIKISEEAPKTLDFISSESLGHHENLILNLEELRSHDKKFNYKINNRLVRGLDYYNKTVFEYTSDSLGPQGVLLGGGRYDPLIKILGGQDTPAVGFAMGIERVVNELKKNIDVQKNYVDAVIIVTDENLRIESVQIANNLRNSNIRTIIAPKKSIKAQMRFANNINSKSAVFIGKNELENQKLSVKLLQTKSEQFEIDIDDMNQLKKILNS

SEQ ID NO: 188573 - protein, 381 aa, Unknown
  Bacterial polypetide isolated from the Sargasso Sea
FDVNEIRTPLLEPTELFSRSVGNSSDIVNKELYSFLDRNKDSISLRPEGSASIIRAIIQKKQEQEKHKLWYQGPMFRYERPQKGRFRQFHQIGVEYLGFDEGAPDHELISMILQINQSLGISEYTLKINHLGDADAKEGFCKSLVRFLKPNANELHEKDKARLASNPLRILDSKESSTIKLLKNAPKYQDFISEESKVFLEGLVSAFKDQCDIQIDQSLVRGLDYYTGIVFETVSKELGSQDAFLGGGRYDNLSNQLGGKDMHSIGFAIGVERIVQLINIDDLSQKIKVGFIVSEEQINKKTYKIANDLRLANNSISLNTFLSNGSIKSQLRKANKSGCSFAVIIGEQESKNNQVIWKDLREKGGQEILSVQELINQYINL

SEQ ID NO: 188574 - protein, 247 aa, Unknown
  Bacterial polypetide isolated from the Sargasso Sea
MKTTISELKKHDGKEVSLNGWVYNIRSIGKIWFLILRDGTGLVQCVVVDKETDKETFELENTLTQESSVTINGVVRSEPRSVGGYELGVTKIKIHQIAEEYPISNKEHGADFLMSNRHLWLRSKNQNAILKIRHQVIKATRDFFDNNGFVLMDSPILTANSVEGTSTLFELDYFDRSAYLTQSGQLYGEASAMAFGKIYVFGPTFRAEKSKTRRHLTEFWMVEPEMAYCDLSENMEWAEKHVSYVVQ

SEQ ID NO: 188575 - protein, 255 aa, Unknown
  Bacterial polypetide isolated from the Sargasso Sea
LEFLRTKIHLRTRTNTIAAIARIRSALSYATHTFFNKNGFLYVHTPLITQSDCEGAGEMFQVTTLLGKADDAAAAEAPPPSAADVDAKRSAVTEAGEAVRAAKEAAKAEGGDKAAVKPAVDAMLKLKKELEEMERAAKKIGGLARTDDGKVDYAEDFFGEPTFLTVSGQLNVETYACAMSSVYTFGPTFRAEDSRTTRHLAEFWMIEPELAFADLNDDMRCAEDYVRFCLKYVLANCRGDLEFLSKMYDKGAIAR

SEQ ID NO: 188576 - protein, 228 aa, Unknown
  Bacterial polypetide isolated from the Sargasso Sea
MSIASVASVFKGEHAVGSTVTVRGWVRTRRDSKAGISFLAVYDGSCFNPIQGVVPNSLENYDNEVLKLTAGCSVIVTGEIVESPGAGQAYELQVTHVEVTGWVEDPDTYPMAAKRHSIEHLRELAHLRPRTNIIGAVARVRNCLSQAIHRFYHENGFVWVSTPLITASDCEGAGEMFRVSTLDMENLPRTSDGKVDYDKDFFGKEAFLTVSGQLNGENYACALSKIYT

SEQ ID NO: 188577 - protein, 274 aa, Unknown
  Bacterial polypetide isolated from the Sargasso Sea
NPEEYPIQPKKHSLEFLRENAHLRVRTNAFGAIMRVRSVLSFAVHNYFQERGFVYVNTPIITGSDAEGAGEMFKVTSLPFDKTPRTEEGTVNYKEDFFGKETNLTVSGQLEAETYAMALGQVYTFGPTFRAENSNTSRHLAEFWMIEPEVAFNDLDANMDLAEDFIQYVIKYTLEKCADDLAFLEQRLLEEEKSKPQAERSEMSLLQKLNFVLENNFKRVSYTEAIDILRNSSPNKKGKFNYIIKEWGADLQSEHERYLVEKHFKCPVILFDYP

SEQ ID NO: 188578 - protein, 235 aa, Unknown
  Bacterial polypetide isolated from the Sargasso Sea
IEPEMAFYNLSDNMDLAEKFVKSILNFILKNCEDDLNFLSERLFNEEKTKPQIERSELNLIEKIKFVVKNNFIRVSYSDAFDILKNSNKNKKKKFEFIIDEWGIDFQSEHERYLVEKHFKSPVIIHDYPSKIKAFYMRLNDDKKTVGAMDVLFPGIGEIIGGSQREERLEVLRTRIKESGIDEDEIWWYLDLRKYGSVPHSGFGLGFERIVQFCTGMSNIRDVIPYPRSPKNASF

SEQ ID NO: 188579 - protein, 37 aa, Unknown
  Bacterial polypetide isolated from the Sargasso Sea
AHAGFGVGFERLMMLFTGISNIRDVIPFPRTPKSLEF

SEQ ID NO: 188580 - protein, 222 aa, Unknown
  Bacterial polypetide isolated from the Sargasso Sea
MRVRSSLAYAIHSFFNEQGFYYVNTPIITSSDAEGAGEMFKVSTLDFENIERNKKKEIDYSKDFFGKKTSLTVSGQLEAETYALGLGNVYTFGPTFRAENSNTSRHLSEFWMIEPEMAFYNLNDNMDLAEKFVKSILNFILKKCEDDLNFLSERLLNEEKTKPQIERSELNLIEKIKFVVKNDFIRVSYSDAFDILKNSNKNKKKKFEFIIDKWGVDFQSEH

SEQ ID NO: 188581 - protein, 268 aa, Unknown
  Bacterial polypetide isolated from the Sargasso Sea
NSVEGTTTLFGVDYFERSAYLTQSGQLYQEAGATAFGKTYCFGPCFRAEKSKTRRHLTEFWMVEPEMAFVELDENMTWAENLVGFIIQRVLKNCMMELKTLERDISILEKIVPPFPRITYDEAIKILKENGNDFKYGNDFGAPDETLLSEQFDKPIMIHRWPAEIKPFYMKRDENNNELALGVDMIAPEGYGEIVGGGEREDDLDILTKSIRSHDLPLEPFQWFLDLRKYGSVPHSGFGLGLERVVAWICGTKHIRETIPFPRTMARL

SEQ ID NO: 188582 - protein, 227 aa, Unknown
  Bacterial polypetide isolated from the Sargasso Sea
EGELIQSMGKGQSVEVLVKSILVHGEADPDTYPIQAKKHSFEFLREKAHLRIRTNTFSSVMRIRSILSFAIHQFFNQKGFYYIHTPIITGSDAEGAGEMFRVTVLDPKNPKLNDQGNVDFKNDFFGKETNLTVSGQLEAETYSQGLGNVYTFGPTFRAEKSNTTRHLAEFWMIEPEMAFFDLNQNMDLAEEFIKYTLNHILEKCKKDLTFLDQRLINEEKSKPQNER

SEQ ID NO: 188583 - protein, 269 aa, Unknown
  Bacterial polypetide isolated from the Sargasso Sea
IQGNLIESIGKGQTFEIEIIDIEILGESDPDKYPIQPKKHSFEFLREQAHLRIRTSTFSAVMRIRSKLAFGVHQFFNEKGFNYVHTPIITSSDAEGAGEMFQVTTLNNNQKEKKEIDYSEDFFGKKTSLTVSGQLEAETYALGLGDVYTFGPTFRAENSNTSRHASEFWMIEPEMAFYDLNDNMDLAESFLKYVLKYIMDTCKEDLKFLDERLLNEQSQKPKNERDELNLIDKINFTINNEFTRISYSNAFEILKNSNYNKKKKFNYLI

SEQ ID NO: 188584 - protein, 259 aa, Unknown
  Bacterial polypetide isolated from the Sargasso Sea
NRRSIGKVWFLILRDGTGFLQCVVVDGESDSESFKLEQNLNQEDSVSLNGIVKKEPRAVGGYELGVNSISVVNHTSNKYPISNKEHGTDFLMSNRHLWIRSKRQNSILRIRHQIIKSIRDFFDNNDFILVDSPVFTGNAVEGTTTLFELEYFEKKAYLTQSGQLYQEAGAMAFGKSYCFGPVFRAEKSKTRRHLTEFWMVEPEIAYCDLDQNMDWIESLVIYITDEVINKCTLEINVLDRDLEKLKCVKKPFPRINMIR

SEQ ID NO: 188585 - protein, 147 aa, Unknown
  Bacterial polypetide isolated from the Sargasso Sea
VMLRGAGEMFKVSTLDFENIERNKKKEIDYSKDFFGKKTSLTVSGQLEAETYALGLGNVYTFGPTFRAENSNTSRHLSEFWMIEPEMAFYNLSDNMDLAEKFVKSILNFILKNCEDDLNFLSERLFNEEKTKPQIERSELNLIEKIK

SEQ ID NO: 188586 - protein, 157 aa, Unknown
  Bacterial polypetide isolated from the Sargasso Sea
MDKNKNDINLITTGSSIEVFGKLVKSLGKGQKFEILVDKLSVLGPSNSENYPIQPKKHSFEFLRENAHLRVRTKTISSVIRIRSEISYAIHKFFNDNGFFYIHTPIITGSDAEGAGEMFSVSTLDKSHIPQSPDGSIDFSKDFFGKETHLTVSGQLE

SEQ ID NO: 188587 - protein, 207 aa, Unknown
  Bacterial polypetide isolated from the Sargasso Sea
MTHAPVVDVLKGKYAVGESVTVKGWVRTRRDSKAGLSFIALHDGSCFDPVQVIALNSLSNYADIQRLTAGCSLSVTGTVKESQGQGQAVEIDATDVEVLGWVENPDTYPMAAKRHSIEYLREYAHLRPRTNVIGAVTRVRNCLSQAIHRFFHEKGYFWISTPILTASDTEGAGEMFRVSTLDMMNLPRDDKGNVDYSEDFFGKETYL

SEQ ID NO: 188588 - protein, 203 aa, Unknown
  Bacterial polypetide isolated from the Sargasso Sea
AYCDLEENMEWAEKHVSYVVQWCLEHCQEELKVLERDISSLEKVIPPFPRITYDEAAKILKDKGADFQYGSDFGGTDETIISEEFDRPVMIHRWPAEIKAFYMKRDPENEDLALGVDMIAPEGFGEIIGGGQREDDHDKLLKRINEHELPVEPFQWYLDLRKYGSVPHSGFGLGIERTVGWICGTKHVRETIPYPRTMHRIEP

SEQ ID NO: 188589 - protein, 221 aa, Unknown
  Bacterial polypetide isolated from the Sargasso Sea
MENYEEISRLRTGAALEVWGTLVESQGRGQDFEVQSEQILIRGTAPGEEYPLQKKGHTLEFLRDIAHLRPRTNTLGAVFRIRNTLSQAIHRFFQDRGFLYVHTPIITANDAEGAGEMFHVTSLDLEQLPKTKAGKVDYDQDFFGTDVSLTVSGQLGAEVFALAFTNVYTFGPTFRAENSNTARHLAEFWMIEPEMAFMDLQGMLVLTEEFLRELLKECLDR

SEQ ID NO: 188590 - protein, 293 aa, Unknown
  Bacterial polypetide isolated from the Sargasso Sea
RVCKAEPRSVGGYELGVKKITVHQIADEYPISHKEHGADFLMSNRHLWLRSKNQNAILKVRHQVIKATRDFFDDNGFTLMDSPILTANSVEGTSTLFELDYFDRSAYLTQSGQLYGEASAMAFGKIYVFGPTFRAEKSKTRRHLTEFWMVEPEMAYCDLDENMDWAEKHVSYVIQWCLEHCKEELKILERDTGKLEKSIPPFPRITYDEAVDILKKRGVDFKYGSDFGAADETAISEEFDRPVMIHRWPSEIKAFYMKRDTENDKLALGVDMIAPEGFGEIVGGGQREDDHDT

SEQ ID NO: 188591 - protein, 161 aa, Unknown
  Bacterial polypetide isolated from the Sargasso Sea
ISYTEAFDILKNCKPNRKGKFKYPVNDWGIDFQSEHERFLVEKHFKCPVVVYDYPAKIKAFYMRLNDDKKTVRAMDILFPGIGEIVGGSQREERLDVLKDRIKSMDIDEKELWWYLDLRKFGSVKHSGFGLGLERLILFITGMGNIRDVIPFPRTPKNADF

SEQ ID NO: 188592 - protein, 275 aa, Unknown
  Bacterial polypetide isolated from the Sargasso Sea
METYRIANLGQSLLNRKIHLRGWVRTRRGSKGFSFIQLNDGSNLNGLQIIADEKLENYEEISKLSTGAALEVWGTLVESQGRGQDFEVQSEQILIRGTAPGEEYPLQKKGHTLEFLRDIAHLRPRTNTLGAVFRIRNTLSQAIHRFFQDRGFLYVHTPIITANDAEGAGEMFHVTSLDLEQLPKNKAGKVDYDQDFFGTDVSLTVSGQLGAEVFALAFTNVYTFGPTFRAENSNTARHLAEFWMIEPEMAFIDLRGMLVLTEEFLRELLKECLDR

SEQ ID NO: 188593 - protein, 291 aa, Unknown
  Bacterial polypetide isolated from the Sargasso Sea
FNLEQELNQEDSVIVKGKVKKEPRAIGGYELGVSEVCVINHTTEEYPISKKDHGADFLMSNRHLWLRSKRQNSIMRVRHQIVKAIRDYFDDNGFTLIDSPIFTGNSVEGTTTLFGVDYFERSAYLTQSGQLYQEAGATAFGKTYCFGPCFRAEKSKTRRHLTEFWMVEPEMAFVELDENMTWAENLVGFIIQRVLDNCKIELETLERNIVALENIVPPFPRITYDQAVKILKENGSDFEYGNDFGAPDETVLSSQFDKPIMIHRWPANIKPFYMKRDKDNNELALGVDMIA

SEQ ID NO: 188594 - protein, 239 aa, Unknown
  Bacterial polypetide isolated from the Sargasso Sea
EFLMIEPEMAFYDLNDNMDLAESFVKYILKYILTECEEDLRFLEERLLKEESQKPQNERSNLSLIEKIKFTVNNEFTRVSYTEAFEILKSSNYNQKKKFKYLLDNWGSDLQSEHERFLVEKHFKSPVIIYDYPSKIKAFYMRLNEDGKTVRAMDVLFPGIGEIIGGSQREERLDILKKRMSDMGIDDKELWWYIDLRKYGTVPHSGFGLGFERMVMFCTGMSNIRDVIPYPRTPKNASF

SEQ ID NO: 188595 - protein, 308 aa, Unknown
  Bacterial polypetide isolated from the Sargasso Sea
HSFEYLRSVAHLRPRTNTFGAIARIRTTLAKAIHDYFFDNGFHWINTPLITASDCEGAGELFRVSTLDLTNLPVKDGAIDFSQDFFAAESFLTVSGQLNVEAYCLAMSKVYTFGPTFRAENSNTSRHLAEFWMVEPEIAFANLDDNADLAEDLLTHAIKEVLEKREDDVTFFNQHIDDTVINRMRSIIDNKFERMEYSEAIKILRQSAVSFEFPVEWGLDLQSEHERYLTDKHIGRPVIVLNYPAEIKAFYMRLNDDEKTVAAMDVLAPGIGEIIGGSQREERLDVMDNRMNDEAMKKELWWYRDLRR

SEQ ID NO: 188596 - protein, 249 aa, Unknown
  Bacterial polypetide isolated from the Sargasso Sea
VRKEPRSIGGFELGIKEIKVVKHVTDEFPISHKEHGADFLMSNRHLWLRSKRQNAIMRVRHQVTKAIRDFFDNNGFTLIDSPIFTGNAVEGTTTLFEVDYFERSAYLTQSGQLYQEAGATAFGKTYCFGPTFRAEKSKTRRHLTEFWMVEPEMAYVDIDENMTWAENLVGYIVERVLDNCSTELSLLERDTDKLKAVIPPFPRITYDEAVKLLNDNGSDFQYGSDFGAPDETLLSEKFDKPYYDSSLAF

SEQ ID NO: 188597 - protein, 253 aa, Unknown
  Bacterial polypetide isolated from the Sargasso Sea
MKKNVRISDLKNHIGEKVTLNGWVYNKRSSGKIWFIIIRDGTGYTQGVIIKENVSDEVFNLEQAITIESSISISGIVKKDKRSVGGYELDITNIKVIQISEDYPISKKEHGTAFLMDNRHLWIRSKRQNAILKIRSQVTKSIRDYFDSNGFFNLDTPIFTSNVCEGTTTLFKTDYFGQKAFLSQSGQLYNEANIMSFGKVYSFGPTFRAEKSKTRRHLTEFWMVEPEIAFCNLEENMNWGEGLICHIVKWVLE

SEQ ID NO: 188598 - protein, 139 aa, Unknown
  Bacterial polypetide isolated from the Sargasso Sea
DYPVEWGVDLQSEHERYLAEVHVGAPVILQNYPKDIKAFYMRMNEDGKTVAAMDILAPGIGEIIGGSQREERLEQLDARMDQMGLNKEDYSWYRDLRRYGTVPHAGFGLGFERLVSYVTGVGNVRDVIAFPRTPGNADF

SEQ ID NO: 188599 - protein, 156 aa, Unknown
  Bacterial polypetide isolated from the Sargasso Sea
FPRITYDEAVDILKKRGIDFKYGSDLGGGDETLISEEFDKPVMIHRWPSDIKAFYMKRDKENDKLALGVDMIAPEGFGEIVGGGQREDDHDTLLSRIKEHKLPIEPFQWYLDLRKYGSVPHSGYGLGIERTVGWICGTKHVRETIPYPRTIYRIEP

SEQ ID NO: 188600 - protein, 300 aa, Unknown
  Bacterial polypetide isolated from the Sargasso Sea
TPSSRTNTLGAVFRIRNTLSQAIHRFFQDRGFLYVHTPIITANDAEGAGEMFHVTSLDLEQLPKTKAGKVDYDQDFFGTDVSLTVSGQLGAEVFALAFTNVYTFGPTFRAENSNTARHLAEFWMIEPEMAFMDLQGMLVLTEEFLRKLLKECLDQHEDDLAFLQKMYDKELISGLKHICDTPFETLTYTEAVKILEDSGKSFEFPVEWGCDLQSEHERYLSEVHVGGPLNLIDYPKDIKAFYMKQNPDEKTVAAMDVLFPRLGEIVGGSQREDDGESLLHLMREKGLPEETYQWYLELRR

SEQ ID NO: 188601 - protein, 310 aa, Unknown
  Bacterial polypetide isolated from the Sargasso Sea
EMFSVVSLDKTKIPLDDDGSIDFSKDFFGKETHLTVSGQLEAEALAMGLSKVYTFGPTFRAENSNTSRHLAEFWMIEPEMAFCDLAENINLAEKFIKYIIKHTYDKCKNDIEFLDERLTKEEMNLPKVKRSELSLKEKIEFVINNDFVKLSYSEAFDILKNCKLNKKNKFTYKIENWGCDLQSEHERFLVEKHFKCPVVVYDYPAKIKAFYMRLNEDGKTVRAMDILFPGIGEIVGGSQREERLDVLEKRIEELDIDDEELWWYLDLRKYGSVKHSGFGLGLERLILFITGMNNIRDVIPFPRTPKNADF

SEQ ID NO: 188602 - protein, 247 aa, Unknown
  Bacterial polypetide isolated from the Sargasso Sea
SNTSRHLSEFWMIEPEMAFYNLNDNMDLAESFVKSILNFILKNCKDDLNFLSERLLNEEKTKPQNERSELNLIEKIQFVIDNDFVRISYSDAFEILKNSNKNKKKKFEFILENWGIDFQSEHERYLVEQHFKSPVIIYDYPSKIKAFYMRLNDDKKTVRAMDVLFPGIGEIIGGSQREERLDVLRKRIKECAIDEDEIWWYLDLRRYGSVPHSGFGLGFERIVQFCTGMSNIRDVIPYPRSPKNASF

SEQ ID NO: 188603 - protein, 221 aa, Unknown
  Bacterial polypetide isolated from the Sargasso Sea
MTVSQSETYRIGDLGQSLLNRKIHLRGWVRTRRGSKGFSFIQLNDGSNLSGLQIIADEKLENYEEISKLSAGAALEVWGTLVESQGRGQDFELQSEQILIRGTAPGEEYPLQKKGHTLEFLRDIAHLRPRTNTLGAVFRIRNTLSQAIHRFFQDRGFLYVHTPIITANDAEGAGEMFHVTSLDLEQLPKNKAGKVDYDQDFFGTNVSLTVSGQLGAEVFAL

SEQ ID NO: 188604 - protein, 265 aa, Unknown
  Bacterial polypetide isolated from the Sargasso Sea
ALGLGNVYTFGPSFRAENSNTSRHASEFWMIEPEMAFYDLNDNMNLAESFLKYILEFMISSCKEDLKFLNERLSKEQIQKPKNERDEMTLLEKIKFTIDNKFVRITYSDAFEILKNSNYNKKKKFNFLIDEWGSDFQSEHERFLVEKHFKSPVIIYDYPSKIKAFYMRLNDDKKTVRAMDVLFPGIGEIIGGSQREERLDILMKRINEMGIDEKELWWYIDLRKYGTVPHSGFGLGFERLVMFCTGMQNIRDVIPYPRTPKNASF

SEQ ID NO: 188605 - protein, 101 aa, Unknown
  Bacterial polypetide isolated from the Sargasso Sea
MKRDPENDKLALGVDMIAPEGFGEIIGGGQREDDHDTLLKRIKEHELPVEPFQWYLDLRKYGSVPHSGFGLGLERTVGWICGTKHIRETIPYPRTMYRIEP

SEQ ID NO: 188606 - protein, 126 aa, Unknown
  Bacterial polypetide isolated from the Sargasso Sea
DETVLMMQYDVPLIVTHWPAEIKAFYMKRDETNTLALGMDVLAPEGYGEIIGGSQREDDLNLMHERIEEEGLDKEVFEWYNDLRKFGTVPHSGYGLGLERTVAWICGLSHVRETIPFPRMMGRLKP

SEQ ID NO: 188607 - protein, 317 aa, Unknown
  Bacterial polypetide isolated from the Sargasso Sea
WFLILRDGTGLLQCVVVDGECDLESFQLEQNLNQEDSVSVTGVVKKEPRAVGGFELGVKNINVINHTSNEYPISNKEHGTDFLMSNRHLWIRSKRQNSILRVRHQIIKSIRDFFDNNDFILVDSPIFTGNAVEGTTTLFELEYFEKKAYLTQSGQLYQEAGAMAFGKSYCFGPVFRAEKSKTRRHLTEFWMVEPEMSYCDLNQNMDWMESLVTYIIDEVLKHCQSELNILERNIDKLEAVKSPFPRITYDEAVDILKQNNIDFTYGKDFGASDETTISNQYDSPVMIHSWPADTKAFYMKRDEIDNNLALGVDMIAP

SEQ ID NO: 188608 - protein, 172 aa, Unknown
  Bacterial polypetide isolated from the Sargasso Sea
MSIASVASVFKGEHAVGSTVTVRGWVRTRRDSKAGISFLAVYDGSCFNPIQGVVPNSLENYDNEVLKLTAGCSVIVTGEIVESPGAGQAYELQVTHVEVTGWVEDPDTYPMAAKRHSIEHLRELAHLRPRTNIIGAVARVRNCLSQAIHRFYHENGFVWVSTPLITASDCEG

SEQ ID NO: 188609 - protein, 270 aa, Unknown
  Bacterial polypetide isolated from the Sargasso Sea
EHGADFLMSNRHLWLRSKNQNAILKIRHQVIKATRDFFDNNGFVLMDSPILTANSVEGTSTLFELDYFDRSAYLTQSGQLYGEASAMAFGKIYVFGPTFRAEKSKTRRHLTEFWMVEPEMAYCDLSENMEWAEKHVSYVVQWCLENCQEELKILERDTSILEKTVPPFPRITYDDAVDILKKQGVDFKYGSDFGGTDETVISEEFDRPVMIHRWPSDIKAFYMKRDPENDKLALGIDMIAPEGFGEIVGGGQREDDHDTLLSRIKAHKLP

SEQ ID NO: 188610 - protein, 152 aa, Unknown
  Bacterial polypetide isolated from the Sargasso Sea
LKNCKPNKKGKFKYPVNDWGIDFQSEHERFLVEKHFKCPVVVYDYPAKIKAFYMRLNDDKKTVRAMDILFPGIGEIVGGSQREERLDVLKDRIKSMDIDEKELWWYLDLRKFGSVKHSGFGLGLERLILFITGMGNIRDVIPFPRTPKNADF

SEQ ID NO: 188611 - protein, 177 aa, Unknown
  Bacterial polypetide isolated from the Sargasso Sea
QHVDKDAIGRLERFVASDFAQIDYTDAIEVLKNCGKSFEFPVSWGIDLSSEHERYLAEEHFKSPVVVKNYPKDIKAFYMRLNDDGKTVAAMDVLAPGIGEIIGGSQREERLDVLDARLAEMGLNKEDYWWYRDLRRYGTVPHSGFGLGFERLVVYVTGMGNVRDVIPFPRTPRTAEF

SEQ ID NO: 188612 - protein, 301 aa, Unknown
  Bacterial polypetide isolated from the Sargasso Sea
EQAHLRIRTSTFSSVMRIRSKLAFSIHDYFNKNGFNYIHTPIITSSDAEGAGEMFKVTTLGKDDLEKKDIDYSDDFFGKKTSLTVSGQLEAETYALGLGNVYTFGPTFRAENSNTSRHASEFWMIEPEMAFYDLNDNMDLAESFVKYILKYILKNCEEDLKFLEERLLKEESQKPKNERSDLRLIDKIKFTVNNEFTRVSYTEAFEILKKSNYNKKKKFKFLLDNWGSDLQSEHERFLVEKHFKSPVIIYDYPSKIKAFYMRLNDDDKTVRAMDVLFPGIGEIIGGSQREERLDVLKKKNV

SEQ ID NO: 188613 - protein, 218 aa, Unknown
  Bacterial polypetide isolated from the Sargasso Sea
EKFVKSILNFILKNCQDDLNFLSERLLNEEKTKPQIERSELNLIEKIKFVVKNNFIRVSYSDAFDILKNSNKNKKKKFEFIIDEWGVDFQSEHERYLVEKHFKSPVIIHDYPSKIKAFYMRLNEDKKTVGAMDVLFPGIGEIIGGSQREERLEVLKKRIKESGIDEDEIWWYLDLRKYGSVPHSGFGLGFERIVQFCTGMSNIRDVIPYPRSPKNASF

SEQ ID NO: 188614 - protein, 231 aa, Unknown
  Bacterial polypetide isolated from the Sargasso Sea
MAFYDIDDNMDLAEEMLKFIIKYVLDNCNSDLMFLENLELDSEKNLPQIKRNENPLIYRLKEVIKNKFTRVKYDEAFQILRNSKPNKRGKFNFKIDEWGIDFQSEHERYLVEKHFKNPVIVSDYPKKIKAFYMRSNDDNKTVAAMDVLFPAVGEIIGGSQREERLDMLESRMEEMNISKKELSWYLDTRRFGTVKHSGFGLGLERLIQFITGMKNIRDVIPFPRTPGNCNY

SEQ ID NO: 188615 - protein, 302 aa, Unknown
  Bacterial polypetide isolated from the Sargasso Sea
EEISKLSTGAALEVWGTLVESQGRGQDFELQSEQILIRGTAPGEEYPLQKKGHTLEFLRDIAHLRPRTNTLGAVFRIRNTLSQAIHRFFQDRGFLYVHTPIITANDAEGAGEMFHVTSLDLEQLPKNKAGKVDYDQDFFGTDVSLTVSGQLGAEVFALAFTNVYTFGPTFRAENSNTARHLAEFWMIEPEMAFMDLQGMLVLTEEFLRELLKECLDRHEEDLAFLQKMYDQELISGLKHICDTPFETLTYTEAVKILVESGKSFEFPVEWGCDLQSEHERYLSEVHVGGPLNLIDYPKDIKA

SEQ ID NO: 188616 - protein, 285 aa, Unknown
  Bacterial polypetide isolated from the Sargasso Sea
DNNDFILVDSPIFTGNAVEGTTTLFELEYFEKKAYLTQSGQLYQEAGAMAFGKSYCFGPVFRAEKSKTRRHLTEFWMVEPEMSYCDLNENMDWMESLVTYIIGEVLKHCKSELNVLERNIDKLKAVKSPFPRITYDEAVNILKQNSIDFTYGKDFGASDETVISNQYDSPVMIHSWPADTKAFYMKRDEINNELALGVDMIAPEGYGEIVGGGQREDNIDVLIETIRHHDLPLKPFEWYLDLRKYGSVPHSGFGLGLERFVAWVCGTKHIRETIPFPRTMARLEP

SEQ ID NO: 188617 - protein, 164 aa, Unknown
  Bacterial polypetide isolated from the Sargasso Sea
LARKSIPPFPRITYDEAVEILKKRGIDFKYGSDFGGGDETIISEEFDRPVMIHRWPSDIKAFYMKRDKENHKLALGVDMIAPEGFGEIVGGGQREDDHDTLLSRIKEHKLPIEPFQWYLDLRKYGSVPHSGYGLGIERTVGWICGTKHVRETIPYPRTIYRIEP

SEQ ID NO: 188618 - protein, 271 aa, Unknown
  Bacterial polypetide isolated from the Sargasso Sea
MKTLEIRQVLTDRAWQADHLNEHIRVTGWVRSSRHSKAGISFIEVNDGSSLSSIQVVVPKELVNYSEIEKITTGVSITVSGILVESMGKGQDIEIQAEKVKILGPVEEPENYPIAKKRHTFEYLRGLPHLRIRTNTFGAIARIRSSVANKIHNYFFENGFHWVNTPIITSSDCEGAGELFRVSTLDYTEKKAAALDSEYAEDFFGRETFLTVSGQLNAEAYCLAMSKVYTFGPTFRAENSNTSRHLAEFWMVEPEIAFADLEDNATLAEAL

SEQ ID NO: 188619 - protein, 239 aa, Unknown
  Bacterial polypetide isolated from the Sargasso Sea
AEFWMIEPEIAFADIHDDMDLTENCLKYLCDYVLKNCSEDLQFLNDREIQEEKQKPQNQRNEMSLIDRLKFVTENPFKRITYSEAIKILLNSKPHKKKKFKFPVEWGIDLQSEHERYLVEKEFKSPVILIDYPAEIKAFYMRQNDDNKTVAAMDVLFPGIGEIVGGSQREERIDVLRKKCADFNIPEEELWWYLETRKFGSVPHAGFGLGLERLVMFVTGMTNIRDVIPFPRTPQNANF

SEQ ID NO: 188620 - protein, 257 aa, Unknown
  Bacterial polypetide isolated from the Sargasso Sea
TFGPTFRAENSNTSRHLSEFWMIEPEMAFYNLNDNMDLAESFVKSILNFILKNCKDDLNFLSERLLNEEKTKPQNERSELNLIEKIQFVIDNDFVRISYSDAFEILKNSNKNKKKKFEFIIDNWGIDFQSEHERYLVEQHFQSPVIIYDYPSKIKAFYMRLNDDKKTVRAMDVLFPGIGEIIGGSQREERLDILKKRIKESGIDEDEIWWYLDLRRYGSVPHSGFGLGFERIVQFCTGMSNIRDVIPYPRSPKNASF

SEQ ID NO: 188621 - protein, 39 aa, Unknown
  Bacterial polypetide isolated from the Sargasso Sea
TVPHAGFGLGFERLMMFVTGMTNIRDVIPFPRTPKNAEF

SEQ ID NO: 188622 - protein, 239 aa, Unknown
  Bacterial polypetide isolated from the Sargasso Sea
EFWMIEPEMAFYDINDNMDLAEDMLKYVIKYILENCEDDLVFLQNLEINEEKSLPQIQRNEIPLTERLSSILNKKFDRITYTEAFDILRSSKPNKKNKFEFKVDEWGIDFQSEHERYLVEKHFKNPVIVRDYPKKIKAFYMRSNDDEKTVAAMDVLFPSVGEIIGGSQREERLDKLSNRMDEMDISKEDLSWYLDTRRFGSVIHSGFGLGLERLVQFITGMKNIRDVIPFPRTPGNCNY

SEQ ID NO: 188623 - protein, 217 aa, Unknown
  Bacterial polypetide isolated from the Sargasso Sea
RRHLTEFWMVEPEMSYCDLKQNMDWMESLVTYIIDEVLKHCKSELNLLERNIEKLEAVKSPFPRITYDEAVNILKQNNIDFTYGKDFGASDETLISNQYDSPVMIHSWPAGTKAFYMKRDEINNDLALGVDMIAPEGYGEIVGGGQREDKIEILIETIRHHDLPLKPFEWYLDLRKYGSVPHSGFGLGLERFVAWVCGTKHIRETIPFPRTMARLEP

SEQ ID NO: 188624 - protein, 368 aa, Unknown
  Bacterial polypetide isolated from the Sargasso Sea
MKIRISELVNHLDENVKINGWVYNIRSIGKIWFLILRDGSGYLQCVTVKNDVDDEVFKLEETLTQESSVSVFGNVRKEPRSVGGVELSVSNIIVHQLSNEYPISKKDHGTDFLMTNRHLWLRSKKQNAILKIRHQVIKATRDFYDNNGFILVDSPILTANSVEGTSTLFELDYFDRSAYLTQSGQLYGESSAMAFGNIYVFGPTFRAEKSKTRRHLTEFWMVEPEMAYCDLEQNMDWAEKHVEYVVGHCLEHCRNELETLERDIKKLENITLPFPRITYDDAVEILKNNNVDFEYGSDFGATDETIISNQYQKPVMVHRWPAESKAFYMKRDPKNLNLALGVDMIAPEGYGEIVGGGQREDDYEILIN

SEQ ID NO: 188625 - protein, 222 aa, Unknown
  Bacterial polypetide isolated from the Sargasso Sea
INLADKFIRYIIKYVYDKCKNEIVFLSGRLEKEEQNIPKNERNDFTLEERINFVINNDFIRITYSEAFDILKNSKPNKKGKFKFPLNEWGVDFQSEHERFLVEKYFKCPVVVYDYPSKIKAFYMRMNDDKKTVKAMDILFPGIGEIVGGSQREERIDVLKERIKSLNIDEKELWWYLDLRKFGTVKHSGFGLGLERLILFITGMGNIRDVIPFPRTPKNAEF

SEQ ID NO: 188626 - protein, 131 aa, Unknown
  Bacterial polypetide isolated from the Sargasso Sea
MSHLAISELLKGNVAVDSQVTIKGWIRTRRDSKAGISFLAVHDGSCFDPIQAVVPNSLNNYDEVTSLTAGCSVSVTGVLVQSAGKGQSFEIQANTVTVLGWVENPDSYPMSAKRHSIEYLREHAHLRPRTN

SEQ ID NO: 188627 - protein, 422 aa, Unknown
  Bacterial polypetide isolated from the Sargasso Sea
MTTLSTINSILKSNNLNKEVIVQGWVKTFRSNRFINLNDGSCIEDLQCVLDYENTEKNILDKINTGASLKIQGKVQESQGRGQKYEIEVESLEVLGESDPDKFPIQPKKHSFEFLRENAHLRVRTKTISSVFRIRSEISYAIHKFFNEQGFFYVHTPIITGSDAEGAGEMFRVTTLKDNNIDHCEDFFGKETNLTVSGQLEAEALALGLGNVYTFGPTFRAENSNTSRHLAEFWMVEPEMAFYDLNDNMDLAESFIKKIITHVYSKCESDIKFLNDRLEKEELTKPKDQRSELSLIERIEFVINNDFKRISYTEAFDILRNSKPNKKKKFKYPVSEWGIDFQSEHERFLVEKHFKCPVIVYDYPAKIKAFYMRLNDDQDTVRAMDILFPGIGEIVGGSQREERLEVLKDRIQKQGNDEKELW

SEQ ID NO: 188628 - protein, 349 aa, Unknown
  Bacterial polypetide isolated from the Sargasso Sea
MAKQPRITTVKETFEEELVEGTMLQLCGWVRSKRTSKGGFSFVHLNDGSCLSNLQVVADGELENYESEIEKLGVGCSISVAGKLVASQGKGQDREIHAIKIEVLGWVDDPESYPIAKKKHSFEFLRTVAHLRPRTNTFGAITRIRNRLAQSVHRFFDESGFYWVNTPIITSSDCEGAGDMFRVSTLDQLHREQTDFSEDFFGSETFLTVSGQLNLETHACALKKVYTFGPTFRAENSNTSRHLAEFWMIEPEIAFADLQDNARLAESLLKTAFSDTLSNCMEDLEFFNTQVNSNVIERLQSLVESEFAVMSYSDAIKTLENSGKKFEFDVSWGSDLQSEHERFLTEEVV

SEQ ID NO: 188629 - protein, 475 aa, Unknown
  Bacterial polypetide isolated from the Sargasso Sea
MVRGRTTARAVATAAYGRPERIARVKGRDGGASRVGEELELRGWARSVRTQKGMAFIDLNDGSAISGMQAVVNEGSAAWEVANSGSVSTGAALRVKGKLVASPGGKQAAELAVDELEVIGAADSETYPLQKKRHTLEYLRSIAHLRPRTNTIGAVARVRNQLAYATHKFFQEHGFLYANTPIVTASDCEGAGEQFQVTTLLNGFAAAAAATPEAIAAAEAAAKEQGEVVKAVKEAKKAGDASKEDVDGAVAKLLSLKSEAEALAGAAGGASLPKKDDGSIDYSQDFFGKPSYLTVSGQLNGEIMACAVNDIYTFGPTFRAENSNTSRHLAEFWMVEPELAFADLNDDMDCAEAYLKYCLNHVLENCDEDLAFFEKNISKDNLRERLRSVATQEFARITYTEAVDHILNAKKKFEFPIKWGADLQSEHERYITEEVFKNRPVIVRDYPKDIKAFYMRLNDDNKTVAAMDVLVPRVG

SEQ ID NO: 188630 - protein, 478 aa, Unknown
  Bacterial polypetide isolated from the Sargasso Sea
MLNHSEIKNILKNKDIGKEVSVCGWVKTFRSNRFININDGSCIEDLQCVIELDSFDKKTLSQINTGASLNLKGEIVESQGKGQNVEIHVKNIEILGISHPDNYPIQPKKHSFEFLRENAHLRARTKTISSVLRIRSEVSYSIHKFFNENNFYYVHTPIITGSDAEGAGEMFKVTTHNLKEIPKDENNDIDFSKDFFGKETNLTVSGQLEAEAMALGMGKVYTFGPTFRAENSNTSRHLAEFWMIEPEMAFYELSDNIDLAESFIKYIIKDVYEKCKKEINFLSERLLKEEQNLPKVERNELSLTERINFVIENKFIRISYTEAFDILKNCKPNKKNKFKFPVNDWGIDFQSEHERFLVEKHFKCPVVVYDYPAKIKAFYMRLNDDKKTVRAMDILFPGIGEIVGGSQREERLDILKDRIKSMDIDEKELWWYLDLRKFGSVKHSGFGLGLERLILFITGMGNIRDVIPFPRTPKNADF

SEQ ID NO: 188631 - protein, 466 aa, Unknown
  Bacterial polypetide isolated from the Sargasso Sea
MSIASVASVFKGEHAVGSTVTVRGWVRTRRDSKAGISFLAVYDGSCFNPIQGVVPNSLENYDNEVLKLTAGCSVIVTGEIVESPGAGQAYELQVTHVEVTGWVEDPDTYPMAAKRHSIEHLRELAHLRPRTNIIGAVARVRNCLSQAIHRFYHENGFVWVSTPLITASDCEGAGEMFRVSTLDMENLPRTDDGKVDYDKDFFGKEAFLTVSGQLNGETYACALSKIYTFGPTFRAENSNTSRHLAEFWMVEPEVAFATLSDIASLAEGMLKYAFNAVLAERMDDLEFFAQHVDKTVIERLQSFVSSDFAQVDYTDAVDILQKCGREFEFPVSWGIDLSSEHERYLAEEHFKAPVVVKNYPKDIKAFYMRLNEDGKTVAAMDVLAPGIGEIIGGSQREERLDVLDMRLEEMDLNKEDYWWYRDLRRYGTVPHSGFGLGFERLVSYVTGVSNIRDVIPFPRAPRTANF

SEQ ID NO: 188632 - protein, 252 aa, Unknown
  Bacterial polypetide isolated from the Sargasso Sea
MKTVTIDKLSNYEGKDVELKGWVYNTRNVGKIWFVIFRDGTGLLQGVVVKGEATDESFALENDLNQEDSVIITGTVRKEPRSIGGFELGIKEIKVVKHVTDEFPISHKEHGADFLMSNRHLWLRSKRQNAIMRVRHQVTKAIRDFFDNNGFTLIDSPIFTGNAVEGTTTLFEVDYFERSAYLTQSGQLYQEAGATAFGKTYCFGPTFRAEKSKTRRHLTEFWMVEPEMAYVDLDENMTWAENLVGYIVERVL

SEQ ID NO: 188633 - protein, 383 aa, Unknown
  Bacterial polypetide isolated from the Sargasso Sea
AEVLESIHTGACIAVQGELLASQGSGQSFEINAHNIEVLGTASPDEYPLQPKKHSLEFLREIAHLRFRTNTFSAINRVRHAVIFGIHDYFNARGFYNIHTPIITGSDAEGAGETFKVSSLDFNNVPKTEEGEIDFKQDFFGKETNLTVSGQLEAELAAMALGKVYTFGPTFRAENSNTSRHLSEFWMIEPEVAFADLDENMDLGEDLLKHLIRYTLEQCADDLDFLDKRYAQEESQKKANERSEMGLIERLKFVTSNDFVRISYTEAIDILRNSKPNKKKKFAFPINEWGTDLQSEHERYLVEKHFKKPTILFDYPKDIKAFYMRQNDDGKTVRAMDILFPGIGEIVGGSQREERLELLEKRMQEMNVPKEELWWYLDLRKFG

SEQ ID NO: 188634 - protein, 431 aa, Unknown
  Bacterial polypetide isolated from the Sargasso Sea
MKTVTIKNLKDFEGQEVKINGWVYNRRSIGKVWFLILRDGTGLLQCVVVDGECDLESFQLEQNLNQEDSVSVSGIVKKEPRAVGGFELGVKDINVINHTSNEYPISNKEHGTDFLMSNRHLWIRSKRQNSILKIRHQIIKSIRDFFDNNDFILVDSPIFTGNAVEGTTTLFELEYFEKKAYLTQSGQLYQEAGAMAFGKSYCFGPVFRAEKSKTRRHLTEFWMVEPEMSYCDLNQNMDWMESLVTYIIDEVLKHCQSELNVLERNIEKLEAVKSPFPRITYDEAVNLLKKNNIDFTYGKDFGASDETLISNQYDSPVMIHSWPADTKAFYMKRDEINNELALGVDMIAPEGYGEIVGGGQREDNIEILIETIRHHDLPLKPFEWYLDLRKYGSVPHSGFGLGLERFVAWVCGTKHIRETIPFPRTMARLEP

SEQ ID NO: 188635 - protein, 429 aa, Unknown
  Bacterial polypetide isolated from the Sargasso Sea
MKNISINKLKDFIGKEVQLNGWIYNLRSIGKIWFAIVRDGTGFVQCVVTSNDVSTDVFELESSLTQESSVTVKGIVQKDSRSDLGVEILVKDMEVIHIAEEYPIALKEHGVSFLMDNRHLWLRSKKQYAIMKVRQNVIKSIRDFFDKRDFVLIDSPMFTGNAVEGTTTLFETEYFNRSAYLTQSGQLYQEAGAMAFGKTYCFGPCFRAEKSKTRKHLTEFWMVEPEMAFYDLKDNMDLIEEFIVHIVSQSIENCKEELKILERDITLLEKVKSPFPRLTYDEAVKLLHDNAQEFRYGSDFGAPDEELIASKFDSPVMIHSWPHETKAFYMKRDNSDKLALGVDVIAPEGYGEIVGGGQREDDHDTLVKRIEDHGLPISAFKWYLDLRKYGSVTHSGFGLGLERTVSWICGIDHVRQTIPFPRTMGRLEP

SEQ ID NO: 188636 - protein, 235 aa, Unknown
  Bacterial polypetide isolated from the Sargasso Sea
MGKIYVFGPTFRAEKSKTRRHLTEFWMVEPEMAYCDLSENMEWAEKHVSYVVQWCLENCQEELKILERDTSILEKTVPPFPRITYDDAVDILKKQGVDFKYGSDFGGTDETVVSEEFDRPVMIHRWPSDIKAFYMKRDPENDKLALGIDMIAPEGFGEIVGGGQREDDHDILLSRIKEHKLPIEPFQWYLDLRKYGSVPHSGYGLGIERTVGWICGTKHVRETIPYPRTIYRIEP

SEQ ID NO: 188637 - protein, 312 aa, Unknown
  Bacterial polypetide isolated from the Sargasso Sea
MRTPSETAVGSTVIVGGWVKTGREAEKGALLFLALNDGSGPGNLQVIVREDVYALGDLKTTGTSVVVEGELRAPPESAKGQAIEMHATKILMCGKCDGAVYPISKKKQTLEFLREKIHLRPRTNTIASVARVRSALAYATHTFFNQNGFLYVHTPCITQSDCEGAGEMFQVTTLLSEAEKAESAQPAVKPEELDAKRAEVSECGSGIKAMKESGAESKDVKKAVKKLDNLKQELLEMERAARKIGGIQRAEDGAIDYSDDFFAGKSYLTVSGQLQVETYACALSNVYTFGPTFRAENSNTTRHLAEFWMMNQ

SEQ ID NO: 188638 - protein, 442 aa, Unknown
  Bacterial polypetide isolated from the Sargasso Sea
MGKEYWIGDVRAGSHDTKEVVLKGWVHRARGSNKIWFIVVRDSTGHVQCVAKRDVVGDECFELLRNALIESSVEVTGVVEPTDREHGHEIQVTSATVVGPVNPDRPFPITESAMEDSDGGETEFLLDNRHLYLRTSRMTTMLKIRSTVFGAIHSYFRDRDFTEYQAPNFVAGAVEGGSTLFEVPYFGKKAYLTQSWQLYAEAAMPALERLYTMAPSFRAEKSRTRRHLTEFWHAEMEIAWASNDEVMEHGEGVVRHVARTLLEERSVELEELGRDLSMVARFAESEYPRMRYDEAIEALQSKGVEVEWGQDLDYSKEKILTSDFEVPHFLTHYPRVAKPFYHRPDPEDPKYVLCHDLLAPEGYGEIIGGGERTWSEEEILERIDEEGTPREPYEFYIDIRRYGGVPHGGFGLGVDRLCTWLSGAEHIREAIPFPRDSRRVTP

SEQ ID NO: 188639 - protein, 466 aa, Unknown
  Bacterial polypetide isolated from the Sargasso Sea
MSIASVASVFKGEHAVGSTVTVRGWVRTRRDSKAGISFLAVYDGSCFNPIQGVVPNSLENYDNEVLKLTAGCSVIVTGEIVESPGAGQAYELQVTQVEVTGWVEDPDTYPMAAKRHSIEHLRELAHLRPRTNIIGAVARVRNCLSQAIHRFYHENGFVWVSTPLITASDCEGAGEMFRVSTLDMENLPRTSDGKVDYDKDFFGKEAFLTVSGQLNGETYACALSKIYTFGPTFRAENSNTSRHLAEFWMVEPEVAFATLSDIASLAEGMLKYAFNAVLAERMDDLQFFAQHVDKTVIERLQSFVSSDFAQVDYTDAVDILQKCGREFEFPVSWGIDLSSEHERYLAEEHFKAPVVVKNYPKDIKAFYMRLNEDGKTVAAMDVLAPGIGEIIGGSQREERLDVLDMRLEEMDLNKEDYWWYRDLRRYGTVPHAGFGLGFERLVSYVTGVSNIRDVIPFPRAPRTANF

SEQ ID NO: 188640 - protein, 260 aa, Unknown
  Bacterial polypetide isolated from the Sargasso Sea
EVDYFERSAYLTQSGQLYQEAGATAFGKTYCFGPTFRAEKSKTRRHLTEFWMVEPEMAYVDLDENMTWAENLVGYIVERVLDNCSTELSLLERDADKLKAVIPPFPRITYDEAVKLLNDNGSDFQYGSDFGAPDETLLSENFDKPIMVHRWPSGIKAFYMKRDEENNDLALGVDMIAPEGYGEIIGGGQREDDLDILIDRIRHHDLPLEPFKWYLDLRKYGSVPHSGFGLGLERTVAWICGTKHIRETIPFPRTMSRLEP

SEQ ID NO: 188641 - protein, 234 aa, Unknown
  Bacterial polypetide isolated from the Sargasso Sea
MKTVTINRLDKYVDKEVEIKGWVYNRRSIGKIWFLILRDGTGLLQCVVVDGECDKDTFNLEQELNQEDSVIVKGKVKKEPRAIGGYELGVSEVCVINHTTEEYPISKKDHGADFLMSNRHLWLRSKRQNSIMRVRHQIVKAIRDYFDDNGFTLIDSPIFTGNSVEGTTTLFEVDYFERSAYLTQSGQLYQEAGATAFGKTYCFGPCFRAEKSKTRRHLTEFWMVEPEMAFVELD

SEQ ID NO: 188642 - protein, 259 aa, Unknown
  Bacterial polypetide isolated from the Sargasso Sea
MTVSGQLGAEVFALAFTNVYTFGPTFRAENSNTARHLAEFWMIEPEMAFMDLQGMLVLTEEFLRELLKECLDRHEEDLAFLQKMYDQELISGLKHICDTPFETLTYTEAVKILEESGKSFEFPVEWGCDLQSEHERYLSEVHVGGPLNLIDYPKDIKAFYMKQNPDGKTVAAMDVLFPRLGEIVGGSQREDDGESLLHLMREKGLPEETYQWYLELRRFGTAPHSGFGLGLERLVQFVTGMKNIRDVIPFPRVPGNARF

SEQ ID NO: 188643 - protein, 313 aa, Unknown
  Bacterial polypetide isolated from the Sargasso Sea
DAEGAGEMFKVQTLESKDLAKKSIDHSNDFFGKKTSLTVSGQLEAETYALGLGKVYTFGPTFRAENSNTSRHASEFWMIEPEIAFYDLNDNMDLAESFVKYILNYVLKNCDEDLKFLDQRLFKEESQKPKNKRNDLSLIEKINFTINNKFTRVSYSEAFDILKNSNHNKKKKFEYPIDKWGSDLQSEHERFLVEKHFKAPVIIYDYPSKIKAFYMRLNDDNKTVRAMDVLFPGIGEIIGGSQREERLDILQQRMAENGIDEKELWWYLDLRKYGTAPHSGFGLGFERMVMFCTGMSNIRDVIPYPRTPKNASF

SEQ ID NO: 188644 - protein, 365 aa, Unknown
  Bacterial polypetide isolated from the Sargasso Sea
MLEEAEKRDHRKLGREMDLFHFQEEGPGSVFWHKKGWKLFTELIDYMKRKGMNAGYLEVNTPDMLDRSLWEKSGHWEKFGENMFTCTTPDEKIFALKPMNCPGHVQIFKNGLKSYRDLPIKYAEFGKVHRYEPSGALHGLMRVRHFTQDDGHIFLTEEQIKEECIRVHELILSIYKDFGFEDIVVKFSDRPEKRVGEDEIWDKAEKALIEAVESTNQKFELNPGEGAFYGPKLEYVLRDAIGRDWQCGTLQVDFNLPGRLGSFYIGSDGEKHVPVMLHRAIFGSLERFTGILIEHYAGRLPLWISPTQIVIVTINSQCDQYANNVLERCVISNLRAETDLRNEKISYKIKEHISVKIPNIICYRS

SEQ ID NO: 188645 - protein, 239 aa, Unknown
  Bacterial polypetide isolated from the Sargasso Sea
KAQLQRIYGTAWETPEQLAEHKRRKEEALRRDHRRIGKDLDLFSIEDEAGAGLVFWHPRGARMRLLIEEFWRQAHFEGGYELLYTPHVADISLWKTSGHLDFYAESMFGPMEVDEREYQLKPMNCPFHVLTYASKLRSYRELPIRWAELGTVYRYERPGVMHGLMRVRGFTQDDAHVFCLPEQISDEILKILDLTERILSTFDFNTYEINLSTRPEKSIGDDAVWDLATKGLIEALERK

SEQ ID NO: 188646 - protein, 274 aa, Unknown
  Bacterial polypetide isolated from the Sargasso Sea
KMKELAKSSQEIFRSEISAKDAVTLFKNMDEDYKVEIIEQINPDDVISTYQQSDFVDLCRGPHVSNTSKIKYFKLLSTSGAYWRGDENNKMLQRIYGTVFSTKEALKEHLQNLEEAKRRDHRKIGKEMKLFTFDSDIGPGLPLWLPNGTIMIEELEKLAKFTERKAGFSQVRTPHLTKGTIYEKSGHLDHYKESMYPGMEIDGVDYYVKPMNCPHHHKIFSSLPRSYRDMPIRLSEYGTCYRYEKSGQLFGLMRVRSLQMNDAHIYCTPNQFKK

SEQ ID NO: 188647 - protein, 214 aa, Unknown
  Bacterial polypetide isolated from the Sargasso Sea
PEVRVGEDEVWDKAEASLLEAVKASKLEYSINKGEGAFYGPKIEFVLRDAIGRDWQCGTLQVDLNLPERLGASYVDKDGTKKIPVMLHRALFGSLERFIGILIENYAGKFPFWISPLQTMVIPISEEFNDYAIEISKKIKNVGISSSVDLKNQNLNYKIRDHSLAKIPLLLICGKKEVDSNSVTIRRLDSNKQENMDIDTFLKTFSALNKASSN

SEQ ID NO: 188648 - protein, 296 aa, Unknown
  Bacterial polypetide isolated from the Sargasso Sea
QEKQYFSKEFISDKEALKIFSNQQFKQELINTADKGEGVGEGQVSTYKNKDFIDLCKGPHIPNTGYLKHFKLTKLAGAYWRGIETNPQLQRIYGTAWFTKDDLNKYLTRQKEAEKRDHRKLGRELKLFTTADELGPGQYLWQPNGSILRNQIEEFSKSAHINNGYEFVNTPHIGRSILWETSGHLDHYKEGMYPALTTEDTDDDYYLKPMNCPFHILVYKNDIRSYRELPIRYFELGSVYRMEKTGVLHGLLRARGFTQDDAHIFTTIDNLNDEILNLLTFSIKLLNCFGFTEIEA

SEQ ID NO: 188649 - protein, 258 aa, Unknown
  Bacterial polypetide isolated from the Sargasso Sea
MPDITLPDGKKINFEKSISGFEVAEKISKSLSKQALLISVDGELKDLNHSIYKDSSIKIFTSKDKEGLETIRHDTAHILAMAVQELFPGTQVTIGPVIEDGFYYDFARKEPFTTEDLEKIENKMKEIVDRDEKTYREVWKRNDAIEHFKKKGEMYKAEIIESIPEGEDVSLYFHGDWHDLCRGPHLSSTGKIGKYFKLTKVSGAYWRGDSNNEMLQRVYGTSWSTQKELDDYLNRIEEAEKRDHRKIGKEMDLFHSEK

SEQ ID NO: 188650 - protein, 305 aa, Unknown
  Bacterial polypetide isolated from the Sargasso Sea
MLQRVYGTSWSTQKELDDYLNRIEEAEKRDHRKIGKEMDLFHFREESPGSVFWHQKGWNLFQKLISYMRMKQETAGYQEINTPEILDRSLWEKSGHWEKFGANMYTSTTPDEKVFAIKPMNCPGCVQVFNQGLKSYRDLPLKMSEFGKVHRYEPSGALHGLLRVRAFTQDDAHIFCTEEQITQECLSVTNLILEIYKDLGFEDVILKYSDRPDLRVGDDKVWDKSEAALLEAIKATKLEYSINKGEGAFYGPKIEFVLRDAIGRDWQCGTLQVDLNLPGRLGASFVDSDGNRKVPVMLHRALLDL

SEQ ID NO: 188651 - protein, 306 aa, Unknown
  Bacterial polypetide isolated from the Sargasso Sea
VSGAYWRGDSKNEMLQRIYGTCWSTKKDLEDYLHKLAEAEKRDHRKLGKEMDLFHFREESPGSVFWHEKGWILFQRLVEYMRMKQRLAGYKEINTPELLDKTLWEKSGHWDKFGEHMFTSETPDEKTFAVKPMNCPGCVQVFNQGLKSYRDLPLKLSEFGKVHRYEPSGALHGLLRVRAFTQDDAHIFCTEDQITQESLAVTNLILEIYKDLGFKDVILKYSDRPEKRVGDDIVWDKSEAALLTAIKQSKLKYTVNKGEGAFYGPKIEFVLTDAIGRDWQCGTLQVDLNLPSRLGATYVSNDGSKK

SEQ ID NO: 188652 - protein, 175 aa, Unknown
  Bacterial polypetide isolated from the Sargasso Sea
MPNIKLPDGNSLKFDTKITGFQIAEKISKSLSKQALIISVDGNLKDLHYEIDNDCSVKIYTAKDKEGLETIRHDTAHVLAMAVQELFPKTQVTIGPVIDNGFYYDFARKIPFTEEDLRKIENKMLEIIERDEPTRREVWKRDKAIEHFKKAGEIYKAEIIKDIPKDEELSVYFHE

SEQ ID NO: 188653 - protein, 267 aa, Unknown
  Bacterial polypetide isolated from the Sargasso Sea
TWPVKVRAFTQDDAHIFCTEDQITDECITVTKLILDIYKDLGFNKVFLKYSDRPEKRVGDDAVWDKSEKALLEAIKKTKLEYTVNKGEGAFYGPKIEFVLRDAIGRDWQCGTLQVDLNLPKRLGATFVDKDGTKKIPVMLHRALFGSLERFIGILIENYAGKLPFWLSPLQAVVLPIAEEHNDYAKKIFEDLFKEGIKCEVDLRNQKINYKIREHSLAKTPLILICGKKEISDKSVTMRKLGSEKQETIKFTKAVEKLKMLNNLPIK

SEQ ID NO: 188654 - protein, 289 aa, Unknown
  Bacterial polypetide isolated from the Sargasso Sea
PSFIKGLKSIENLPLKMSEFGKVHRYDPSGALHGLLRVRAFTQDDAHIFCTEEQITEECLTVTNLILEIYKDLGFEEVILKYSDRPELRVGDDQVWDKSEAALLEAIKATKLEYSINKGEGAFYGPKIEFVLRDAIGRDWQCGTLQVDLNLPGRLGASFVDSDGNKKVPVMLHRALFGSLERFIGILIENYSGKLPFWLCPVQTIVIPISSDFDDYAKEVNSQLKNAGISSEVDLKNHNLNYKIREHSLTKVPMLLICGKKEVDSNTVTIRRLDSKKQETMDLKEFLKK

SEQ ID NO: 188655 - protein, 281 aa, Unknown
  Bacterial polypetide isolated from the Sargasso Sea
MPNIKLPDGKSISFEKKVTGLQIAEKISKSLSKQALVISVDGNLRDLNYEIDKDCTVKIHTAKDKEGLETIRHDTAHVLAMAVQELFPGTQVTIGPVIDNGFYYDFARKKPFTEEDLRKIEKKMLEIVERDEPTHREVWKRDKAVEHFKKAGELYKAEIIKDIPKEEEVSVYFHGKWHDLCRGPHLMSTGKIGKYFKLMKVSGAYWRGDSKNEMLQRIYGTSWSTQKELDNYLNMIEEAEKRDHRKLGKEMDLFHFREESPGSVFWHEKGWNLFQKLISYM

SEQ ID NO: 188656 - protein, 329 aa, Unknown
  Bacterial polypetide isolated from the Sargasso Sea
IEDGFYYDISYKDTFTPDDLIKIEKRMKELVNRDYNVGVEIVSPEKATEIFTDRGEFFKLDIVKNIPENEIIKLYKHQEYIDMCRGPHVPNTRHLRVFKLMKVSGAYWRGDSNNEMLQRIYGTAWKSSKELKEYISRIEEAEKRDHRKLGKKYSLFHSQEEAPGMVFWHPKGWTIYRILEDFIRETITKYDYQEVKSPQVVDRSLWEKSGHWDKFKEDMFTTTSENREYAIKPMNCPCHIQIFNQGLKSYRDLPIRLSEFGSCHRNEPSGALHGLMRVRNFVQDDAHIFCTDEQIQEEVQNFIDLVFEVYKTFGFDSILIKLSTRPVKK

SEQ ID NO: 188657 - protein, 293 aa, Unknown
  Bacterial polypetide isolated from the Sargasso Sea
MPDIQLLDGKKIPFNKKITGFDLVKKISKSLEKKALIMEVDGKLKDLSFEITKNSKVKIITADDKDGLDVIRHDAAHIMAMSVQELYPGTQVTIGPVIENGFYYDFARKEPFTSEDLDKIEKKMSEIIDRDVKTRREVWKRDKAIKHFKKIGEKYKAEIIASIPKNEELSIYHHGDTWYDLCRGPHLASSGKIGKAFKLTKVSGAYWRGDSNNEMLQRIYGTCWSSKDHLKLYLDRLEEAEKRDHRKLGKEMDLFHFREESPGSVFWHEKGWILFQRLVEYMRFRQRLDGYKE

SEQ ID NO: 188658 - protein, 296 aa, Unknown
  Bacterial polypetide isolated from the Sargasso Sea
KELPIRWAELGTVYRYERPGVMHGLMRVRGFTQDDAHVFCLPEQISDEILKILDLTETILSTFDFRNYEINLSTRPEKSIGDDAVWDLATKGLTEALQRKGWDYKIDEGGGAFYGPKIDLKIEDAIGRMWQCSTIQLDFNLPERFALEYVAADGSRQRPIMIHRAIFGSLERFFGIMTENYAGDFPFWLAAEQIRLLPVTDEVMGYAEEIQSELTAAGIRSLIDRSGERLGKLIRLGEQQKIPVLAVIGAQEAEQGTLSLRSRRQGDLGSVARSEVLDAATSANAARAAVLELSRS

SEQ ID NO: 188659 - protein, 329 aa, Unknown
  Bacterial polypetide isolated from the Sargasso Sea
AIPEKEDVSIYFHGDWHDLCRGPHLSSTGKIGKYFKLTKVSGAYWRGDSKNEMLQRIYGTSWATQKDLDEHLKRIEEAEKRDHRKLGREMDLFHFREESPGSVFWHERGWALFQNLINYMRHRQDTAGYKEINTPEVLDRQLWEKSGHWGKYGDNMYTSETPDEKVFAIKPMNCPGHVQVFNQGLKSYRDLPLRYAEFGKVHRYEPSGALHGLLRVRAFTQDDAHIFCSEDQITSECLIVTNLILDIYKDLGFENVILKYADRPEVRVGEDEVWDKAEASLLEAVKASKLKYSINKGEGAFYGPKIEFVLRDAIGRDWQCGTLQVDLNL

SEQ ID NO: 188660 - protein, 341 aa, Unknown
  Bacterial polypetide isolated from the Sargasso Sea
APGAVFWHPKGWTLFQSLINYMRNRQDKAGYVETNTPDMMDKSLWEKSGHWDKFSDMMFRTEAKDDKIYAIKPMNCPGAVEIFKQGLKSYRDLPFLLSEFGKVHRYEPSGALHGLMRVRAFTQDDAHIFCTEDQITQESKTVCDLILSIYKDFGFDNVRIKFSDRPEKRVGDDAIWDKAEAALMQAMEATGLEYTLNPGEGAFYGPKLEFVLRDAIGRDWQCGTLQVDLNLPGRLGATYIGEDGNKKIPVMLHRALFGSLERFTGILIEHYAGHLPFWLSPLQAVVATITSDTDEYAYEVQKVLVSKGIRAEIDTRNEKIGYKIREHSNSKVPAIIAVGKK

SEQ ID NO: 188661 - protein, 279 aa, Unknown
  Bacterial polypetide isolated from the Sargasso Sea
YKIRHSAAHVMADVVKTMYPNVKLAIGPPTEDGFYYDFLIDTPFSDDDLKKIEKQMKKIIARNLPFEYSEYSREDMLEINKDEPLKIEIIKEIPEGDSITTYKHGDFEDLCAGPHVESTGKIPAFKLLNVAGAYWRGDESRPMLQRIYGTAWESKEALQKHVERIEEARKRDHRTLGKTLDLYSIHEEIGPGLIVWHPKGARVRNLFEDFWRTEHYKRGYDLVYTPNIGRSVLWETSGHLDFYSEDMFAPSVNDDQDYYLKPMNCPFAYNVLSVFFEKL

SEQ ID NO: 188662 - protein, 300 aa, Unknown
  Bacterial polypetide isolated from the Sargasso Sea
PGSVFWHQKGWNLFQKLISYMRAKQDKAGYNEINTPEILDRSLWEKSGHWEKFGVNMYTTTTPDEKVFAIKPMNCPGCVQVFNQGLKSYRDLPLKMSEFGKVHRYEPSGSLHGLLRVRAFTQDDAHIFCTEDQITQECLSVTNLILEIYKDLGFENIILKYSDRPEVRVGEDHVWDKSEKALLKAIKQTDLEYSINKGEGAFYGPKIEFVLRDAIGRDWQCGTLQVDLNLPGRLGASYVDKDGSKKIPVMLHRALFGSLERFIGILIENYSGKLPFWLSPLQTMVIPISDDFDNYAKKVN

SEQ ID NO: 188663 - protein, 287 aa, Unknown
  Bacterial polypetide isolated from the Sargasso Sea
KKGEIYKAEIIKSIPEGEDVSLYFHGDWHDLCRGPHLSSTGKIGKYFKLTKVSGAYWRGDSNNEMLQRVYGTSWSTQKELDDYLKRIEEAEKRDHRKIGKEMDLFHFREESPGSVFWHQKGWSLFQKLISYMRIKQEIAGYQEINTPEILDRSLWEKSGHWEKFGANMYTSTTPDEKVFAIKPMNCPGCVQVFNQGLKSYRDLPLKMSEFGKVHRYEPSGALHGLLRVRAFTQDDAHIFCTEEQITEECLTVTNLILEIYKDLGFEDVILKYSDRPELRVGDDQVWD

SEQ ID NO: 188664 - protein, 139 aa, Unknown
  Bacterial polypetide isolated from the Sargasso Sea
MPNITLPDGKKLNFEESVSGLEIAEKISKSLSKQALLISVNGVLQDLDSKIKEDAKVTIFTSRDKEGLETIRHDTAHILAMAVQELFPGTQVTIGPVIDDGFYYDFARKEPFTEEDLKKIEVKMREIVDRDEITKKEIG

SEQ ID NO: 188665 - protein, 324 aa, Unknown
  Bacterial polypetide isolated from the Sargasso Sea
MDGSKKVFEKSVTILEIAQTIGAGLAKATIAGKVNDVLLDATIPISRDSEVVIITSKDKEGIEIIRHSFAHLIGHAVKQIYSDIKMAIGPVIEDGFYYDVFSEYRFTPEDLIKIENRINKLIKTNYDVQILQVSKEEAIKTFKERDETFKLRIIEEIPEEGLINLYKHEEYIDMCRGPHVPNTRHLRHFKLLKLSGSYWRGNSENESLQRIYGTAWAKEKELKDYLTRIEEAEKRDHRKLGKKHSLFHIQEESPGMIFWHPNGWTIYQVLEKYIREILKKNDYLEIKTPQAVDKSLWEKSGHWEKFRDDMFTTASENRTYAIKP

SEQ ID NO: 188666 - protein, 302 aa, Unknown
  Bacterial polypetide isolated from the Sargasso Sea
IYTSKDKEGLETIRHDTAHVLAMAVQELFPGTQVTIGPVIDNGFYYDFARKEPFTEDDLRKIEKKMLKIVERDEPTHREVWKREKAIEHFKKAGEIYKAEIIKDIPKEEEVSIYFHGKWHDLCRGPHLMSTGKIGKYFKLTKVSGAYWRGDSNNEMLQRIYGTSWPSQKELDDYLKRVEEAEKRDHRKLGKEMDLFHFREESPGAVFWHEKGWNLFQKLIDYMRAKQKNAGYKEINTPEILDRSLWEKSGHWEKFGEHMYTSTTPDDKVFAIKPMNCPGCVQVFNQGLKSYRDLPLKMSEFG

SEQ ID NO: 188667 - protein, 191 aa, Unknown
  Bacterial polypetide isolated from the Sargasso Sea
MKITLPDKSVREYEGPLTVYDVASDIGPGLAKATLGGEVDGVLVDATHRIEEDAKLRIITGKDEEGLEIIRHSCAHLLAQAVKQLFPEAQVTIGPVIEDGFYYDFAYGPGFSEDDLGRIEERMQALAKAGASVERLTMGREEAVTYFREQGEEYKAKIIEEIPADETLSLYRQGDFTDLCRGPHVPDVGAL

SEQ ID NO: 188668 - protein, 293 aa, Unknown
  Bacterial polypetide isolated from the Sargasso Sea
MVNKINITFPDGVSKKFDKGITGIAIAENISKSLAKESVAIKLNDEIVDLSKNIENDSNIKIIKKQDDDALSIIRHDCAHVMAEAVQELFPGTQVTIGPAIENGFYYDFAREAPFTTNDLEKIEKKMHEIINKGEKFVREIWERKDAIEYFSKKGEKYKTELINDLPKDEIISIYKQGRWLDLCKGPHMPTTKYIGKAFKLMKVAGAYWRGNSNNEMLTRIYGTAWRNEKELSEYLKQLDEAEKRDHRKIGKEMNLFHFPEEAPGAVFWHPKGWSLFQSLINYMRNATDKEEY

SEQ ID NO: 188669 - protein, 309 aa, Unknown
  Bacterial polypetide isolated from the Sargasso Sea
EEDLRKIEKKMLEIVERDEPTHREVWNRDKAVEHFKKAGELYKAEIIKDIPKEEEVSVYFHGKWHDLCRGPHLMSTGKIGKYFKLMKVSGAYWRGDSKNEMLQRIYGTSWSTQKELDNYLNMIEEAEKRDHRKLGKEMDLFHFREESPGSVFWHEKGWNLFQKLISYMRSKQDDAGYKEINTPEILDRSLWEKSGHWEKFGANMYTSTTPDEKVFAIKPMNCPGCVQVFNQGLKSYRDLPLKMSEFGKVHRYEPSGALHGLLRVRAFTQDDAHIFCSEDQITQECLNVTNLILEIYKDLGFENVILKYS

SEQ ID NO: 188670 - protein, 269 aa, Unknown
  Bacterial polypetide isolated from the Sargasso Sea
FDAGSENKEFAIKPMSCPGHIQVYNHGLKSYRDLPLKYAEFGKVHRNEPSGTLHGLLRLRAFTQDDAHIFCTIHQVEDEIGQLIDNIYDIYNIFGFRDIFVELSTRPEKRVGDDRIWDISESALKKTLESKNVKWKINEGDGAFYGPKIDFSLKDSIGRVWQLGTIQLDFSMPERLSATYVNEEGNKIAPVMIHRAILGSLERFVGILIEEYSGNFPLWLSPQQIQIINITSAQDDYCIELRDKLRSVNFRVDTDLRNEKINLKIRENT

SEQ ID NO: 188671 - protein, 226 aa, Unknown
  Bacterial polypetide isolated from the Sargasso Sea
MPIITLPDGNNIDFPNKVTGLEVAEKISKSLAKQAMVISVDGELKDLDFLIKNDCSVKIITSKNPEGLETIRHDTAHILAMAVQELFPGTQVTIGPVIENGFYYDFARKEPFTEDDLVKIENKMKEIVDRNETTKREVWDRNKAISHFKKKGEIYKAELIEAIPENEDVSIYFHGEWHDLCRGPHLSSTGKIGKYFKLTKVSGAYWRGDSNNEMLQRIYGTSWATQ

SEQ ID NO: 188672 - protein, 330 aa, Unknown
  Bacterial polypetide isolated from the Sargasso Sea
QELFPETQVTIGPAIENGFYYDFARDEPFTLADLPKIEKKMHEIIQRNKNFVREVWSKEEAIKHFKDRGENYKVELINDLPDSEEISIYKQGDWLDLCRGPHMVSTKQIGKAFKLMKVAGAYWRGDSSNAMLTRIYGTAWATEKDLEQHLLQIEEAEKRDHRKLGREMDLFHFQEEAPGAVFWHPKGWTLFQSLINYMRNRQDKAGYVETNTPDMMDKSLWETSGHWDKFSDMMFRTEAKDDKIYAVKPMNCPGAVEIFKQGLKSYRDLPFLLSEFGKVHRYEPSGALHGLMRVRAFTQDDAHIFCTEDQITQESKTVCDLILSIYKEFW

SEQ ID NO: 188673 - protein, 261 aa, Unknown
  Bacterial polypetide isolated from the Sargasso Sea
GFTQDDAHIFCQEDQIESETKKFINFLSGVYKDLGFPKFAVKFSDRPKNRAGSDDVWDKAEGALKSATTSAGFDFELNPGEGAFYGPKLEFVLTDAIGRDWQCGTLQVDFVLPDRLDANFIGEDGQKHRPVMLHRAVLGSFERFIGILIENFAGRLPFWLAPRQVVVASIVTDANEYCTEIVDALKIVGIRAESDLRNEKISYKVREHSVAKVPTILAIGSREVEERTITVRTLGEKQTKTINFEQVILELQKEGIPPDMR

SEQ ID NO: 188674 - protein, 309 aa, Unknown
  Bacterial polypetide isolated from the Sargasso Sea
GFYYDVFSEYRFTPEDLVKIETRINKLINTNYDVEILQVSKEEAIKTFKERDETFKLRIIEEIPEEGLINLYKHEEYIDMCRGPHVPNTRHLRHFKLLKLSGSYWRGNSENESLQRIYGTAWAKEKELKDYLKRIEEAEKRDHRKLGKKHSLFHIQEESPGMIFWHPNGWTIYQVLEKYIREILKKNDYLEIKTPQAVDKSLWEKSGHWEKFRDDMFTTASENRTYAIKPMNCPCHIQVFNQGLKSYKDLPIRLAEFGSCHRNEPSGALHGLMRVRNFTQDDAHIFCTEEQIQEEVSTFIDLVFEVYKT

SEQ ID NO: 188675 - protein, 167 aa, Unknown
  Bacterial polypetide isolated from the Sargasso Sea
MPNIKLPDGNSISFEKKVTGLQIAEKISKSLSKQALVISVDGNLKDLNYEIDKDCSVKIHTAKDKEGLETIRHDTAHILAMAVQELFPGTQVTIGPVIDNGFYYDFARKISFTEEDLRKIEKKMLEIVERDEPTHREVWKRDKAVEHFKKAGEIYKAEIIKDIQKRR

SEQ ID NO: 188676 - protein, 293 aa, Unknown
  Bacterial polypetide isolated from the Sargasso Sea
TSTTPDEKVFAIKPMNCPGCIEVFNQGLKSYKDLPLKMSEFGKVHRYEPSGALHGLLRVRAFTQDDAHIFCTEDQITKECLIVTDLILEIYKDLGFENVILKYSDRPEKRVGDDSIWDKAESALLKAVKATKLEYSINKGEGAFYGPKIEFVLRDAIGRDWQCGTLQVDFNLPGRLGASYIDKDGTKKVPVMLHRALFGSLERFIGILIENYAGKFPFWISPLQTVVIPISEDFEEYAKKVSNKIREAGITSMVDLKNHNLNYKIRDHSLAKIPLLIICGKKEVDSNSVTIEG

SEQ ID NO: 188677 - protein, 316 aa, Unknown
  Bacterial polypetide isolated from the Sargasso Sea
YLNLIKEAEKRDHRKLGKQLDLFHFQEEAPGSVFWHAKGWTLFRTLIDYMRHRQEEAGYEEINTPDIMDKSLWELSGHLEKFGDNMFTTEAREDRVYALKPMNCPGCVQVYKQGLKSYRDLPLRVAEFGKVHRYEPSGALHGLMRVRAFTQDDAHIFCTEDQITEESKKVCDLVLSIYKDFGFDKVSIKFSDRPEKRVGSDAIWDKSEEALRQAMEATGLDYSLNPGEGAFYGPKLEFILKDAIGREWQCGTLQVDLNMPERLGGHFIAEDGQKYNPVMLHRALFGSLERFTGILIEHYAGALPLWLSPVQAIVTQ

SEQ ID NO: 188678 - protein, 264 aa, Unknown
  Bacterial polypetide isolated from the Sargasso Sea
MPNITLPDGKNLNFSKEVTGLEIAEKISKSLSKQALIMSVNGELKDLYFSINKDSLVKIFTSKDPEGLEVIRHDAAHIMAMAVQELYPGTQVTIGPVIENGFYYDFARKEPFTEDDLKKIEKRMAEIIDKDIKTRREVWKREKAIDHFKKIGEKYKAEIIESIPQDEELSVYYHGETWHDLCRGPHLLSSGKIGKAFKLTKVAGAYWRGDSKNEMLQRIYGTSWASKKDLDDYLNRIQEAEKRDHRKLGKEMDLFHFREESPGS

SEQ ID NO: 188679 - protein, 90 aa, Unknown
  Bacterial polypetide isolated from the Sargasso Sea
MPVITLPDGSQRSYDNPLSVLDVAKDIGPGLAKATIAGKINGQLVDACELITADASLSIVTAKDQEGLEIIRHSCAHLLGHAIKQLWPNT

SEQ ID NO: 188680 - protein, 292 aa, Unknown
  Bacterial polypetide isolated from the Sargasso Sea
TEIAEKISKSLAKQAIVMSVNGELKDLNHLIDNDCSVKIFTSKNPEGLETIRHDTAHILAMAVQELFPGTQVTIGPVIENGFYYDFARKEPFTEDDLVKIENKMKEIVDRNEITKREVWERNKAISHFKKKGEIYKAELIEAIPENEDVSIYFHGEWHDLCRGPHLSSTGKIGKYFKLTKVSGAYWRGDSNNEMLQRIYGTSWATQKDLDEYLKRIEEAEKRDHRKLGKEMDLFHFREESPGSVFWHEKGWALFQKLINYMRSRQDAAGYREVNTPEILDRQLWEKSGHWEK

SEQ ID NO: 188681 - protein, 325 aa, Unknown
  Bacterial polypetide isolated from the Sargasso Sea
IGKYFKLTKVSGAYWRGDSKNEMLQRIYGTSWPSQKELDNYLKMIEEAEKRDHRKLGKEMDLFHFREESPGSVFWHERGWNLFQKLIDYMRLRQKKAGYKEINTPEILDRGLWEKSGHWEKFGEHMYTSTTPDEKIFAIKPMNCPGCVQVFNQGLKSYRDLPLKMSEFGKVHRYEPSGALHGLMRVRAFTQDDAHIFCTEDQITQECLSVTNLILDIYKDLGFKNVILKYSDRPEVRVGNDKVWDKSESALLEAVKESKLEYSINKGEGAFYGPKIEFVLRDAIGRDWQCGTLQVDLNLPERLGASYVDKDGSKKISVMLHRALF

SEQ ID NO: 188682 - protein, 288 aa, Unknown
  Bacterial polypetide isolated from the Sargasso Sea
TQKELENYLNMIEEAEKRDHRKLGKEMDLFHFREESPGSVFWHEKGWNLFQKLISYMRSKQDDAGYKEINTPEILDRSLWEKSGHWEKFGANMYTSTTPDEKVFAIKPMNCPGCVQVFNQGLKSYRDLPLKMSEFGKVHRYEPSGALHGLLRVRAFTQDDAHIFCSEDQITQECLNVTNLILEIYKDLGFENVILKYSDRPEVRVGDDKVWDKSEKALLEAIKASKLEYSVNKGEGAFYGPKIEFVLRDAIGRDWQCGTLQVDLNLPGRLGASFVDKDGSKKVPRYVA

SEQ ID NO: 188683 - protein, 207 aa, Unknown
  Bacterial polypetide isolated from the Sargasso Sea
RAEADLAVALEENNIPFEFQLGEGAFYGPKIEFTLYDCLDRAWQCGTVQLDFSLPSRLSASYVGENNERQVPVMIHRAILGSMERFIGILTEEFAGFFPTWLAPVQVVVMNITDSQSEYVNELTQKLQNAGIRVKADLRNEKIGFKIREHTLRRVPYMLVCGDKEVEAGKVAVRTRRGKDLGSLDVNEVIEKLQQEIRSRSLQQLEE

SEQ ID NO: 188684 - protein, 286 aa, Unknown
  Bacterial polypetide isolated from the Sargasso Sea
MPNIHLLDGKKISFKNSIDGFELAKKISKTLEKNALIMEVDGQLKDLSHQITKNSKVRIITTKDKEGLEVLRHDAAHIMAMAVQELFPGTQVTIGPVIEDGFYYDFARKEPFTSEDLKKIEKKMSELIDKDLKTRREVWKRDAAIANFKKIGEKYKAEIIESIPKNEELSVYHHGDAWHDLCRGPHLPSSSKIGKAFKLTKVSGAYWRGDSNNEMLQRIYGTCWASKKELDDYLHRLEEAEKRDHRKLGKEMDLFHFREESPGSVFWHEKGWLLFQRLVEYMRTKQ

SEQ ID NO: 188685 - protein, 290 aa, Unknown
  Bacterial polypetide isolated from the Sargasso Sea
RYFELGSVYRMEKTGVLHGLLRARGFTQDDAHIFTTIDNLNDEILNLLTFSIKLLNCFGFTDIEADLSTRPKDSIGLDKDWENATNSLEEALNQQKLSYKIAQGEGAFYGPKIDLHIKDAIGRRWQLTTIQIDFAQPNNFSLEYVNSENKKVRPVMIHRALLGSIERFTGILIEHYAGEFPGWLAPNQINILTIGNVNEYLDFIVSKLSKYRLSIDDRNIRLGEKIHESRKNKVPVTLIIGEKDAKNKSVAINYLDGSEEQDIELSEGIKSINKKLKKPVFKSDEGWNKY

SEQ ID NO: 188686 - protein, 220 aa, Unknown
  Bacterial polypetide isolated from the Sargasso Sea
VINFSTRPKERIGSDEDWDRAEEALQKVLERIGMKWVLNAGDGAFYAPKLDFILTDAIGREWQCGTIQVDMNMPTRLEMSYVGEDGQRHTPHMIHRAILGSVERFIGVLIEHYAGKFPLWLAPVQVVVATITGDNEGYAYKVKDALIKVGIRAELDLRNEKIGYKVREHSSKKVPVIFVLGKQESSEKSVAIRRLGSKNNESMSMKNAIAVMKNEATPPL

SEQ ID NO: 188687 - protein, 159 aa, Unknown
  Bacterial polypetide isolated from the Sargasso Sea
MPQVILLDGKKISFSKSISGFELTKKISKSLEKSALIMEVNGELKDLSHEITKDSKVRIITTKDKEGLEVIRHDAAHIMAMAVQELYPGTQVTIGPVIENGFYYDFARKEPFTSEDLNKIEKKMSEIIDRDVKTRREVWERNKAISHFKKIGEKYKAEI

SEQ ID NO: 188688 - protein, 327 aa, Unknown
  Bacterial polypetide isolated from the Sargasso Sea
KFGANMYTSTTPDEKIFAIKPMNCPGCVQVFNQGLKSYRDLPLKMSEFGKVHRYEPSGALHGLLRVRAFTQDDAHIFCTEDQITEECLSVTNLILEIYRDLGFKNVILKYSDRPEVRVGNDKIWDKSEAALLKAIKASKLEYSINKGEGAFYGPKIEFVLRDAIGRDWQCGTLQVDLNLPERLGASFVDKDGSKKIPVMLHRALFGSLERFIGILIENYSGKLPFWIAPQQVMVIPVSEEFDNYAKKVSKEIKNAGINSEIDLKNHNLNYKIREHSLAKIPILLICGKKEVDSNSVTIRRLDSNKQENMELKTFLKKFSALNKAPSN

SEQ ID NO: 188689 - protein, 200 aa, Unknown
  Bacterial polypetide isolated from the Sargasso Sea
ALTKALDNKNLKWELQPGEGAFYGPKIEFSLKDCLNRVWQCGTIQVDFSMPIRLDATFVDIENEKRNPVMLHRAILGSFERFIGILIEQYEAKFPIWLAPYQIILLSITDRNIEKCLKFNELINNNGYRSKVDIRNEKIGYKIREATLGRVPLIAVIGDKEEEIDSVALRALDGTNLGIFNLPNLYKLMDELIEKKGRTE

SEQ ID NO: 188690 - protein, 308 aa, Unknown
  Bacterial polypetide isolated from the Sargasso Sea
NFLEEAAKRDHRKLGREMALFHMQEEAPGMVFWHPNGWTIYSTLQNYMKRKLDKAKYLEVKTPQVVDRKLWEASGHWDKYQEHMFIVEVDEDGAREKRTNALKPMNCPCHVQIYNQGLKSYRDLPLRMAEFGSCHRYEPSGAMHGIMRVRGFVQDDAHIFCTESQIESETKVFIDLLSDIYNDLGFDSFHVKFSDRPTHRAGDDPTWDKSEKALLEATKAAGCEYTLNPGEGAFYGPKLEFVLTDAIGREWQCGTLQVDFVLPERLDASYIDETGVKSRPVILHRAILGSFERFIGILLEENSGKLPL

SEQ ID NO: 188691 - protein, 322 aa, Unknown
  Bacterial polypetide isolated from the Sargasso Sea
YIRGILKKNDYLEIKTPQAVDKSLWEKSGHWEKFRDDMFTTASENRTYAIKPMNCPCHIQVFNQGLKSYKDLPIRLAEFGSCHRNEPSGALHGLMRVRNFTQDDAHIFCTEEQIQEEVSTFIDLVFEVYKTFGFDEIIIKLSTRPEKRVGSEDIWDKSEDALTKALDNKNLKWELQPGEGAFYGPKIEFSLKDCLNRVWQCGTIQVDFSMPIRLDATYVDIDNEKRNPVMLHRAILGSFERFIGILIEQYEAKFPIWLAPDQIILLSITDRNIQKCLRFNELISDKGYRSKVDIRNEKIGYKIREATLGRVPLIAVMEIKKK

SEQ ID NO: 188692 - protein, 149 aa, Unknown
  Bacterial polypetide isolated from the Sargasso Sea
MGAEYVSENNDRQHPVMLHRAILGSFERFIGILIEHYEGAFPAWLAPAQAVIMNITDKQAAFAAEVEKTLVQSGFRAKCDLRNEKIGFKIREHTLLKTPYLLVIGDREVETRSVAVRTREGVDLGSMPLEQFAQMLTQAVSRRGRQELE

SEQ ID NO: 188693 - protein, 323 aa, Unknown
  Bacterial polypetide isolated from the Sargasso Sea
MKITLPDNSSRELLEGSSGYDLAKDIGPGLAKSAIAVTIDGVQKDLYDVIDSDASVSIITIDSDEGVEIMRHTLTAQVLARAIKNLYPESKLAIGPTVQDGFYYDVESDESISSDDLSKIEEEMKKIIKTKSAIIKKLVSKKEALKIFKSNKEPYKEIIINESDQDDDFQLYYQDDEEFVDLCRGPHLPNLGFIGSFKLTKVSGAYWKGDSKNSMLTRIYGTAFSNDKDLQNHLDSIEEALKRDHRKLGKEMDLFHFQDEAPGMVFWHPNGWTVYRKLRNFVRDRLKENNYIEVNTPQVIDRKLWEASGHWDKYRENMFIQRS

SEQ ID NO: 188694 - protein, 372 aa, Unknown
  Bacterial polypetide isolated from the Sargasso Sea
FKKKGEIYKAEIIGSIPENEEVSVYFHGDWHDLCRGPHLSSTGKIGKNFKLTKVSGAYWRGDSNNEMLQRIYGTSWSSQKELDEYLKRIEEAEKRDHRKLGKEMDLFHFREESPGSVFWHEKGWSLFQKLIAYMRMKQDYAGYKEINTPEILDRSLWEKSGHWEKFGTNMYTSKTPDEKIFAIKPMNCPGCVQVYNQGLKSYRDLPLKMSEFGKVHRYEPSGALHGLLRVRAFTQDDAHIFCTEEQITDECLTVTNLILEIYKDLGFENVILKYSDRPEVRVGEDAVWDKSEAALLEAIKKTKLEYTINKGEGAFYGPKIEFVLRDAIGRDWQCGTLQVDLNLPGRLGASYVDKDGAKKVPVMLHRALLALR

SEQ ID NO: 188695 - protein, 308 aa, Unknown
  Bacterial polypetide isolated from the Sargasso Sea
HKIFSSLPRSYRDMPVRLSEYGTCYRYEKSGQLFGLMRVRSLQMNDAHIYCTPNQFKKEFMDVCRMYLEYFELFNIEKYSMRLSLHDKEGLGEKYVNEPELWLETEQWVREALDEGGFNYSEVSGEAAFYGPKIDVQVWSAIGKEFTLATNQVDFVVPKRFDLSYKDENGEHQTPICIHRAPLSTHERFIGFLIEHFGGNFPLWLAPVQVAVLPVSDKTNEYARKIKEKLIDADIRTVLDDKSDKIGAKIRNAEINRINVMLIIGPKEEESNTVSVRRKISGDLGTIDQDMLISELVNEIKDRSLTHS

SEQ ID NO: 188696 - protein, 157 aa, Unknown
  Bacterial polypetide isolated from the Sargasso Sea
MPTITLPDGNNINFSKKVTGAEVAEKISKSLAKQAMVISVDGELKDLDYLIDKDCSVKIFTSKNPEGLETIRHDTAHILAMAVQELFPGTQVTIGPVIENGFYYDFARKEPFTEDDLLKIENKMKEIVDRDEITKRESWERNKAIDHFKKKGEIYKS

SEQ ID NO: 188697 - protein, 142 aa, Unknown
  Bacterial polypetide isolated from the Sargasso Sea
MPNITLPDGKKLNFSEPISGIQIAEKISKSLLKQALIMSVNGELKDLDQKISEDSKVKIFTSKDQEGLETIRHDTAHILAMAVQEIFPGTQVTIGPVIEDGFYYDFARKEPFTKEDLEKIEKKMKEIVDRDEKTSREVWKRN

SEQ ID NO: 188698 - protein, 309 aa, Unknown
  Bacterial polypetide isolated from the Sargasso Sea
MYITSGHYEKYGEDSFQPILTPNDSEIFMLRPMNCPHHCEIFNSKPLSYRDLPYRMAEFGTVYRYEQSGELHGLSRVRGFTVDDAHIFCTTDQVDSEFKNTIDLVLYVFKSLGFSDFYAQVSLRDPDNPDKYIGTDENWEIAEQAILNSAKEKDLNYKVEYGEAAFYGPKLDFMVKDALGRSWQLGTIQVDYNLPERFDLTYKGKNNEDLRPVMLHRAPFGSMERFVAILLEHTGGLFPLWLASTQVEILIVSENFKNYGQKVLNILENHEIRAHLDDRNETVGKKIRESEINKVPFMIIVGENEVINE

SEQ ID NO: 188699 - protein, 281 aa, Unknown
  Bacterial polypetide isolated from the Sargasso Sea
KDLDLYLQRIEEAEKRDHRKIGKEMDLFHFREESPGSVFWHQKGWNLFQKLISYMRMKQETAGYQEINTPEILDRSLWEKSGHWEKFGANMYTSTTPDEKVFAIKPMNCPGCVQVFNQGLKSYRDLPLKMSEFGKVHRYEPSGALHGLLRVRAFTQDDAHIFCTEQQITQECLSVTNLILEIYKDLGFEDVILKYSDRPDLRVGDDKVWDKSEAALLEAIKATKLEYSINKGEGAFYGPKIEFVLRDAIGRDWQCGTLQVDLNLPGRLGASFVDRDETRKY

SEQ ID NO: 188700 - protein, 303 aa, Unknown
  Bacterial polypetide isolated from the Sargasso Sea
NFDKPITGLDIAEKISKSLAKQATVISINDELKDLDHLIKNDSKVKIFTSKDAEGLDTIRHDTAHITAMAVQELFPGTQVTIGPVIENGFYYDFARKEPFTEDDLKKIEERMKEIVDRDVPTKREVWPRDKAISHFKKIGEFYKAEIIEDIPKDEDVSIYFHGDWHDLCRGPHLSSTGKIGKFFKLNKVSGAYWRGDSNNEMLQRIYGTSWASQKELDDYLERIEEAEKRDHRKLGKEMDLFHFREESPGAVFWHEKGWSLFQKLVNYMRAKQKVAGYKEINTPEILDRSLWEKSGHWDKFGE

SEQ ID NO: 188701 - protein, 230 aa, Unknown
  Bacterial polypetide isolated from the Sargasso Sea
LKDLDYLIDKDCSVKIFTSKNPEGLETIRHDTAHILAMAVQELFPGTQVTIGPVIENGFYYDFARKEPFTEDDLVKIENKMKEIVDRDEITKREVWERNKAIDHFKKKGEIYKSELIKAIPEKEDVSIYFHGDWHDLCRGPHLSSTGKIGKYFKLTKVSGAYWRGDSKNEMLQRIYGTSWATQKDLDEHLKRIEEAEKRDHRKLGREMDLFHFREESPGSVFWHERGWAL

SEQ ID NO: 188702 - protein, 143 aa, Unknown
  Bacterial polypetide isolated from the Sargasso Sea
MPIITLPDGNNINFTNKVTGLEVAEKISKSLAKQAMVISVDGELKDLNFLIENDCSVKIFTSKNPEGLETIRHDTAHILAMAVQELFPGTQVTIGPVIENGFYYDFARKEPFTEDDLVKIENKMKQIVDRNEITKREVWIETK

SEQ ID NO: 188703 - protein, 207 aa, Unknown
  Bacterial polypetide isolated from the Sargasso Sea
DEIWDKAENALLNASKATGIPFDVNSGDGAFYGPKLDFYLHDAIGRKWQCGTLQVDFNMPGRLGANYIGEDNEKHTPVMLHRAILGSLERFTGILIEHYEGRFPVWLAPIQVVVATITSKADKYAHKIEEKFIEKGIRVILDSRNEKINYKVREHSVNKIPFIFVVGVNEMNDGTVAIRKLGSDKQEILSIQDSVDLILKETAAPDS

SEQ ID NO: 188704 - protein, 213 aa, Unknown
  Bacterial polypetide isolated from the Sargasso Sea
GELKDLYSTIDKDSSIKIFTAKDPEGLEVIRHDTAHIMAMAVQELFPGTQVTIGPVIENGFYYDFARKEPFTSDDLKKIENKMSEIIDKDVKTRREIWERDKAISHFKKIGEKYKAEIIESIPKNEMLTVYHHGDTWHDLCRGPHLESSSKIGKAFKLTKVSGAYWRGDSNNEMLQRIYGTSWANQKDLDLYLQRIEEAEKRDHRKIGKEMDL

SEQ ID NO: 188705 - protein, 160 aa, Unknown
  Bacterial polypetide isolated from the Sargasso Sea
GRLWQCSTIQLDFNLPERFDMRYVGSDGKQYHPIMIHRALLGSVERFFGILVEHFAGKFPLWLAPVQVCVIPINQKQHDYAESVYKILKKNGLRAEIDLRNEKIGSKIRDHTLNKVPYMIVLGDREVCDEEITIRTQKGDDLGNMKVESFLKRLSEEISN

SEQ ID NO: 188706 - protein, 251 aa, Unknown
  Bacterial polypetide isolated from the Sargasso Sea
EILKFLEFLEEVYEDFGFKKPTYYLSLRPENRTGDDEMWDYSESIMKNILENSNMDFSVQAGEGAFYGPKIDITVPDALGREWQLGTVQLDFFASGKFGLNYINQDGEKEDVVLIHRAIFGSLERFFGILIEHFGGSFPLWLAPEQYIVIPISEDHYEDCKTIEKSLSLMGLRGKVDLSSDRFNNKIRKAQKMKIPLMIIIGNNEVENSSLTIRLRNGENLNDVKIKTLEKILKTNIKINDDEGIKLAFIK

SEQ ID NO: 188707 - protein, 266 aa, Unknown
  Bacterial polypetide isolated from the Sargasso Sea
SVYHHGDTWHDLCRGPHLTSSSKIGKAFKLTKVSGAYWRGDSNNEMLQRIYGTSWASKKDLDEYLKRIEEAEKRDHRKLGKEMDLFHFREESPGSVFWHEKGWSLFQKLINYMRARQDAAGYREVNTPEVLDRLLWEKSGHWEKYGENMYTSETPDEKVFAIKPMNCPGHIQVFNQGLKSYRDLPLRITEFGKVHRYEPSGALHGLLRVRAFTQDDAHIFCTEDQITSECLIVTNLILDIYKDLGFENVVLKYADRPEVRVGDDKV

SEQ ID NO: 188708 - protein, 228 aa, Unknown
  Bacterial polypetide isolated from the Sargasso Sea
MTNTIKITFPDGNTKNVNKAISGLEIAESISKSLAKESIAIKINNEIVDLSRKIEEDSKVEIIKKNDDEALNLIRHDCAHVMAEAVQTLFPNTQVTIGPAIENGFYYDFAKEAPFTTSDLEKIEKKMHEIISKGENFTREVWEKKDAIDFFNNKGEKYKTELIKELPNDETISIYKQGDWLDLCKGPHMPSTKHVGKAFKLMKVAGAYWRGDSSNAMLTRIYGTAWRN

SEQ ID NO: 188709 - protein, 311 aa, Unknown
  Bacterial polypetide isolated from the Sargasso Sea
KLMKVAGAYWRGDSKNAMLTRIYGTAWRNEKELETHLLQIEEAEKRDHRKLGKEMDLFHFQEEAPGAVFWHPKGWRLFQSLINYMRKRQDKAGYVETNTPDMMDKSLWETSGHWDKFSEMMFRTEAKDEKIYAIKPMNCPGAVEIFKQGLKSYRDLPFLLSEFGKVHRYEPSGALHGLMRVRAFTQDDAHIFCTEDQITQESKTVCDLILSIYKDFGFDNVRIKFSDRPEKRVGDDSVWDKAEAALMQAMEATGLEYTLNPGEGAFYGPKLEFVLRDAIGRDWQCGTLQVDLNLPGRLGASYVAEDGQKKV

SEQ ID NO: 188710 - protein, 297 aa, Unknown
  Bacterial polypetide isolated from the Sargasso Sea
HRKIGKEMDLFHFREESPGSVFWHEKGWLLFQRLVEYMRMKQRLAGYKEINTPELLDKSLWEKSGHWEKFGNHMFTSETPDEKTFAVKPMNCPGCVQVFNQGLKSYRDLPLKLSEFGKVHRYEPSGALHGLLRVRAFTQDDAHIFCTEDQITEESLSVTNLILEIYKDLGFKDVILKYSDRPEQRVGDDSIWDKSEAALLTAIKKSKLEYTINKGEGAFYGPKIEFVLRDAIGRDWQCGTLQVDLNLPGRLGASYVAKDGNKKIPVMLHRALFGSLERFIGILIENMLVSCLSGCLR

SEQ ID NO: 188711 - protein, 296 aa, Unknown
  Bacterial polypetide isolated from the Sargasso Sea
IDNGFYYDFLRKEPFTEEDLRKIEKKMLEIVDRDEPTRREVWKRDKAVEHFKKAGEIYKAEIIKDIPEEEEVSVYFHGKWHDLCRGPHLMSTGRIGKYFKLMKVSGAYWRGDSNNEMLQRIYGTSWPSKKELDDYLNRIEEAEKRDHRKLGKEMDLFHFREESPGSVFWHEKGWNLFQKLISYMRAKQDEAGYKEINTPEILDRSLWEKSGHWEKFGANMYTSTTPDEKIFAIKPMNCPGCVQVFNQGLKSYRDLPLKMSEFGKVHRYEPSGALHGLLRVRAFTQDDAHIFCSEDQ

SEQ ID NO: 188712 - protein, 283 aa, Unknown
  Bacterial polypetide isolated from the Sargasso Sea
VIDNGFYYDFAREEPFTHDDLQKIEKKMKEIIERDEPTHREIWERDKAIEHFKKAGEIYKAEIIKSIPKEEEVSIYFHGKWHDLCRGPHLLSTGRIGKYFKLTKVAGAYWRGDSNNEMLQRIYGTSWSSQKDLDEYLKRMEEAEKRDHRKLGKEMDLFHFREESPGSVFWHEKGWNLFQKLISFMRSKQDAAGYKEINTPEVLDRTLWEKSGHWEKFGENMYTSTTPDEKIFAIKPMNCPGCVQVFNQGLKSYRDLPLKMSEFGKVHRYEPSGALHGLLRVRA

SEQ ID NO: 188713 - protein, 114 aa, Unknown
  Bacterial polypetide isolated from the Sargasso Sea
MCAGPHVESTGKLDQKAFDLESVSGAYWRGDETKPMLQRIYGTAWENAEQLQAYNDFKAEAKRRDHRTIGQDLSLFSLQQDNAGGGLVFWHPKGAYMRHMIETYWKDLHLARGY

SEQ ID NO: 188714 - protein, 315 aa, Unknown
  Bacterial polypetide isolated from the Sargasso Sea
KEGLETIRHDTAHILQMAVQELFPGTQVTIGPVIEDGFYYDFARKEPFTDEDLNKIENKMREIVERDEQTTREVWPRKKAIDHFKKIGEIYKAEIIKNIPEEEEVSIYFHGKWHDLCRGPHLTSTGKIGKYFKLTKVSGAYWRGDSKNEMLQRVYGTSWSTQKELDDYLEKIEEAEKRDHRKLGKLMNLFHFREESPGAVFWHEKGWALFQKLISYMRYKQEDAGYKEINTPEILDRSLWEKSGHWEKFGANMYTSETPDKKIFAIKPMNCPGCVQVFNQGLKSYRDLPFKMSEFGKVHRYEPSGALHGLLRVRA

SEQ ID NO: 188715 - protein, 310 aa, Unknown
  Bacterial polypetide isolated from the Sargasso Sea
ELPDNSSVSIITIQSDEGLEIMRHTLTAQVLAKAIKNLYSDSKLAIGPTIENGFYYDVSTETPISVEDLPKIENEMKRILENKSNIIKSLHSEKDAKKMFKEKGETLKIEIIDDAEQTDNFQIYTNADEDFIDLCRGPHLPNLSFIGAFKLTKVSGAYWKGDSSNEMLTRIYGTAWRNEKELQEHLKSIEEAEKRDHRKIGKDMDLFHFQDEAPGMVFWHPKGWTIYSTLKSYMSDMQKKADYKEINTPSVIDRKLWEKSGHWDKYRENMFITEIDEEHANEKRVNALKPMNCPGHVQVYNHGIRSYKEL

SEQ ID NO: 188716 - protein, 303 aa, Unknown
  Bacterial polypetide isolated from the Sargasso Sea
YIPAKDKEGLETIRHDTAHVLAMAVQEIFPKTQVTIGPVIDNGFYYDFARKDPFTEEDLRKIEKKMMEIVERDEPTHREVWKRDKAIEHFKKAGEIYKAEIIKDIPKEEEVSVYFHGKWHDLCRGPHLSSTGKIGKYFKLTKVSGAYWRGDSKNEMLQRIYGTSWPSQKELDNYLKMIEEAEKRDHRKLGKEMDLFHFREESPGSVFWHERGWNLFQKLIDYMRLRQKKAGYKEINTPEILDRGLWEKSGHWEKFGEHMYTSTTPDEKIFAIKPMNCPGCVQVFNQGLKSYRDLPLKMSEFGK

SEQ ID NO: 188717 - protein, 258 aa, Unknown
  Bacterial polypetide isolated from the Sargasso Sea
YLVFLEEAKKRYHRKIAKEMELFHMQEEAPGMVFWHPNGWRIYQILQNYMQKELERGGYSEVKTPQVVGRKLWEDSGHWDKFQEHMFIVEVEEEGIKEKKINALKPMNCPCHIQIYNQGIKSYRDLPLRIAEFGSCHRYEPSGAMHGIMRVRGFVQDDAHIFCTEEQIEDETKKFIELLSKVYQDLGFKEYKIKFSDRPEKRAGSDETWLKAEEALKNATNAAGYSFELNPGEGAFYGPKLEFVLTDAIGRDWQCGTL

SEQ ID NO: 188718 - protein, 253 aa, Unknown
  Bacterial polypetide isolated from the Sargasso Sea
QAYDTFAARGESYKMEILEQNVAKDDQPGLYHHEEYIDMCRGPHVPNMRFCQHFKIMKVAGAYWRGDSKNKMLQRIYGTAWADKKQLGAYLTRLEEAEKRDHRKIGKALDLFHWQEEAPGMVFWHNDGWTIYTELEKYIREKLRSFDYDEVKGPLMMDRSLWEKSGHWDKYSSAMFTTESEKREYAIKPMNCPGHVQIFNQGLKSYRDLPLRMAEFGCCHRNEPSGSLHGLMRVRGFTQDDAHIFCTEEQIEA

SEQ ID NO: 188719 - protein, 261 aa, Unknown
  Bacterial polypetide isolated from the Sargasso Sea
TKSVPLGSTSQHIADLIGPGLARAVVVAKIDGELKDLNFPIEGDCSIELFTGDTPEGHDTLLHSTAHLMAQAVKELYPNAKVTIGPTIENGFYYDFDVDVSFSDEVLAKIESKMRELAKAGQEIHRHEISAGDAKALFNDMGEDYKVEIIEQINPDDVITAYKQSDFTDLCRGPHVSNTSKIKHFKLLSTSGAYWRGNENNKMLQRIYGTVFSTKDALKTHLHNLEEAKKRDHRKLGKELKLFAFDDEVGPSLPLWCQMVL

SEQ ID NO: 188720 - protein, 279 aa, Unknown
  Bacterial polypetide isolated from the Sargasso Sea
MLQRIYGTSWSTQKQLDDYLNRIEEAEKRDHRKLGREMNLFHFREESPGSVFWHEKGWNLFQKLISYMRKKQDESGYKEINTPEILDRSLWEKSGHWEKFGANMYTSTTPDEKVFAIKPMNCPGCVQVFNQGLKSYRDLPLKMSEFGKVHRYEPSGALHGLLRVRAFTQDDAHIFCSEEQITEECLNVTNLILEIYKDLGFENVILKYSDRPDVRVGDDKVWDKSEKALLEAIKTSKLEYSINKGEGAFYGPKIEFVLRDAIGRDWQCGTLQVDLNLPG

SEQ ID NO: 188721 - protein, 307 aa, Unknown
  Bacterial polypetide isolated from the Sargasso Sea
PDGEVIALYHHEEYIDMCRGPHVTNMRHLKAFKLTKTSGAYWKGDSKNEMLQRVYGTAWPDSKDLDNYILQQEEAEKRDHRKLGRQLDLFHFQEEAPGMVFWHPKGWSIYSALKNFIKEKQDEYNYQEINTPQIVDRKLWEASGHWDKYRENMFITEIDEEHANEKRTNALKPMNCPCHVQVFNQGLRSYKDLPIRFSEFGSCHRYEASGTLHGLMRVRGFTQDDGHIFCTEDQIQDETKNFIELLSDIYSQLGFEAFEIKLSTRPEVRAGTDEIWDKAELALEKAIKNLKLPYELVEGDGAFYVLN

SEQ ID NO: 188722 - protein, 226 aa, Unknown
  Bacterial polypetide isolated from the Sargasso Sea
MPNITLPDGKKLSFKNKVTGLEVAEKISKSLSKQALIMSVNGELKDLSFSIQKDSSVKIITNKDKEGLDVIRHDAAHIMAMAVQELFPGTQVTIGPVIENGFYYDFVRKEPFTSDDLKKIEKKMSEIIDRDVKTKREVWERNKAIAHFKKIGEKYKAEIIESIPENEELSVYHHGDTWHDLCRGPHLDSSKKIGKAFKLTKVSGAYWRGDSNNEMLQRIYGTCWSS

SEQ ID NO: 188723 - protein, 311 aa, Unknown
  Bacterial polypetide isolated from the Sargasso Sea
MAEKISKSLSKQALIVSVDGQLRDLDFKIKKDSAVKIFTSKDKEGLETIRHDTAHILAMAVQELFPGTQVTIGPVIEDGFYYDFARKEPFTKEDLEKIENKMKEIVDRNEKTHREVWKRNDAIEHFKKNGEIYKAEIINSIPEDEEVSVYFHGKWHDLCRGPHLSSTGKIGKFFKLTKVSGAYWRGDSNNEMLQRIYGTSWSTQKELDDYLFRIEEAEKRDHRKLGKEMDLFHFREESPGSVFWHEKGWKLFQKLVSYMRMKQDQAGYREINTPEILDRTLWGKIWSLGKSLEQICTLQLHLTKRYLQLSP

SEQ ID NO: 188724 - protein, 280 aa, Unknown
  Bacterial polypetide isolated from the Sargasso Sea
PLKLSEFGKVHRYEPSGALHGLLRVRAFTQDDAHIFCTEDQITEESLAVTNLILEIYKDLGFENVILKYSDRPQQRVGEDKIWDKSEAALLTAIKKSKLEYTVNKGEGAFYGPKIEFVLRDAIGRDWQCGTLQVDLNLPGRLGATYVAKDGTKKVPVMLHRALFGSLERFIGILIENYAGKLPFWLSPAQAVVCSITDENNKYVKKLFEDLFKEGIKCEMDLRNEKINYKIREHSLAKIPYIIVCGKKEVSENTVTVRKLGSDKQETIKKEKLIKNMLDL

SEQ ID NO: 188725 - protein, 262 aa, Unknown
  Bacterial polypetide isolated from the Sargasso Sea
MYTSKTPDEKIFAIKPMNCPGCVQVYNQGLKSYRDLPLKMSEFGKVHRYEPSGALHGLLRVRAFTQDDAHIFCTEDQITDECLLVTNLILEIYKDLGFENVILKYSDRPEVRVGNDDVWDKSESALLKAVKASKLEYSINKGEGAFYGPKIEFVLRDAIGRDWQCGTLQVDLNLPERLGASFVDKDGTKKIPVMLHRALFGSLERFIGILIENYSGKLPFWIAPLQAMVIPVSEEFDSYAKEVNKKINNIGINSEVDLKNHN

SEQ ID NO: 188726 - protein, 178 aa, Unknown
  Bacterial polypetide isolated from the Sargasso Sea
FFYGPKIEFVLRDAFGRDWQCGTLQVDLNLPERLGATFVDKDGSKKVPVMLHRALFGSLERFIGILIEHYSGKLPFWIAPLQAMVIPVSDDFNDYAIEVTKKIKDVGINCEADLKNHNLNYKIREHSMLKTPLLLICGKKEVDSGTVTIRRLDSNKQESMELNTFLKKFATLNKAPSN

SEQ ID NO: 188727 - protein, 231 aa, Unknown
  Bacterial polypetide isolated from the Sargasso Sea
IYKDLGFENVILKYADRPEVRVGEDEVWDKAEASLLEAVKASKLEYSINKGEGAFYGPKIEFVLRDAIGRDWQCGTLQVDLNLPERLGASYIDKDGTKKIPVMLHRALFGSLERFIGILIENYSGKFPFWISPLQTMVIPISEEFNDYAIEISQKIKNVGISSSVDLKNQNLNYKIRDHSLAKIPLLLICGKKEVDSNSVTIRRLDSNKQENMDIDAFLKTFSALNKASSN

SEQ ID NO: 188728 - protein, 190 aa, Unknown
  Bacterial polypetide isolated from the Sargasso Sea
MPNITLPDGKKLDFVESITGLKIAEKISKSLLKEALVMSVNGELKDLEHQITKDSSVKIFTSKDKEGLETIRHDTAHVLAMAVQELFPGTQVTIGPVIQDGFYYDFSRKETFTNQDLEKIEKKMKEIVDRDEKTYREVWKRSYAIEHFKKKGEIYKAEIINNIPEQEEVSIYFHGKWHDLCRGPHLNFTG

SEQ ID NO: 188729 - protein, 167 aa, Unknown
  Bacterial polypetide isolated from the Sargasso Sea
MPIITLPDGNNLNFPKKVTGLEIAEKISKSLAKQAMIIGVDGELKDLDFIIDKDCSVKIFTSKNEEGLETIRHDTAHILAMAVQEIFPGTQVTIGPVIENGFYYDFARKEPFTEDDLKKIEVKMKEIIDRDEKTKREVWDRDKAVRHFEKKGELYKAELIKSIPKNE

SEQ ID NO: 188730 - protein, 286 aa, Unknown
  Bacterial polypetide isolated from the Sargasso Sea
GHWDYYRENMYTSEVEEREFAIKPMNCPGCMLYYSSSQYSYRQLPLKVAEIGHVHRHEMSGALSGLFRVRSFHQDDAHIFMEADQIKDQILGVLKLADTVYSTFGLSYHLELSTRPDKAIGTDEMWELATNGLRSALEALEADTGRGYKLNEGDGAFYGPKIDFHIRDAIGRTWQCGTIQLDMFLPERFDLLYDGRDGGKHRPIMIHRAIYGSIERFMGILIEHYSGRFPLWMSPVQIAFLSVADRHADEAHKIAKRFVSAGFRTHVDDSSESIPKKVRNAQSARR

SEQ ID NO: 188731 - protein, 271 aa, Unknown
  Bacterial polypetide isolated from the Sargasso Sea
NCPCHIQVFNQGLKSYKDLPIRLAEFGSCHRNEPSGALHGLMRVRNFTQDDAHIFCTEEQIQEEVSIFIDLVFEVYKTFGFNEIIIKLSTRPEKRVGSEEIWDKSEEALTKALDNKNLKWELQPGEGAFYGPKIEFSLKDCLNRVWQCGTIQVDFSMPIRLDATYVDIDNEKRNPVMLHRAILGSFERFIGILIEQYEAKFPIWLAPYQIILLSITDRNIEKCLKFNELINNNGYRSKVDIRNEKIGYKIREATLGRVPLIAVIGDKEEEI

SEQ ID NO: 188732 - protein, 283 aa, Unknown
  Bacterial polypetide isolated from the Sargasso Sea
GDTSNEQLQRIYGTAWGNKKDLKTYLHRLEEAEKRDHRKIGKKLGLFHMQEEAPGMVFWHPDGWSLYQEVEQYMRAKQHQHGYQEIKTPQVVSRTLWEKSGHWDKFKDGMFTTESEKHDYAIKPMNCPCHVQVFNQGLKSYKDLPLRLAEFGSCHRNEASGALHGLMRVRGFTQDDAHIFCEEDAIQQEVSAFIEMLHEVYADFGFNEILYKLSTRPEKRVGSDEVWDKAEAALEEALNREGVDWELLPGEGAFYGPKIEFLLKIVSVGCGSVVPFRSISQCR

SEQ ID NO: 188733 - protein, 271 aa, Unknown
  Bacterial polypetide isolated from the Sargasso Sea
CCLVSNISVNIKGLGIQNLHKGITPLQIMVDIKEVSKDSIICKVDGELTDLSAQLLNDCDLQFMDAKSKDGHSVLLHSTAHLMAQAVKRLFPETKVTIGPFLENKFYYDFDVKTPFSEEDLKRIEEEMYNISNENLDIIHEEKSRDEALKFFDQIGEDYKVEIINDLDKNEILKVYSQGEFTDLCRGPHIPSTGVIKHFKLLSSSAAYWRGDEKNQTLQRVYGTSFQNSKDLKKYLLMLEEQKKRDHRKIGKELDLFFFDDEIGPGLPLWT

SEQ ID NO: 188734 - protein, 308 aa, Unknown
  Bacterial polypetide isolated from the Sargasso Sea
NDSSIKIFTSKDREGLETIRHDTAHVLAMAVQELFPKTQVTIGPVIENGFYYDFARKDPFTEEDLIKIENKMLEIIERDEPTHREVWKRDKAIEHFKKSGEIYKAEIIKDIPKEEEVSVYFHGKWHDLCRGPHLSSTGKIGKYFKLTKVAGAYWRGDSNNEMLQRIYGTSWPSQKELDNYLKQIEEAEKRDHRKLGKEMDLFHFREESPGSVFWHEKGWKLFQKLVSYMRVKQDRAGYKEINTPEVLDRALWEKSGHWEKYGEHMYTSQTPDEKVFAIKPMNCPGHVQVFNQGLKSYRDLPLRISEFG

SEQ ID NO: 188735 - protein, 212 aa, Unknown
  Bacterial polypetide isolated from the Sargasso Sea
VRVGDDKVWDKFEAALLEAVKATKLEYSINKGEGAFYGPKIEFVLRDAIGRDWQCGTLQVDLNLPERLGASYVDKDGSKKVPVMLHRALFGSLERFIGILIENYAGKLPFWISPLQVVVIPVSDDFDDYAKKVSNEINDKGINCIVDLKNHNLNYKIREHSLSKIPVLLICGKKEVDSNSVTIRKLDNNKQENMKLDKFLEQYTALSQAPSN

SEQ ID NO: 188736 - protein, 300 aa, Unknown
  Bacterial polypetide isolated from the Sargasso Sea
EAKDDKIYAIKPMNCPGAVEIFKQGLKSYRDLPFLLSEFGKVHRYEPSGALHGLMRVRAFTQDDAHIFCTEDQITQESKTVCDLILSIYKDFGFDNVRIKFSDRPEKRVGEDSIWDKAEAALMQAMEATGLEYTLNPGEGAFYGPKLEFVLRDAIGRDWQCGTLQVDLNLPGRLGANYIGEDGNKKIPVMLHRALFGSLERFTGILIEHYAGHLPFWLSPLQAVVATITSDTDEYAYEVQKALVSEGIRTEIDTRNEKIGYKIREHSNSKVPAIIAVGKKEAQDKTVSVRRIGSSETKTF

SEQ ID NO: 188737 - protein, 291 aa, Unknown
  Bacterial polypetide isolated from the Sargasso Sea
LEKFGDNMFTTESREERVYALKPMNCPGCVQVYKQGLKSYRDLPLRVAEFGKVHRYEPSGALHGLMRVRAFTQDDAHIFCTEDQITEESKKVCDLVLSIYKDFGFEDVSIKFSDRPEKRVGSDEIWDKSEKALKTAMEATGLEYSLNPGEGAFYGPKLEFILRDAIGREWQCGTLQVDLNLPERLGGNYIAEDGLKHNPVMLHRALFGSLERFTGILLEHYSGNLPLWLAPVQAIVAPITSDIDDYAIEVKNELKKSNIRIDTDLRNEKISYKIRENSLKKIPYMLILGKK

SEQ ID NO: 188738 - protein, 288 aa, Unknown
  Bacterial polypetide isolated from the Sargasso Sea
WEASGHWEKYQENMFIVEVDEEHAREKAVNALKPMNCPCHVQVYNQGLKSYRDLPLRMAEFGSCNRYEPSGALHGVMRVRGFTQDDAHIFCREDQIESETKKFINFLSDVYRDLGFEKFSIKFSDRPEKRSGSNKVWDKAEDALKSATIAAGYDFEINPGEGAFYGPKLEFVLTDAIGRDWQCGTLQVDFVLPDRLDANYVGEDGNKHRPVMLHRACLGSFERFIGILIESFAGRLPFWLAPRQVVVAAIVSDASDYCENVVNALRAKGIRAEVDLRNEKINYKVREH

SEQ ID NO: 188739 - protein, 289 aa, Unknown
  Bacterial polypetide isolated from the Sargasso Sea
VAAQVLARAIKNLYPKAKLAIGPTIENGFYYDFLSDERVSIDDLPKIEKEMEKIVAEKSDITKTIHSKKEAIKNFANIKEDYKVKIIEDSEQEDNFQLYNQGDTGFIDLCRGPHLPSLDKVGAFKLTKIAGAYWKGDSQNEMLSRIYGTAWKNEKDQKKYLTLLEEAEKRDHRKLAKEMDLFHLQEEAPGMVFWHAKGWSIYVALQNYIRNKQIANGYEEINTPLVVDRKLWEASGHWDKYRENMFITEIDEEHANEKRVNALKPMNCPCHVQVYNQGLKSYKDLPVRL

SEQ ID NO: 188740 - protein, 229 aa, Unknown
  Bacterial polypetide isolated from the Sargasso Sea
EKQPMLQRIYGTAWASKKDLEDYLERLVEAEKRDHRRLAAELDLVSWPEDLGPGLAVWHPKGSLIRKVIEDYSRNRHENGGYNFVFSPHIAKSVLWETSGHLDFYADGMYPPMEMDGATYYPKPMNCPFHVMVYKSSQRSYRDLPTRYFELGTVYRYELSGAVHGLLRSRGFTQDDSHIFCTREQVPAELSSLLAFCLSLLRDFGFTDFQAKLSTRPPDKSVGDDELWD

SEQ ID NO: 188741 - protein, 158 aa, Unknown
  Bacterial polypetide isolated from the Sargasso Sea
MPIITLPDGSKKVFEKSVTILEIAQSIGAGLAKATIAGKVNDVLLDATIPINKDSKVVIITSKDKEGIEIIRHSFAHLIGHAVKQIYSDIKMAIGPVIEDGFYYDIFSKYRFTPEDLIKIENRINKLIKTNYEVEILQVSKEEAIKTFKERGMRLLNY

SEQ ID NO: 188742 - protein, 305 aa, Unknown
  Bacterial polypetide isolated from the Sargasso Sea
ISKSLSKQALLISVDGELKDLNHSIYKDSSIKIFTSKDKEGLETIRHDTAHILAMAVQELFPGTQVTIGPVIEDGFYYDFARKEPFTTEDLEKIENKMKEIVDRDEKTYREVWKRNDAIEHFKKKGEIYKAEIIESIPEGEDVSLYFHGDWHDLCRGPHLSSTGKIGKHFKLTKVSGAYWRGDSNNEMLQRVYGTSWSTQKELDDYLNRIEEAEKRDHRKIGKEMDLFHFREESPGSVFWHQKGWSLFQKLISYMRMKQETAGYQEINTPEILDRSLWEKSGHWEKFGANMYTSTTPDEKVFAIK

SEQ ID NO: 188743 - protein, 246 aa, Unknown
  Bacterial polypetide isolated from the Sargasso Sea
IFCTEDQIQPEVSSFIEFLHLVYADFGFNEVIYRLSTRPTKRVGSDLDWDKAEKALAEALDNHNLPWQELPGEGAFYGPKIEFSLKDCIGRIWQLGTIQVDFSMPGRLDAQYVSENGVRKTPVMLHRAVLGSFERFIGILIENYEGAFPTWLSPVQAVVLNITDKYAEYAQKVERVLKNKDFRAISDLRNEKIGFKIREHTLRKVPYQLVVGEKEMESQKISVRRRNGEDLGLMDLESFVSLLEKD

SEQ ID NO: 188744 - protein, 163 aa, Unknown
  Bacterial polypetide isolated from the Sargasso Sea
IGRDWQCGTLQVDFVLPERLDANYIASDGAKKRPVMLHRAILGSMERWIGILIEQYAGRFPIWLAPVQAVITTITGDNDVYAYRVLEECKKVGLRAAVDVRNEKINYKIREHSNAKIPVILVVGTKEQENETVAVRRLGGKSQEILALDDAVNTLLKESTPPS

SEQ ID NO: 188745 - protein, 295 aa, Unknown
  Bacterial polypetide isolated from the Sargasso Sea
MPNIKLPDGNTLAFDKKVTGLKIAEKISKSLSKQALVISVDGNLRDLNFEIENDCSVKIYTSKDKEGIEIIRHDTAHVLAMAVQELFPGTQVTIGPVIENGFYYDFARKETFTEEDLQKIEKKMKEIVERDEQTHREVWERDKAIEHFKKAGEIYKAEIIKSIPKGEEVSIYFHGKWHDLCRGPHLTSTGKIGKYFKLMKVAGAYWRGDSKNEMLQRIYGTAWPSQKELDEYLKRIDEAEKRDHRKLGKEMDLFHFREESPGSVFWHEKGWSLFQKLIDYMRNKQKQAGYKEINT

SEQ ID NO: 188746 - protein, 294 aa, Unknown
  Bacterial polypetide isolated from the Sargasso Sea
EITGDSKVRIITPKDSEGLEVIRHDAAHIMAMAVQELFPGTQVTIGPVIENGFYYDFARKEPFTRDDLKKIEKKMSEIIDRDVKTKREVWERGKAIAHFKKIGEKYKAEIIESIPNDEELSIYHHGDTWHDLCRGPHLTSSGKIGKAFKLTKVSGAYWRGDSNNEMLQRIYGTCWSSKKELDEYLNRLEEAEKRDHRKLGREMDLFHFREESPGSVFWHEKGWLLFQRLVEYMRMKQRLAGYKEINTPELLDKTLWEKSGHWEKFGEHMFTSDTPDEKTFAVKPMNCPRMCSNF

SEQ ID NO: 188747 - protein, 171 aa, Unknown
  Bacterial polypetide isolated from the Sargasso Sea
MPNITLPDGKKLKFQTEITGLDIAKKISKSLLKEALIISVNGELKDLSFEIKKDSSVKIITSKDKEGLEVIRHDAAHIMAMSVQELFPGTQVTIGPVIENGFYYDFAREQPFTSDDLKKIEKRMSEIIDRNVKTKREVWQREDAIKHFKKIGETYKAEIIKSIPKNEELSI

SEQ ID NO: 188748 - protein, 154 aa, Unknown
  Bacterial polypetide isolated from the Sargasso Sea
MPNIKLPDGKSLNFKDKVTGFQIAEKISKSLSKQALIISVDGNLKDLNYEINKDCSVKIHTSKDKEGLETIRHDTAHILAMAVQELFPGTQVTIGPVIDDGFYYDFARKEPFTEEDLRKIEKKMLEIVERDEPTHREVWKRDEAVDHFKKVGEI

SEQ ID NO: 188749 - protein, 200 aa, Unknown
  Bacterial polypetide isolated from the Sargasso Sea
MDTNSDLYKIRHSLAHVLAQAVLEIRPDAKLGFGPPVDNGFYYDFDLKEPLTPEDLPKLEKRMRHIIKLGQVFEREELVQKEMVELLIKRDQHYKIEQVEDLVAQNEIISLYRNGPFWDLCEGPHVKSTSEIPKNCFSLDSLAGAYWKGSEKNSMMQRVYGLAFETGEKLKEYKDKRSLAMERDHRKLNSKLHYYTISEE

SEQ ID NO: 188750 - protein, 255 aa, Unknown
  Bacterial polypetide isolated from the Sargasso Sea
VEFCSLLQSIYADFGFDDVRVKFSDRPEVRAGDDATWDRAEAALTDATKAAKLETVLNPGEGAFYGPKLEFVLRDAIGRDWQCGTLQVDFVLPDRLDAEYVGEDGNRHRPVMLHRAILGSMERWIGILIEQYAGRFPPWLAPVQIVVASITDQANDYACEIADAAADLGLRVEKDLRNEKISYKVREHSVMKVPFILAVGGREAEAGTVALRRLGSKEQRVIDTNEALAMLRAESLAPDMTDERQAELKNTQCDN

SEQ ID NO: 188751 - protein, 304 aa, Unknown
  Bacterial polypetide isolated from the Sargasso Sea
ITKKEIWNREKAIEHFKKKGEIYKAELIESIPQGEEVSIYFHGKWHDLCRGPHLSSTGKIGKYFKLMKVSGAYWRGDSNNEMLQRIYGTSWSSQKELDAYLKRIEEAEKRDHRKLGKEMDLFHFREESPGSVFWHEKGWTLFQKLISYMRKKQDQAGYGEINTPEMLDRSLWEKSGHWEKFGENMYTSTTPDEKVFAIKPMNCPGCVQVFNQGLKSYRDLPLKMSEFGKVHRYEPSGALHGLLRVRAFTQDDAHIFCTEQQITEECLSVTNLILEIYKDLGFENVILKYSDRPDVRVGEDSVWD

SEQ ID NO: 188752 - protein, 285 aa, Unknown
  Bacterial polypetide isolated from the Sargasso Sea
MPNITLPDGKKLGFKDRVTGLEVAAKISKSLSKQALIMSVDGDLKDLSYVISKDSKVRIITPKDKEGLDVIRHDAAHIMAMAVQELFPGTQVTIGPVIENGFYYDFARKEPFTKEDLKKIEKKMSEIIDRDVKTKREVWERDEAISHFKKIGEKYKAEIIESIPKNEELSVYHHGDTWHDLCRGPHLVSSGKIGKAFKLTKVSGAYWRGDSNNEMLQRIYGTCWSSKKELDDYLNRLEEAEKRDHRKLGKEMDLFHFREESPGAVFWHEKGWNLFQRLIEYMRLK

SEQ ID NO: 188753 - protein, 176 aa, Unknown
  Bacterial polypetide isolated from the Sargasso Sea
YGPKIEFVLRDAIGRDWQCGTLQVDLNLPNRLGASYVAKDGNKKVPVMLHRALFGSLERFIGILIENYAGKLPFWLSPAQAVVCPIAEENNDYVKKLFEDLFKEGIKCEMDLRNEKINYKVREHSLAKVPFIIVCGKKEVAENTVTVRKLGSDKQEIMRREDLIKNMLTSNKLPLN

SEQ ID NO: 188754 - protein, 139 aa, Unknown
  Bacterial polypetide isolated from the Sargasso Sea
AEDGQKKVPVMLHRALFGSLERFTGILIEHYAGHLPLWLSPLQIVVATITSDSDNYAFEIKDQLIKSGLVAEADIRNEKIGYKIREHSNAKVPVILAVGKKEADEQTVSVRRLGSQQTSTIKLDKLIKDLQKESLSPIN

SEQ ID NO: 188755 - protein, 165 aa, Unknown
  Bacterial polypetide isolated from the Sargasso Sea
AIGRDWQCGTLQFDLNLPGRLGATYVDKDGGKKVPVMLHRALFGSLERFIGILIEHYSGKLPFWISPLQTMIIPVSDEFNDYAKSVNSKIKRAGISSDVDLKSHNLNYKIREHSLSKLPILLICGKKEVDTNSVTIRRLDSNKQENMKLEKFIKNFSIINKAPSL

SEQ ID NO: 188756 - protein, 304 aa, Unknown
  Bacterial polypetide isolated from the Sargasso Sea
IKPMNCPGCVQIFNQGLKSYRDLPLKLSEFGKVHRYEPSGALHGLLRVRAFTQDDAHIFCTEDQITQESLAVTKLILDIYKDLGFENVILKYSDRPEKRVGDDSVWDKSEKALLTAIKQSKLQYTINKGEGAFYGPKIEFVLRDAIGRDWQCGTLQVDLNLPNRLGATFVDKDGSKKVPVMLHRALFGSLERFIGILIENYAGKLPFWLSPTQAVVCPIAEENNEYVKKLFEDLFKEGIKCEVDLRNEKINYKIREHSLAKIPVILVCGKKEVSEKTVTIRRLGSEKQETMKREELIKNLLNAN

SEQ ID NO: 188757 - protein, 239 aa, Unknown
  Bacterial polypetide isolated from the Sargasso Sea
LTVTNLILEIYKELGFEKVLLKYSDRPEVRVGDDAVWDKAEDALLKAIKETKLEYSINKGEGAFYGPKIEFVLRDAIGRDWQCGTLQVDLNLPNRLGASFVDKDGTKKVPVMIHRALFGSLERFIGILIEHYAGKLPFWISPLQAVIIPISDEFDDYAKKIFKLVSQSGINCEIDLKNHNLNYKIREHSLSKVPLLLICGKKEVDSDTITIRQLDSKKQETMKTEDFLKNYSYLNKAPL

SEQ ID NO: 188758 - protein, 162 aa, Unknown
  Bacterial polypetide isolated from the Sargasso Sea
MPTITLPDGNNLEFQNKVTGLEVAEKISKSLAKQAMVISVDGELKDLDFLIEKNCSVKIFTSKNKEGLETIRHDTAHILAMAVQEIFPGTQVTIGPVIENGFYYDFARKEPFTEDDLKKIEFKMKEIIDRDEKTKREVWDRDKAIKHFKKKGELYKAELIES

SEQ ID NO: 188759 - protein, 123 aa, Unknown
  Bacterial polypetide isolated from the Sargasso Sea
MPHITLPDGKKIKFNEKINGLDLAKQISRSLSKDASIMQVDGELKDLSHEIVKDSKVRIITVKDKEGLEVLRHDTAHILAMAVQELFPKTQVTIGPVIEDGFYYDFSRKEPFTENDLLKIEKK

SEQ ID NO: 188760 - protein, 308 aa, Unknown
  Bacterial polypetide isolated from the Sargasso Sea
KVEIIENSDQEENFQIYQQGETGFIDLCRGPHLTSLKQIGSFKLTKISGAYWRGDSKNQMLQRIYGTAWLNNKDLKKYLLRLEEAEKRDHRKLGKQMDLFHFQEEAPGAVFWHPKGWLLFQKLIDYMREKQVNAGYKEVNTPELMDRSLWEASGHWESFGENMFTSETRDGRNYAIKPMNCPGHVQVFKQGITSYRDLPYRLSEFGKVHRYEPSGSLHGMLRVRAFTQDDAHIFCTPEQITDETVAVCDLILDIYKDFGFEDVIIKYADRPDVRVGEDTVWDNAENALISALEKTGLKYEHNPGEGAF

SEQ ID NO: 188761 - protein, 299 aa, Unknown
  Bacterial polypetide isolated from the Sargasso Sea
RGPHLSSTGKIGKYFKLTKVSGAYWRGDSNNEMLQRVYGTSWSTQKELDDYLNRIEEAEKRDHRKIGKEMDLFHFREESPGSVFWHQKGWNLFQKLISYMRMKQETAGYQEINTPEILDRSLWEKSGHWEKFGANMYTSTTPDEKVFAIKPMNCPGCVQVFNQGLKSYRDLPLKMSEFGKVHRYEPSGALHGLLRVRAFTQDDAHIFCTEEQITQECLTVTNLILEIYKDLGFEDVILKYSDRPELRVGDDQVWDKSEAALLEAIKATKLEYSINKGEGAFYGPKIEFVLRDAIGRDWQ

SEQ ID NO: 188762 - protein, 298 aa, Unknown
  Bacterial polypetide isolated from the Sargasso Sea
GDSNNEMLQRIYGTSWATQKDLDEYLKRIEEAEKRDHRKLGKEMDLFHFREESPGSVFWHEKGWALFQKLINYMRSRQDAAGYKEVNTPEILDRQLWEKSGHWEKYGENMYTSETPDEKVFAIKPMNCPGHIQVFNQGLKSYRDLPLRIAEFGKVHRYEPSGALHGLLRVRAFTQDDAHIFCTEDQITSECLEVTNLILDIYKDLGFENVILKYADRPKVRVGDDKIWDKAEASLLEAVKASKLEYTINKGEGAFYGPKIEFVFRDAIGRDWACGTLQVDLNLPGRLDASYVDKDGTK

SEQ ID NO: 188763 - protein, 269 aa, Unknown
  Bacterial polypetide isolated from the Sargasso Sea
MVFWHQNGWSIYTSLQNFMRRKLDLSGYQEINTPEVVDRRLWEASGHWEKYRENMFIAEIDEEHANEKRTNALKPMSCPVHTQVFNHTLRSYKDLPMRFSEFGKCHRYEASGTMHGLMRVRAFTQDDGHIFCTDDQIENETKSFIELLSEIYHLLGFEDFQIKLSTRPNVRIGSDETWDKTEHALEEAIKKLGLPYDIEEGEGAFYGPKLDFVLKDAIGRLWQCGTFQLDFTLPSRLESEYVGEDGRKYPPVLIHRAILGSFERFLGIL

SEQ ID NO: 188764 - protein, 214 aa, Unknown
  Bacterial polypetide isolated from the Sargasso Sea
ATTPSWDLPPKGLMKALERKGWAYKIDEGGGAFYGPKIDLKMKDAIGRMWQCSTIQLDFNLPERFKLDYIAADGSKQRPIMIHRAIFGSLERFFGIMTENYAGDYPLWLAPEQVRLLPVTDEVQPYAESLLDQLTQTGVRATIDRSGDRLGKLIRTGEQMKIPVLAVIGAKEAEQNAVSLRSRRDGDLGVVAVADLLRAAQNANSQRAAGLKLN

SEQ ID NO: 188765 - protein, 257 aa, Unknown
  Bacterial polypetide isolated from the Sargasso Sea
AEKRDHRKLGNELNLFVNTDEIGPGQFLWKPKGSILRQNIEDYSKKAHADNGYEYAYTPHIGRSVLWETSGHLDYYREGMYPPFKNEDNEDDEYYLKPMNCPFHILIYKSDIRSYKELPLRFFELGSVYRYEKTGVLHGLLRARGFTQDDAHIFCTNDQIEDEILNLLTFSIKLLNAFGFDSIEADLSTRPEKSIGNDDDWVKATNSLASALDNQNISYVTAHREGAFYGPKIDLHVKDAIGRRWQLSTIQVDFSQP

SEQ ID NO: 188766 - protein, 198 aa, Unknown
  Bacterial polypetide isolated from the Sargasso Sea
MSEKIIITFPDGNKKEVDKGISGLELATQISKSLAKESVAIKINNEIKDISLPINNDASVAILKRDSEEALELIRHDCAHVMAEAVQELFPGTQVTIGPAIENGFYYDFARDEPFTVSDLPKIEKKMHDIIQRNKNFIREVWSKEETIKHFKDKGENYKVELINDLPDNEEISIYKQGDWLDLCRGLHMVSTKQIGKA

SEQ ID NO: 188767 - protein, 253 aa, Unknown
  Bacterial polypetide isolated from the Sargasso Sea
HIFCTENQITNESKKVCELILSIYKDFGFTDVHIKFSDRPKKRVGDDAIWDKAEAALKEAMEATGLEYTFNPGEGAFYGPKLEFVLRDAIGRDWQCGTLQVDLNLPERLGATYVAEDGQKKIPVMLHRALFGSLERFTGILIEHYAGHLPLWLSPKQIIIATITSDTNEYAKFVKKNLIDVGLRADIDLRNEKIGYKIREHSSAKIPVILAVGKKEEENKTVSLRRLGDTKTEIISLEDIIKNLQKESLSPIQ

SEQ ID NO: 188768 - protein, 257 aa, Unknown
  Bacterial polypetide isolated from the Sargasso Sea
TGEKFGEHMFTSETPDEKTFAIKPMNCPGCVQVFNQGLKSYRDLPLKLSEFGKVHRYEPSGALHGLLRVRAFTQDDAHIFCTEDQITQETLSVTNLILEIYKALGFENVILKYSDRPEKRVGEDSVWDKSEAALLSAIKKSKLEYTVNKGEGAFYGPKIEFVLRDAIGRDWQCGTLQVDLNLPNRLGATFVDKDGTKKVPVMLHRALFGSLERFIGILIENYAGKLPFWLSPSQAVVCTIAEENNEYVKKLFEDLFK

SEQ ID NO: 188769 - protein, 255 aa, Unknown
  Bacterial polypetide isolated from the Sargasso Sea
CIHSETPDEKVFAIKPMNCPGHVQVFNQGLKSYRDLPLRYAEFGKVHRYEPSGALHGLLRVRAFTQDDAHIFCSEDQITSECLIVTNLILDIYKDLGFENVILKYADRPEVRVGDDEVWDKAEASLLEAVKASKLEYSINKGEGAFYGPKIEFVLRDAICRDWQCGTLQVDLNLPERLGASYVDKDGTKKIPVMLHRALFGSLERFIGILIENYAGKFPFWISPLQTMVIPISEEFNDYAIEISKKIKNVGISSS

SEQ ID NO: 188770 - protein, 282 aa, Unknown
  Bacterial polypetide isolated from the Sargasso Sea
FKLTKVAGAYWRGDSKNEMLQRIYGTGWASQKDLEDYLKRVQEAERRDHRKLGKEMDLFHFREESPGSVFWHEKGWALFQKLINYMRARQDAAGYREVNTPEVLDRLLWEKSGHWEKYGENMYTSETPDEKVFAIKPMNCPGHIQVFNQGLKSYRDLPLRITEFGKVHRYEPSGALHGLLRVRAFTQDDAHIFCSEDQITSECLNVTNLILDIYKDLGFKNVVLKYADRPDIRVGEDDVWDKAEASLLEAVKASKLEYTINKGEGAFYGPKIEFVLRDAIGR

SEQ ID NO: 188771 - protein, 146 aa, Unknown
  Bacterial polypetide isolated from the Sargasso Sea
RLGASYVSKDGSKKVPVMLHRALFGSLERFIGILIENYAGKLPFWLSPAQAVVCPIAEENNNYVKKLFEDLFKEGIKCEMDLRNEKINYKVREHSLSKIPYIIVCGKKEVADNTVTVRKLGSDKQEIMKREDLIKNMLDLNKLPLN

SEQ ID NO: 188772 - protein, 250 aa, Unknown
  Bacterial polypetide isolated from the Sargasso Sea
IKIEKKMKEIVERDEITRREVWERKKAKDHYHKIGENYKVELVDSVPKDQEVSVYYHGEWYDLCRGPHLLSTGKIGKYFKLMKVAGAYWRGDSNNEMLQRIYGTSWPSQKELDDYLNRIEEAEKRDHRKLGKEMDLFHFREESPGSVFWHQKGWNLFQKLINYMRAKQDQAGYDEINTPEILDRSLWEKSGHWEKFGANMYTSTTPDEKIFAIKPMNCPGCVQVFNQGLKSYRDLPLKMSEFGKVHRYEP

SEQ ID NO: 188773 - protein, 261 aa, Unknown
  Bacterial polypetide isolated from the Sargasso Sea
SNQKELDEYLNMIEEAEKRDHRKLGKEMDLFHFREESPGSVFWHEKGWNLFQKLIAYMRSKQDDAGYKEINTPEILDRSLWEKSGHWEKFGANMYTSTTPDEKVFAIKPMNCPGCVQVFNQGLKSYRDLPLKMSEFGKVHRYEPSGALHGLLRVRAFTQDDAHIFCSEDQITEECLNVTNLILEIYKDLGFENVILKYSDRPDVRVGEDSVWDKSEKALLEAIKASKLEYSINKGEGAFYGPKIEFVLRDAIGRDWQCGTL

SEQ ID NO: 188774 - protein, 245 aa, Unknown
  Bacterial polypetide isolated from the Sargasso Sea
AGETYKAEIIKDIPKEEEVSIYFHGKWHDLCRGPHLSSTGKVGKFFKLLKVSGAYWRGDSNNEMLQRIYGTSWSTKRELDEYLKRIEEAEKRDHRKLGKEMDLFHFREESPGSVFWHEKGWSLFQKLIDYMRSKQKDAGYKEINTPEVLDRSLWEKSGHWEKFGEHMYTTTTPDEKVFAIKPMNCPGCVQVFNQGLKSYRDLPLKMSEFGKVHRYEPSGALHGLLRVRAFTQDDAHIFCTEDQIT

SEQ ID NO: 188775 - protein, 253 aa, Unknown
  Bacterial polypetide isolated from the Sargasso Sea
KSLSKNALIMSVDGVLKDLSYTIENDCSLKIFTSKDNEGLDAIRHDTTHIMAMAVQELFPGTKIAIGPAIKDGFYYDFSRKESFTLEDLEKIEKKMKEIVEKDEPTHREVWERKKAKDHYKKIGEKYKVELVDSIPENEEVSVYYHGKWYDLCRGPHLTSTGKVGKHFKLTKVSGAYWRGDSNNEMLQRIYGTSWPSQKELDEYLKRIEEAEKRDHRKLGKEMDLFHFREESPGSVFWHEKGWNLFQKLVSYM

SEQ ID NO: 188776 - protein, 297 aa, Unknown
  Bacterial polypetide isolated from the Sargasso Sea
DTAHILAMAVQELFPGTQVTIGPVIENGFYYDFARKEPFTEDDLVKIENKMKEIVDRNEITKREVWDRNKAISHFKKKGEIYKAELIEAIPENEDVSIYFHGEWHDLCRGPHLSSTGKIGKYFKLTKVSGAYWRGDSNNEMLQRIYGTSWATQKDLDEYLKRIEEAEKRDHRKLGREMDLFHFREESPGSVFWHERGWGLFQKLINYMRSRQDAAGYKEVNTPEVLDRQLWEKSGHWEKYGENMYTSETPDEKVFAIKPMNCPGHIQVFNQGLKSYRDLPLRFAEFGKVHRYEPSGA

SEQ ID NO: 188777 - protein, 286 aa, Unknown
  Bacterial polypetide isolated from the Sargasso Sea
ENLGKALDLFHFQEESPGAVFWHQKGWSLFQSLVKFMREKQNQAGYLEVNTPEMLDKALWEKSGHWEKFQEYMYTTDADEKTFAIKPMNCPGHVQVFNQGLKSYKDLPLKISEFGKVHRYEPSGALHGLMRVRAFTQDDAHIFCTHEQITEESLKVTNLILDIYKSFGFENVKLKFADRPNKRVGNDEVWDQSEKALLEAIKASGLKYEVNKGEGAFYGPKIEFILIDAIGREWQCGTLQVDFNLPGRLDATYVASDGSKQVPVMLHRAMFGSLERFIGILIEHHA

SEQ ID NO: 188778 - protein, 316 aa, Unknown
  Bacterial polypetide isolated from the Sargasso Sea
VSLQVKKFQITHHEKWHDLCRGPHLTSTGKIGKAFKLTKVSGAYWRGDSNNEMLQRIYGTCWSSKKELDDYLNRLEEAEKRDHRKLGKEMDLFHFREESPGSVFWHEKGWLLFQRLVEYMRAKQRLAGYKEINTPELLDKTLWEKSGHWDKFGEHMFTSDTPDEKTFAIKPMNCPGCVQVFNQGLKSYRDLPLKLSEFGKVHRYEPSGALHGLLRVRAFTQDDAHIFCTEDQITQESLSVTNLILEIYKDLGFENVILKYSDRPEKRVGDDNVWDKSEAALLAAIKQSKLEYTINKGEGAFYGPKIEFVLRDAIGR

SEQ ID NO: 188779 - protein, 269 aa, Unknown
  Bacterial polypetide isolated from the Sargasso Sea
FQSLINYMRNRQDKAGYVETNTPDMMDKSLWETSGHWDKFSDMMFRTEAKDDKIYAIKPMNCPGAVEIFKQGLKSYRDLPFLLSEFGKVHRYEPSGSLHGLMRVRAFTQDDAHIFCTEDQITQESKTVCDLILSIYKDFGFDNVKIKFSDRPEKRVGDDVVWDKAEAALMQAMKATGLEYTLNPGEGAFYGPKLEFVLRDAIGRDWQCGTLQVDLNLPGRLGATYVGEDGNKKTPVMLHRALFGSLERFTGILIEHYAGHLPLWLSPIT

SEQ ID NO: 188780 - protein, 247 aa, Unknown
  Bacterial polypetide isolated from the Sargasso Sea
VDMCRGPHVPNTRFLKAFKLTRISGAYWRGDSKNEQLQRIYGTAWADKKQLAAYIQRIEEAEKRDHRRIGKQLDLFHLQEEAPGMVFWHPNGWTVYQVLEQYMRQVQRENGYVEVRTPQVVDRILWERSGHWSNYAENMFTTASENRDYAVKPMNCPCHVQIFNQGLKSYRDLPLRLAEFGACHRNEPSGALHGIMRVRGFVQDDAHIFCTEDQVKKEAADFIKLTLQVYADFGFSDIAMKLSTRPA

SEQ ID NO: 188781 - protein, 173 aa, Unknown
  Bacterial polypetide isolated from the Sargasso Sea
KLEFVLRDAIGRDWQCGTLQVDLNLPGRLGATYIGEDGNKKTPVMLHRALFGSLERFTGILIEHYAGHLPLWLSPLQVMVATITSDTDDYALLVKNKLIKEGVKADVDLRNEKIGYKIREHSNTKIPLIIAVGKKESQEQTVSVRRIGSTETKTFKLDEITSTLSSEVKSPIE

SEQ ID NO: 188782 - protein, 267 aa, Unknown
  Bacterial polypetide isolated from the Sargasso Sea
SGLTRVRQFAQDDCHVYLREDQIAEEVQFLTDFILGHYAAFGLESRVKFATRPEQRIGSDEQWDHAEAELRQALEATGCEYDVEEGDGAFYGPKIDFHVTDSIGRSWQLGTIQLDYSAPERFGLEYVGSDNKPHRPVIIHRAVCGSFERFIAILIEHYAGAFPTWLAPEQVRVMSVGQDWDESAHQLVDVLVRAGIRATLQSRETLGYRIREAELHKIPYMAVVGEREALDSTVAVRERGKGKKQEVMSRDSFVSLIKEKISTRSLT

SEQ ID NO: 188783 - protein, 169 aa, Unknown
  Bacterial polypetide isolated from the Sargasso Sea
DALGREWQLGTIQVDYNLPDRFELEYTGSDNQKHRPVMIHRAPFGSMERFVAVLLEHCAGDFPLWLTSKQFILLPISDNYNGYAEKISEVLNFSDIRGLVDTRSEKVGKKIRDAEMAKIPFMLIIGEKEVKDGLVSVRKRGEGDLGAMSIDKFQALVEDAVNKELSQEI

SEQ ID NO: 188784 - protein, 273 aa, Unknown
  Bacterial polypetide isolated from the Sargasso Sea
MINITFPDKSVRKYESSITGNDLAKSISNSLAKSAVCIEINGELRDLSYLIENDAVCKIFTKEDQYSLDTLRHSTAHVMAQAVLNLYPGTEFAVGPSIDDGFYYDFLFKENIKESDLIKIENEMRRISKSQQDFVREEISKDEAYKMFSKQTFKQELINSADKSEGVSEENISIYKNDKFSDLCRGPHVQNTSLINHFKLTKLAGAYWRGIETNLQLQRIYGTAWFNKDDLDNYLKRQEEAEKRDHRKLGNELDLFISTDETGPGQFLWKPKG

SEQ ID NO: 188785 - protein, 268 aa, Unknown
  Bacterial polypetide isolated from the Sargasso Sea
IGPAIEEGFYYDCYLGERTLSASETDGIQKRMEAIIKEKQPFQRIVVSRAEALEMFQENKFKVELISNLPEDATISCYRCGPMVDLCRGPHLPDTAWIKTVSVNQCSRAHWRADVTKDPLVRVYAVTFPDKKLMAEYKLRIEEAKKRDHRLIGLNQELFFFHTLSPGSCFFLPQGAKIYNKMMEFIREKYWEYEYDEVITPNVYNFDLWKTSGHAAHYKENMFSFDVEKAEFGLKPMNCPGHCVMFGNRKRSFRELPMRLADFGVLHR

SEQ ID NO: 188786 - protein, 288 aa, Unknown
  Bacterial polypetide isolated from the Sargasso Sea
RDHRKLGKEMDLFHFREESPGSVFWHEKGWALFQKLINYMRSRQDAAGYREVNTPEILDRQLWEKSGHWEKYGENMYTSETPDEKVFAIKPMNCPGHIQVFNQGLKSYRDLPIRIAEFGKVHRYEPSGALHGLLRVRAFTQDDAHIFCSEDQITSECLEVTNLILDIYKDLGFENVILKYADRPEVRVGDDEIWDKAEASLLEAVKASKLEYSINKGEGAFYGPKIEFVLRDAIGRDWQCGTLQVDLNLPGRLDASYVDKDGTKKVPVMLHRALFGSLERFIGILIEN

SEQ ID NO: 188787 - protein, 173 aa, Unknown
  Bacterial polypetide isolated from the Sargasso Sea
MPNITLTDGKKLSFKNKVTGLEVAEKISKSLSKQALIMSVNGELKDLSFLIHKDSSVKIITNKDKEGLDVIRHDAAHIMAMAVQELFPGTQVTIGPVIENGFYYDFARKEPFTSDDLKKIEKKMSEIIDRDVKTKREVWERDKAIQHFKKIGEKYKAEIIESIPENEELSVYH

SEQ ID NO: 188788 - protein, 309 aa, Unknown
  Bacterial polypetide isolated from the Sargasso Sea
EEGLIILYKHEEYIDMCRGPHVPNTRHLRHFKLLKLSGSYWRGNSENESLQRIYGTAWAKEKELNDYLTRIEEAEKRDHRKLGKKHSLFHIQEESPGMIFWHPNGWTIYQVMEKYIREILKKNDYLEIKTPQAVDKSLWEKSGHWEKFRDDMFTTASENRTYAIKPMNCPCHIQVFNQGLKSYKDLPIRLAEFGSCHRNEPSGALHGLMRVRNFTQDDAHIFCTEEQIQEEVSTFIDLVFEVYKTFGFDEIIIKLSTRPEKRVGSEDIWDKSEEALTKALDNKNLKWELQPGEGAFYGPKNRILVKRLS

SEQ ID NO: 188789 - protein, 309 aa, Unknown
  Bacterial polypetide isolated from the Sargasso Sea
NGDRVDACELINDDARLEIITAKDEDGLEIIRHSCAHLIGHAVKQLFPEAKMAIGPTIDNGFYYDIDLDHSLSQDDLDAIEKRMLQLAKTNYDVVKKTVSWQEARDTFEARGETYKIEILDENIAKDDRPGLYHHEEYVDMCRGPHVPNMKFCQNFKIMKVAGAYWRGDSENKMLQRIYGTAWGDKKQLKAYLKRLEEAEKRDHRRIGKALDLWHWQEEAPGMVFWHNDGWSIYRELEEFVREKLREYQYEEVKGPMMMDRSLWEKSGHWEKYSDAMFTTESEKREYAIKPMNCPGHVQIFNPRFKIVP

SEQ ID NO: 188790 - protein, 184 aa, Unknown
  Bacterial polypetide isolated from the Sargasso Sea
MPTITLPDGNNINFSKKVTGAEVAEKISKSLAKQAMVISVDGELKDLDYLIDKDCSVKIFTSKNPEGLETIRHDTAHILAMAVQELFPGTQVTIGPVIENGFYYDFARKEPFTEDDLLKIENKMKEIVDRDEITKREVWERNKAIDHFKKKGEIYKSELIKAIPEKEDVSIYFHGDWHDLCRGP

SEQ ID NO: 188791 - protein, 255 aa, Unknown
  Bacterial polypetide isolated from the Sargasso Sea
PDNEEISIYKQGDWLDLCRGPHMVSTKQIGKAFKLMKVAGAYWRGDSSNTMLTRIYGTAWATEKGLEQHLLQIEEAEKRDHRKLGREMDLFHFQEEAPGAVFWHPKGWTLFQSLINYMRNRQDKAGYVETNTPDMMDKSLWETSGHWDKFSDMMFRTEAKDDKIYAIKPMNCPGAVEIFKQGLKSYRDLPFLLSEFGKVHRYEPSGALHGLMRVRAFTQDDAHIFCTEDQITQESKTVCDLILSIYKDFGFDNVR

SEQ ID NO: 188792 - protein, 307 aa, Unknown
  Bacterial polypetide isolated from the Sargasso Sea
LKDLNFPLIADCDLELFTGETPEGHDTLLHSTAHLMAQAVKELFPKAKVTIGPTIVNGFYYDFDVDKTFLDEDLEKIEKKMKELANSSQEIFRSEISAKDAVSLFKNINEDYKVEIIEQINPDDVISIYKQSNFVDLCRGPHVSNTSKIKYFKLLSTSGAYWRGNENNKMLQRIYGTVFSTKDSLRNHLNNLEEAKKRDHRKIGKELKLFTFDSEIGPGLPLWLPNGTVMIEELEKLAKYTEKKAGYDQVRTPHLTKGIVYEKSGHLEHYKESMYPGMEIDGVDYYVKPMNCPHHHKIFCFTPRKLS

SEQ ID NO: 188793 - protein, 241 aa, Unknown
  Bacterial polypetide isolated from the Sargasso Sea
MPNITLPDGKKLNFKNKVTGLEVAEKISKSLSKQALIMSVDGELKDLSFSIQKDSSVKIITHKDKEGLDVIRHDAAHIMAMAVQELFPGTQVTIGPVIENGFYYDFARKEPFTKDDLKKIEKKMSEIIDRDVKTKREVWERSKAIAHFKKIGEKYKAEIIESIPESEELSVYHHGDTWHDLCRGPHLASSSKIGKAFKLTKVSGAYWRGDSNNEMLQRIYGTCWSSKKELDDYLLRLDEAE

SEQ ID NO: 188794 - protein, 278 aa, Unknown
  Bacterial polypetide isolated from the Sargasso Sea
KVHRYEPSGALHGLLRVRAFTQDDAHIFCTEDQITEESLSVTNLILEIYKDLGFKDVILKYSDRPEQRVGEDIIWDKSEAALLTAIKKSKLKYTINKGEGAFYGPKIEFVLRDAIGRDWQCGTLQVDLNLPGRLGASYVAKDGTKKVPVMLHRALFGSLERFIGILIENYAGKLPFWLSPAQAVVCPIAEENNTYVKKLFEDLFKEGIKCEMDLRNEKINYKVREHSLAKIPYIIVCGKKEVLENTVTVRKLGSEKQEVIKREDLIKNMLDLNKLPLN

SEQ ID NO: 188795 - protein, 305 aa, Unknown
  Bacterial polypetide isolated from the Sargasso Sea
GREMDLFHFREESPGSVFWHERGWSLFQKLINYMRSRQDAAGYKEVNTPEVLDRQLWEKSGHWEKYGANMYTSETPDEKVFAIKPMNCPGHIQVFNQGLKSYRDLPLRFAEFGKVHRYEPSGALHGLLRVRAFTQDDAHIFCTEDQITSECLIVTNLILDIYKDLGFENVILKYADRPEVRVGDDLVWDKAEASLLEAVKASNLEYTINKGEGAFYGPKIEFVLRDAIGRDWQCGTLQVDLNLPGRLDASYVDKDGTKKVPVMLHRALFGSLERFIGILIENYAGKFPFWISPLQTMVIPISEEF

SEQ ID NO: 188796 - protein, 290 aa, Unknown
  Bacterial polypetide isolated from the Sargasso Sea
KIGKAFKLTKVSGAYWRGDSNNEMLQRIYGTCWGSKKELEDYLHRLEEAEKRDHRKLGKEMDLFHFREESPGSVFWHEKGWLLFQRLVEYMRMKQRLAGYKEINTPELLDKTLWEKSGHWEKFGEHMFTSETPDEKTFAIKPMNCPGCVQVFNQGLKSYRDLPLKLSEFGKVHRYEPSGALHGLLRVRAFTQDDAHIFCTEDQITQETLAVTNLILEIYKALGFENVILKYSDRPEKRVGDDSIWDKSESALLSAIKKSKLEYTINKGEGAFYGPKIEFVLRDAIGRDWQ

SEQ ID NO: 188797 - protein, 220 aa, Unknown
  Bacterial polypetide isolated from the Sargasso Sea
LGQPRIPFTEADLKAIKKGMIKIIKKKVPLERVEVTRAEAETKIKAQNEPYKLEILEGLQDPITLYTLGEDWWDLCAGPHVEHTGQLNAKAFELESVAGAYWRGDETKAQLQRIYGTAWETAEQLAEHKRRKEEALRRDHRRIGKDLDLFSIEDEAGAGLVFWHPRGARMRLLIEEFWRQAHFEGGYELLYTPHVADISLWKTSGHLDFYAESMFGPMEV

SEQ ID NO: 188798 - protein, 255 aa, Unknown
  Bacterial polypetide isolated from the Sargasso Sea
AHIFFCTEDQITEECLTVTNLILEIYRDLGFENVILKYSDRPDLRVGDDSVWDKAEAALLKAVKTTKLEYSINKGEGAFYGPKIEFVLRDAIGRDWQCGTLQVDFNLPGRLGASYVDKDGTKKVPVMLHRALFGSLERFIGILIENYAGKFPFWISPLQTVVIPISEEFDDYAIEVCKKIKEVGISSVTDLKKHNLNYKIRDHSLAKIPLLLICGKKEVDSNTVTIRRLDSNKQENMELKLFLKTFSALNKAPSN

SEQ ID NO: 188799 - protein, 99 aa, Unknown
  Bacterial polypetide isolated from the Sargasso Sea
EKVFAIKPMNCPGHIQVFNQGLKSYRDLPLRITEFGKVHRYEPSGALHGLLRVRAFTQDDAHIFCSEDQITSECLEVTNLILDIYKDLGFENVILKYAD

SEQ ID NO: 188800 - protein, 303 aa, Unknown
  Bacterial polypetide isolated from the Sargasso Sea
AAHIMAMSVQELFPGTQVTIGPVIENGFYYDFARKEPFTSEDLEKIEKKMSEIIDRNVKTRREVWEREKAIKHFKKIGEKYKAEIIESIPKGEELSIYHHGETWHDLCRGPHLPSSGKIGKAFKLTKVSGAYWRGDSNNEMLQRIYGTCWSSKEQLKLYLDRLEEAEKRDHRKLGKEMDLFHFREESPGSVFWHEKGWILFQRLVEYMRFRQRLDGYKEINTPELLDKTLWEKSGHWEKFAEHMYTSETPDEKVFAIKPMNCPGCVQIFNQGLKSYRDLPLKLSEFGKFIDMSLQELYMDCFE

SEQ ID NO: 188801 - protein, 267 aa, Unknown
  Bacterial polypetide isolated from the Sargasso Sea
MGLLRVRAFTQDDAHIFCTEEQITSECLIVTNLILDIYKDLGFKNVILKYADRPEVRVGNDRVWDKAEASLLEAVKASKLEYSINKGEGAFYGPKIEFVLRDAIGRDWQCGTLQVDLNLPERLAAFYVDKDGTKKIPVMLHRALFGSLERFIGILIENYAGKFPFWIAPLQTMVIPISEEFNDYAIETSSKIKNVGISSSVDLKNQNLNNKIRDHSLAKIPLLLICGKKEVDSNSVTIRRLNSNKQENMDIDKFLKTFSALNKASSN

SEQ ID NO: 188802 - protein, 202 aa, Unknown
  Bacterial polypetide isolated from the Sargasso Sea
RAEQACRDAAASLGVPFTEEEGEAAFYGPKIDFVVRDVLGREWQLGTVQVDYNLPERFDLSYVGADGEKHRPVMIHRAPFGSMERFCGVLIEHFGGMFPTWLSPTQAHILTISEKHIDYANQVSTALREANVRVEMDTSDDTIGKKLRTHRAMRPAYLLILGDEEANSGTVSYMGPDREQVNGVALADFVAMIEAEISSRSA

SEQ ID NO: 188803 - protein, 271 aa, Unknown
  Bacterial polypetide isolated from the Sargasso Sea
DEAPGMVFWHPYGWTIYRQLQNFMRQKLEDSGYLEINTPLVVDRKLWEASGHWDKYRENMFITEIDEEHANEKRVNALKPMNCPCHVQVYNQGIKSYKDLPIKFAEFGSCHRYEPSGTMHGLMRVRGFTQDDGHIFCTEDQIESETGKFIELLSGVYADLGFKDFDIKLSTRPETRVGSDDVWDRAESSLEAAIKNLGYPYKIDEGDGAFYGPKLDFVLTDAIGRDWQCGTFQLDFNLPERLNAEYVGEDGNKNNPVMIHRAVLGSFERFI

SEQ ID NO: 188804 - protein, 277 aa, Unknown
  Bacterial polypetide isolated from the Sargasso Sea
RGDSNNEMLQRIYGTCWSSKQELDNYLHRLEEAEKRDHRKLGKEMDLFHFREESPGSVFWHEKGWLLFQRLVEYMRMKQRLAGYKEINTPELLDKTLWEKSGHWDKFGEHMFTSETPDEKIFAVKPMNCPGCVQVFNQGLKSYRDLPLKLSEFGKVHRYEPSGALHGLLRVRAFTQDDAHIFCTEDQITEESLSVTNLILEIYKDLGFKNVILKYSDRPEQRVGEDSIWDKSEAALLTAIKKSKLEYTINKGEGAFYGPKIEFVLRDAIGRDWQCGT

SEQ ID NO: 188805 - protein, 274 aa, Unknown
  Bacterial polypetide isolated from the Sargasso Sea
MGPTIENGFYYDFDVDTAFSDEVIAQIEKKMKELAKSSQEIFRSEISAKDAITLFKNMDEDYKVEIIEQINPDDVISTYKQSDFVDLCRGPHVSNTSKIKHFKLLSTSGAYWRGNENNKMLQRIYGTVFSTKEALREYLFNLEEAKRRDHRKIGKEMNLFTFDSDIGPGLPLWLPNGTVMLEELEKLAKYTEKKAGYDQVRTPHLTKGTIYEKSGHLDHYKESMYPGMVIDGVDYYVKPMNCPHHHKIFSSIPRSYRDMPVRLSEYGTCYRYEK

SEQ ID NO: 188806 - protein, 278 aa, Unknown
  Bacterial polypetide isolated from the Sargasso Sea
AQAVLNLYPGTEFAVGPSIDDGFYYDFLFKENIKESDLIKIENEMRKISKSQQDFVREEISQDEAYKIFSKQTFKQELINTADKSEGVSEENISIYKNDKFTDLCRGPHVQNTSLINHFKLTKLAGAYWRGIETNPQLQRIYGTAWFNKDDLDNYLKRQEEAEKRDHRKLGNELDLFISTDETGPGQFLWKPKGAVLRQIIEDYSKKAHSENGYDYAYTPHIGRSVLWETSGHLDYYKEGMFPPLKNEENDEEYYLKPMNCPFHILIYKSDIRSYKEL

SEQ ID NO: 188807 - protein, 282 aa, Unknown
  Bacterial polypetide isolated from the Sargasso Sea
MAEKGWILFQKLIDYMRMKQNIAGYKEINTPEVLDRTLWEKSGHWEKFGSNMYTSTTPDEKVFAIKPMNCPGCIEVFNQGLKSYKDLPLKMSEFGKVHRYEPSGALHGLLRVRAFTQDDAHIFCTEDQITEECLVVTNLILEIYKDLGFENVILKYSDRPELRVGDDSVWDKAETALLKAVKATKLEYSINKGEGAFYGPKIEFVLRDAIGRDWQCGTLQVDFNLPGRLGATYVDKDGSKKVPVMLHRALFGSLERFIGILIENYAGKFPFWISPLQTVVIS

SEQ ID NO: 188808 - protein, 200 aa, Unknown
  Bacterial polypetide isolated from the Sargasso Sea
MPNITLPDGKKLSFEKHVTGLEVAEKISKSLSKQALIISVNGELKDLSFPIEKDSSVKIITNKDKEGLDVIRHDAAHIMAMAVQELFPGTQVTIGPVIENGFYYDFARKEPFTSDDLKKIEKKMSEIIDRDVKTKREVWERNKAIAHFKKIGEKYKAEIIESIPETEELSVYHHGDTWHDLCRGPHLASSSKIGKAFKLT

SEQ ID NO: 188809 - protein, 282 aa, Unknown
  Bacterial polypetide isolated from the Sargasso Sea
DDYLQRIEEAEKRDHRKLGKEMNLFHFREESPGSVFWHDKGWALFQKLVSYMRAKQEDAGYKEINTPEILDRSLWEKSGHWEKFGENMYTSTTPDEKVFAIKPMNCPGCVQVYNQGLKSYRDLPLKMSEFGKVHRYEPSGALHGLLRVRAFTQDDAHIFCTEDQITEECLSVTNLILEIYKDLGFENVILKYSDRPEVRVGEDSVWDKSETALLKAIKESKLEYSINKGEGAFYGPKIEFVLTDAIGRDWQCGTLQVDLNLPGRLGATYVDKDGGKKVPVML

SEQ ID NO: 188810 - protein, 293 aa, Unknown
  Bacterial polypetide isolated from the Sargasso Sea
MRSRQDAAGYKEVNTPEVLDRQLWEKSGHWEKYGENMYTSETPDEKVFAIKPMNCPGHIQVFNQGLKSYRDLPLRFAEFGKVHRYEPSGALHGLLRVRAFTQDDAHIFCTEDQITSECLIVTNLILDIYKDLGFKNVILKYADRPEVRVGDDLVWDKAEASLLEAVKASKLEYTINKGEGAFYGPKIEFVLRDAIGRDWQCGTLQVDLNLPGRLDASYVDKDGTKKVPVMLHRALFGSLERFIGILIENYEGKFPFWISPLQTMVIPISEEFNDYAVEVSNKIKNSGISSAVD

SEQ ID NO: 188811 - protein, 301 aa, Unknown
  Bacterial polypetide isolated from the Sargasso Sea
ITSEDKEGLDVLRHDAAHIMAMAVQDIFPGTQVTIGPVIENGFYYDFARKEPFTSNDLKNIEKKMSEIIDKDVKTKREVWERNKAIKHFKKIGEKYKADIIESIPKTEEITIYHHGDTWHDLCRGPHLASSGKIGKSFKLTKVSGAYWRGDSKNEMLQRIYGTCWSSKKDLDEYLLRLEEAEKRDHRKLGKEMDLFHFREESPGSVFWHEKGWSLFQRLVEYMRMKQRLAGYKEINTPELLDKSLWEKSGHWEKFSEHMFTSETPDEKIFAIKPMNCPGCVQIFNQGLKSYRDLPLKLSEF

SEQ ID NO: 188812 - protein, 155 aa, Unknown
  Bacterial polypetide isolated from the Sargasso Sea
MPNIKLPDGNSISFEKNVTGLQIAEKISKSLSKQALVISVDGNLRDLNYKINKDCTVKIHTAKDKEGLETIRHDTAHVLAMAVQELFPGTQVTIGPVIDNGFYYDFARKKPFTEEDLRKIEKKMLEIVERDEPTHREVWKRDKAVEHFKKAGELY

SEQ ID NO: 188813 - protein, 216 aa, Unknown
  Bacterial polypetide isolated from the Sargasso Sea
MPNIQLLDGKKISFQKSISGFELTKKISKSLEKSALIMEVNGKLRDLSYNILEDSKVKIITSKDQEGLDVLRHDAAHIMAMAVQEIFPGTQVTIGPVIENGFYYDFARKEPFTSEDLKKIEKKMSEIIDRDVKTRREVWEREKAINHFNQIGEKYKAEIIESIPKNEELSVYHHGDTWHDLCRGPHLASSGKIGKAFKLTKVSGAYWRGDSNNEML

SEQ ID NO: 188814 - protein, 291 aa, Unknown
  Bacterial polypetide isolated from the Sargasso Sea
KVFAIKPMNCPGCVQVFNQGLKSYRDLPLKMSEFGKVHRYEPSGALHGLLRVRAFTQDDAHIFCSEDQITEECLNVTNLILEIYKDLGFENIILKYSDRPDMRVGEDDVWDKSEKALLEAIKASQLQYSINKGEGAFYGPKIEFVLRDAIGRDWQCGTLQVDLNLPGRLGASFVDKDGSKKVPVMLHRALFGSLERFIGILIENYSGKLPFWISPLQTVVIPVSAEFDSYAKEVNKKIKKEGITSEVDLKNHNLNYKIREHSLSKVPILLICGKKEVDSNTVTIRRLDSNK

SEQ ID NO: 188815 - protein, 218 aa, Unknown
  Bacterial polypetide isolated from the Sargasso Sea
ELLEHLESIEEAEKRDHRKIGKDMDLFHFQDEAPGMVFWHPKGWTIYSTLKSYMSDMQRQSSYQEINTPSVIDRKLWEKSGHWDKYRENMFITEIDEEHANEKRVNALKPMNCPGHVQVYNQGIRSYKELPLRLCEFGTCHRYEASGTMHGLMRVRGFTQDDGHIFLTEDQIESETAIFIDLLSKVYADLGFNEFEIKLSTRPEKRVGSDEIWDKAES

SEQ ID NO: 188816 - protein, 186 aa, Unknown
  Bacterial polypetide isolated from the Sargasso Sea
TINKGEGAFYGPKIEFVLRDAIGRDWQCGTLQVDFNLPGRLGASYVDKDGTKKVPVMLHRALFGSLERFIGILIENYAGKFPFWISPLQTVVIPISEDFNDYAIKVSDQIKQIGISSVVDLKNQNLNYKIRDHSLAKIPLLLICGKKEVDSNSVTIRRLDSDKQENMELNKFLKTYSALNKASSKK

SEQ ID NO: 188817 - protein, 319 aa, Unknown
  Bacterial polypetide isolated from the Sargasso Sea
NDAIKLFEELNEPYKIKIINDSFQENDFQIYQQGETNFFDLCKGPHLPSLKFIGEFKLTKVSGAYWRGDSKNEMLQRIYGTAWRNKKELDSYLSMLEEAEKRDHRKIGKEMGLFHFQDDAPGSVFWHSKGWVIFNKLVDYMRNRQENAGYTEISTPTVLDRSLWEKSGHWEKFQDNMYLAKTSDEKVFALKPMNCPGGIQIYNNSLRSYRDLPLRIAEFGKVFRFEPSGALHGLMRVREFTQDDAHIYCLKEQMEEECKKVINLTLDIYKDFGFENVKIKFSDRPAKRIGDDNTWDFLEKSLLSSLKKLNLEFDVNKGE

SEQ ID NO: 188818 - protein, 241 aa, Unknown
  Bacterial polypetide isolated from the Sargasso Sea
MPLIKLPDNSIRNFNNPVTVDAIAKDIGTGLAKAAVAGKIDGQLVDASEIISDDCSVEIITVKDDEGLEIVRHSCAHLLAHALKQLYPDAQMAIGPVIRDGFYYDIKLDKNLSDEDLEAIEKRMKKLAKTKYDVRREVVSQTKAIETFKERNEPYKVKLAEEIPEDEVIALYHHEEYIDMCRGPHVTNMRHLQAFKLTKVSGAYWRGDSKNEMLQRIYGTAWPNSKDLDNYILQQEEAEKR

SEQ ID NO: 188819 - protein, 320 aa, Unknown
  Bacterial polypetide isolated from the Sargasso Sea
RGDSNNEMLQRIYGTSWATQKDLDQYLKRIEEAEKRDHRKLGRQMDLFHFREESPGSVFWHERGWGLFQKLINYMRSRQDAAGYKEVNTPEVLDRQLWEKSGHWEKYGENMYTSETPDEKVFAIKPMNCPGHIQVFNQGLKSYRDLPLRFAEFGKVHRYEPSGALHGLLRVRAFTQDDAHIFCTEDQITSECLIVTNLILDIYKDLGFENVILKYADRPEVRVGDDSVWDKAEDSLLEAVKASKLEYTINKGEGAFYGPKIEFVLRDAIGRDWQCGTLQVDLNLPGRLDASYVDKDGTKKVPVMLHRALFGSLERFIGIL

SEQ ID NO: 188820 - protein, 189 aa, Unknown
  Bacterial polypetide isolated from the Sargasso Sea
STTPDEKIFAIKPMNCPGCIEVFNQGLKSYKDLPLKMSEFGKVHRYEPSGALHGLLRVRAFTQDDAHIFCTEDQITKECLTVTDLILEIYKDLGFENVILKYSDRPETRVGDDDVWDKAEAALLEAVKATKLEYSINKGEGAFYGPKIEFVLRDAIGRDWQCGTLQVDFNLPGRLGATYVDKDGTNKGS

SEQ ID NO: 188821 - protein, 292 aa, Unknown
  Bacterial polypetide isolated from the Sargasso Sea
REDSPGSVFWHEKGWNLFQKLIDYMRAKQKKAGYKEINTPEILDKSLWEKSGHWEKFGEHMYTSTTPDKKVFAIKPMNCPGCVQVFNQGLKSYRDLPLRMSEFGKVHRYEPSGALHGLLRVRAFTQDDAHIFCTEDQITKECLSITNLILEIYKDLGFTNVLLQFSDRPQKRVGDDKIWDKAESALLKAIKQSKLKYEINKGEGAFYGPKIDFVLRDSIERDWQCGTLQVDLNLPGRLGASFVDKDGSKKIPVMLHRALFGSLERFIGILIEHYSGKLPFWINPLQAMVIPV

SEQ ID NO: 188822 - protein, 304 aa, Unknown
  Bacterial polypetide isolated from the Sargasso Sea
ISKSLIKQALIMNVNGELKDLSYSIKNDSSVKIITNKDKEGLDVIRHDAAHIMAMAVQELFPGTQVTIGPVIENGFYYDFARKEPFTSDDLEKIEKKMSEIIDKDVKTKREVWERDKAITHFKKIGEKYKAEIIESIPENEELSVYHHGDTWHDLCRGPHLTSSKKIGKAFKLTKVSGAYWRGDSNNEMLQRIYGTCWSSKKELDDYLHRLEEAEKRDHRKLGKEMNLFHFREESPGAVFWHEKGWTLFQRLIEYMRLKQRYAGYREINTPELLDKTLWEKSGHWDKFGDLMFTSETPDEKFSL

SEQ ID NO: 188823 - protein, 257 aa, Unknown
  Bacterial polypetide isolated from the Sargasso Sea
SHFKKIGEKYKAEIIESIPESEELSVYHHGDTWYDLCRGPHLVSSGKIGKAFKLTKVSGAYWRGDSKNEMLQRIYGTCWSSKKELDDYLNRLEEAEKRDHRKLGKEMDLFHFREESPGAVFWHEKGWSLFQRLIEYMRLKQRNAGYREINTPELLDKTLWEKSGHWDKFGDLMFTSETPDEKIFAVKPMNCPGCIQVFNQGLKSYRDLPLKLSEFGKVHRYEPSGALHGLLRVRAFTQDDAHIFCTEEQITDECVTV

SEQ ID NO: 188824 - protein, 202 aa, Unknown
  Bacterial polypetide isolated from the Sargasso Sea
MPQIQLLDGKKIDFEKSINGFDLTKKISKSLEKAALIMEVDGNLKDLSHQISRDAKVRIITSKDKEGLEVIRHDAAHIMAMAVQELYPGTQVTIGPVIENGFYYDFARKEPFTSEDLNNIEKKMSEIIDRDVKTRREVWKRDQAISHFKKIGEKYKAEIIESIPKNEELSVYHHGDTWHDLCRGPHLASSGKIGKAFKLTKV

SEQ ID NO: 188825 - protein, 274 aa, Unknown
  Bacterial polypetide isolated from the Sargasso Sea
MPQIQLLDGKKIEFKNSISGFDLTKKISKSLEKVALIMEVDGSLKDLSHNITKDAKVRIITPKDKEGLEVIRHDAAHIMAMAVQELFPGTQVTIGPVIENGFYYDFARKEPFTSDDLKKIEKKMSEIIDRDVKTKREVWKRNEAINHFKKIGEKYKAEIIESIPENEELSIYHHGDTWHDLCRGPHLASSGKIGKAFKLTKVSGAYWRGDSNNEMLQRIYGTCWASKKELDDYLHRLEEAEKRDHRKLGKEMDLFHFREESPGSVFWHEKRLVI

SEQ ID NO: 188826 - protein, 268 aa, Unknown
  Bacterial polypetide isolated from the Sargasso Sea
NRFYYDFDIDGTFSDEDLIKIENKMKEIASENLSVSRSELDRDEAIKLFEKRGENYKVEIINEIESSDQISAYKQGDFIDLCRGPHVPLTGKIKHFKLLNTSGAYWRGDENNKMLQRIYGTVFSSKKELNDYLHFLEEAKKRDHRKLGKELELYTFDDEVGPGLPLWLPNGAVIIDQLENLAKETERKHGYYQVRSPHLTKGQLYEKSGHLDLYKDSMFPAMDVDGMEYYVKPMNCPHHHKIYDASPKSYRDLPYKIAEYGTCYRYEK

SEQ ID NO: 188827 - protein, 257 aa, Unknown
  Bacterial polypetide isolated from the Sargasso Sea
MEINLPDGSAKELEKGSNGLDLAKSIGAGLAKSAVAVVVNGEQRDLIDELPDNSSVSIITIQSDEGLEIMRHTLTAQVLAKAIKNLYSDSKLAIGPTIENGFYYDVSTETPISVEDLPKIENEMKRILENKSNIVKSLHSEKDAKKMFKEKGETLKIEIIDDAEQTDNFQIYTNADEDFIDLCRGPHLPNLSFIGAFKLTKVSGAYWKGDSSNEMLTRIYGTAWRNEKELQEHLKSIEEAEKRDHRKIGKDMDLFHF

SEQ ID NO: 188828 - protein, 298 aa, Unknown
  Bacterial polypetide isolated from the Sargasso Sea
HSCAHLIGHAVKQLFPEANMVIGPVIENGFYYDIAVEKPFTSDDLQVIEDRMRSLIKQKYDVVKKMTPRDEVIAEFENRGEQYKLKLIEDMPEEEAMGLYYHQEYLDMCRGPHVPNTSFLENFKLTKVSGAYWRGDSRNEMLQRIYGTAWASKKELNVYLKQLEEAEKRDHRKLGRELDLFHFSEEAPGSIFWHPKGWTLFRKLLDYMRERQDKADYVEVNTPDVMDRSLWETSGHWFNYRENMFSTQTEDERIFALKPMNCPGSVSMYAQGLKSYRDLPIRMAEFGKVHRYEPSGAL

SEQ ID NO: 188829 - protein, 244 aa, Unknown
  Bacterial polypetide isolated from the Sargasso Sea
DNAQVSIITIQSEEGLEIMRHTLTAQVLARAIKNLYPKSKLAIGPTIEDGFYYDVESEEVISSDDLIKIEDEMKNIIKTKSLLTKKLVSKSEALKIFKEKKEPFKETIINESNQKNDFQLYYQDNEEFVDLCRGPHLPNLGFIGSFKLTKVSGAYWKGDSKNTMLTRIYGTAFNSDKDLQKHLNEVEEALKRDHRKLGREMDLFHFQDEAPGMVFWHPKGWTIYRQLRNFVRKKLQDNNYIEVN

SEQ ID NO: 188830 - protein, 310 aa, Unknown
  Bacterial polypetide isolated from the Sargasso Sea
SPIPGNEFAKSISPSLLKSAIAISINGQLKDLNFKINKDCEAQIITKESDLGIEILRHDTAHVMAEAVKILYPDVQITIGPPIENGFYYDFSKKKPFTPEDLIKIEKKMLEIINKNEPFEKEVWSRKKAIDYFKDQGEIYKTEIIKDIPNKDEISIYKQGKFLDLCKGPHSPSTGKIGKFFKLIKLAGAYWRGDSNNEMLQRIYGTAWTTKKDLDNYLKILEEADKRDHRKLGRDMNLFHFQEESPGSIFWHNKGWDVFMRLKNYLRKKQLEAGYEEINTPDMLDRTMWEKSGHWEKFKENMFTINTEDK

SEQ ID NO: 188831 - protein, 311 aa, Unknown
  Bacterial polypetide isolated from the Sargasso Sea
AKAALAGRVNGNLLDTCIPITNDAEIQIITSKDNEGLEIIRHSFAHLLGHAVKQLYPEAKMAIGPVIEDGFYYDISYKDTFTPVDLEKIEKRIKELINKDYDVDVEVVSPAKATKVFSERGEVFKLDIIKNIPKDEIIKLYKHEEYIDMCRGPHVPNTRHLRAFKLMKVSGAYWRGDSNNEMLQRIYGTAWKNSKELKEYINRIEEAEKRDHRKLGKKLSLFHFQEEAPGMIFWHPNGWTIYRVLQDFIRETISKYDYQELKSPQIVCRSLWEKSGHWDKFKEDMFTTTSENKEYAIKPMNCPCHVQVFKS

SEQ ID NO: 188832 - protein, 145 aa, Unknown
  Bacterial polypetide isolated from the Sargasso Sea
QTWSTYVAEDGQKKVPVMLHRALFGSLERFTGILIEHYAGHLPLWLSPSQIIVATITSESDNYAYDVKEQLIKNGLRAEVDIRNEKIGYKIREHSNAKIPIILAVGKKEAEDKTVSVRRLGSQNTIVVKLDELINDLKKESLSPN

SEQ ID NO: 188833 - protein, 154 aa, Unknown
  Bacterial polypetide isolated from the Sargasso Sea
CGTLQVDLNLPELLTANYIGVDGKKHRPVMIHRALFGSIERFIGILIEHYSGNLPLWLAPTQIVIATITSDSDNYALEIEKLLKSKNLKVEVDLRNEKIGYKIREHSLAKIPLIYSVGEREKNNRTVSVRRLGSKKTESISIDEAINSVLNQIG

SEQ ID NO: 188834 - protein, 269 aa, Unknown
  Bacterial polypetide isolated from the Sargasso Sea
MFVNTEEIGPGQFLWKPKGSILRQNIENYSKKAHADNGYEYSYTPHIGRSVLWETSGHLDYYKEGMYPPLKSEDNKDDEYYLKPMNCPFHILIYKSDIRSYKELPLRFFELGSVYRYEKTGVLHGLLRARGFTQDDAHIFCTNDQIEEEILNLLTFSIKLLNAFGFDSIEADLSTRPEKSIGNDDDWVKATNSLASALDNQKISYVTAHGEGAFYGPKIDLHVKDAIGRRWQLSTIQVDFSQPDNFDLQYVDSNNKRIRPVMIHRALLG

SEQ ID NO: 188835 - protein, 191 aa, Unknown
  Bacterial polypetide isolated from the Sargasso Sea
ATGLEYTFNPGEGAFYGPKLEFVLRDAIGRDWQCGTLQVDLNLPGRLGATYVAEDGQKKVPVMLHRALFGSLERFAGILIEHYAGHLPLWLSPSQVVVATITSESDNYAFDVKDQLSKNGLRTETDIRNEKIGYKIREHSNAKIPIILAVGKKEAEEKTVSVRRLGSQETLVVKLDKLISDLKKESLSPIN

SEQ ID NO: 188836 - protein, 245 aa, Unknown
  Bacterial polypetide isolated from the Sargasso Sea
TESQLHDEITKLIKLTFKVYNNLGFENIKVALSTRPDKKVGTDDIWNKSEKILENSLKENVPNYITLPGEGAFYGPKIEFTLTDSLGREWQCGTVQLDFSMPSALSASYVDEKGVKTTPVMVHRAILGSMERFIGILIEHYAGKLPFWLCPEQIIIVNITNKHVEFAEKIEKILKDSGFRCSSDLRNEKIGYKIREHIIAKIPYVVIIGDEEVSSNKISVRQYDGTENKLISVDDFIVELSSKKT

SEQ ID NO: 188837 - protein, 279 aa, Unknown
  Bacterial polypetide isolated from the Sargasso Sea
GKIGKAFKLTKVSGAYWRGDSNNEMLQRIYGTCWSNKEQLNLYLERLEEAEKRDHRKLGKEMDLFHFREESPGSVFWHEKGWILFQRLVEYMRFRQRLDGYKEINTPELLDKTLWEKSGHWEKFAEHMYTSETPDEKIFAIKPMNCPGCVQIFNQGLKSYRDLPLKLSEFGKVHRYEPSGALHGLLRVRAFTQDDAHIFCTEDQITEECLSVTNLIIDIYKNLGFEKVILKYSDRPEKRVGDDKIWDKSEAALLTAIKKSKLEYSINKGEGAFYGPKIE

SEQ ID NO: 188838 - protein, 203 aa, Unknown
  Bacterial polypetide isolated from the Sargasso Sea
MTPLEEIRHSASHVLATAVLRLYPDAKLDIGPPTESGFYYDFDSETPFTPEVLETVEAEMKKVIKENQRFERIEVSREEAINLIQEMGQEKYKLGRLEDIPEGETISFYRNGEFSDLCGGTHVSYTKKIKAFKLLQVAGSYHRGDASNKQLQRIYGTAFATKDELAEHLERLEEAKKRDHRKVGRELGLFHIDDMVGQGLVLW

SEQ ID NO: 188839 - protein, 257 aa, Unknown
  Bacterial polypetide isolated from the Sargasso Sea
MLQRIYGTSWASQKDLDNYLKRLEEAEKRDHRKLGKEMDLFHFREESPGSVFWHEKGWALFQKLINYMKMKQDIAGYKEINTPEVLDRGLWEKSGHWEKFGANMYTSTTPDEKIFAIKPMNCPGCVEVFNQGLKSYKDLPLRMSEFGKVHRYEPSGALHGLLRVRAFTQDDAHIFCTEDQITEECLTVTNLILEIYKDLGFENVILKYSDRPELRVGDDYVWDKAEAALLEAVKATKLEYTINKGEGAFYGPKIEFV

SEQ ID NO: 188840 - protein, 270 aa, Unknown
  Bacterial polypetide isolated from the Sargasso Sea
FKSKGEEYKVELIEDLNEDEEITVYKQGEWLDLCRGPHMMSTKQIGKGFKLMKVAGAYWRGDSNNEMLTRIYGTAWRNEKELESHLLQIEEAEKRDHRKLGKEMNLFHFQEEAPGAVFWHPKGWKLFQSLINYMRKRQDDAGYVETNTPDMMDKSLWETSGHWDKFSEMMFRTEAKDEKIYAIKPMNCPGAVEVFKQGLKSYRDLPFLLSEFGKVHRYEPSGALHGLLRVRAFTQDDAHIFCTEDQITQESKTVCDLILSIYKDFGFDNV

SEQ ID NO: 188841 - protein, 200 aa, Unknown
  Bacterial polypetide isolated from the Sargasso Sea
MPNIKLPDGNSLRFDTKVTGFQIAEKISKSLSKQALIISVDGNLKDLNYEIDNDCSVKIYTAKDKEGLETIRHDTAHVLAMAVQELFTKTQVTIGPVIDNGFYYDFARKDPFTEEDLRKIEKKMLEIVERDEPTHREVWKRDKAIEHFKKAGEIYKAEIIKDIPKEEEVSVYFHGKWHDLCKGPHLSSTGKIGKFFKLTK

SEQ ID NO: 188842 - protein, 181 aa, Unknown
  Bacterial polypetide isolated from the Sargasso Sea
MPNIKLPDGNSISFEKKVTGLKIAEKISKSLSKQALVISVDGNLRDLNYEIDKDCTVKIHTAKDKEGLETIRHDTAHVLAMAVQELFPGTQVTIGPVIDNGFYYDFARKKPFTEEDLRKIEKKMLEIVERDEPTHREVWKRDKAVEHFKKAGELYKAEIIKDIPKEEEVSVYFHGKWHDLC

SEQ ID NO: 188843 - protein, 168 aa, Unknown
  Bacterial polypetide isolated from the Sargasso Sea
MPNIILADGKKLDFTESITGLKIAEKISKSLMKQALVMSVDGELKDLEHEIKKDSVVKIFTSKDKEGLETIRHDTAHILAMAVQELFPETQVTIGPIIEDGFYYDFARKEPFTNEDLEKIEKKMKEIVDRDEKTYREVWKRNDAVEHFKKKGEIYKAEIINSIPENEE

SEQ ID NO: 188844 - protein, 255 aa, Unknown
  Bacterial polypetide isolated from the Sargasso Sea
MDLIRHSTAHILAEAVQSVYPDTKVTIGPVIDDGFYYDFYTEKTFTEADLTLFEEKMNEIINKKVSFVPERLTRSDALKTFSEINEKFKIEIINDLPEEEDITIYKQGDWFDLCRGPHAPNSSFIKSFKLLSVAGSYWRGDENRESLQRIYGTAFFNKKDLKKHLEMIEEAKKRDHRKLGKELNLFSITDEIGPGLVLWHPKGSTIRNVIENYWREKHIDSNYELIYTPHIAKANLWETSGHTEFYSENMFSPRK

SEQ ID NO: 188845 - protein, 256 aa, Unknown
  Bacterial polypetide isolated from the Sargasso Sea
ITAKGESLSFYQHGEFIDLCRGPHVPHTGWLKSVKLTKVSGAYWRADASRENLTRVYGTAFFDSKDLKEYLHFLEEAKKRDHRVLGEKLHLFSFFDETPGMPFFHARGTTLFNLLADYMRKLLKTRKYIEVKTPLILSEELWHRSGHYDNYMENMFFTKLKLEDPKNKGAVKDNVVEERPMAVKPMNCPGHLMIYGTRLHSHKEFPLRIAEMGLVHRRELSGVRHGLFRVQAFTQDDAHHFCTAEQIVDEIGMLIN

SEQ ID NO: 188846 - protein, 152 aa, Unknown
  Bacterial polypetide isolated from the Sargasso Sea
IDLNLPERLDCSFINSNGIKERPVMIHRALFGSLERFIGILIEHYAGNLPVWLSPTKVVVTTVTEKCSDYANEVFKFLSSSNIKTEIDLRNEKIGYKIREHSNSKIPIIIIIGEKEKENNTVSVRRLGSNDIETLSLEEFVIVTKRQLRELC

SEQ ID NO: 188847 - protein, 320 aa, Unknown
  Bacterial polypetide isolated from the Sargasso Sea
SSVKIITSKDKEGLDAIRHDTTHIMAMAVQELFPGTKIAIGPTIKDGFYYDFSRKDPFTPEDLEKIEKKMKEIVVKNEPTKREVWERKKAKDHYKKIGESYKAQLVDSIPDDQEVSIYYHGKWYDLCRGPHLTSTGKVGKYFKLTKVSGAYWRGDSNNEMLQRIYGTSWPSQKELDEYLKRIEEAEKRDHRKLGKEMDLFHFREESPGAVFWHDKGWALFQKLVSYMRVKQEDAGYKEINTPEILDRSLWEKSGHWEKFGENMYTSTTPDEKVFAIKPMNCPGCVQVYNQGLKSYRDLPLKMSEFGKVHRYEPSGALPDY

SEQ ID NO: 188848 - protein, 224 aa, Unknown
  Bacterial polypetide isolated from the Sargasso Sea
MKLSTRPAKRVVSEELWDRAEGALADALNESGLEWEYQPGEGAFYGPKIEFTLRDCLGRNWQCGTLQYDPNLPERLDASYIAEDNNRKRPVMLHRAILGSFERFIGMLIEHYAGSFPAWLAPTQAVIMNITDKQADFAREAEKTLNQSGFRAKVDLRNEKIGFKIREHTLLKVPYLLVIGDREVETRSVAVRTREGVDLGSMPLEQFAAQLQQAVSRRGRQDLE

SEQ ID NO: 188849 - protein, 276 aa, Unknown
  Bacterial polypetide isolated from the Sargasso Sea
MVFWHPNGWTVYRKLRNFVRDRLKENNYIEVNTPQVIDRKLWEASGHWDKYRENMFITEIDEEHANEKRINALKPMNCPGHVQIYNQGIKSYKDLPLKYAEFGLCHRYEPSGTMHGLMRVRAFTQDDGHIFCTEDQIESETGLFINFLSDIYADLGFKNFDIKLSTRPEMRVGSDETWDKAEHSLETAIENLGHPYRIDEGDGAFYGPKLDFVLTDAIGREWQCGTFQLDFNLADRLEAKYIGEDGKKYTPVMIHRAVLGSFERFIGILIENYAGK

SEQ ID NO: 188850 - protein, 297 aa, Unknown
  Bacterial polypetide isolated from the Sargasso Sea
VAKNIPVRGWRNKKELDEYLLRLEEAEKRDHRKLGKEMDLFHFREESPGAVFWHHKGWTLFQTLVGYMRQKQKQAGYREINTPEILDKTLWEQSGHWEKFGENMYTSETPDEKTFAIKPMNCPGGIQVFNQGLKSYRDLPLKLSEFGKVHRYEPSGALHGLLRVRAFTQDDAHIFCTEDQITEECLTVTNLILEIYRDLGFKNVLLQFSDRPQKRVGDDKIWDKAESALLKAIKQSNLKYEINKGEGAFYGPKIDFVLKDSIGRDWQCGTLQVDLNLPSRLGSSYVASDGIKKVPVM

SEQ ID NO: 188851 - protein, 270 aa, Unknown
  Bacterial polypetide isolated from the Sargasso Sea
YKQGLKSYRDLPLRMSEFGKVHRYEPSGALHGLMRVRAFTQDDAHIFCTEDQITSESKKVCDLILSIYKDFGFNDVRIKYSDRPEKRVGDDAVWDKSEKALKDAMEATGLEYSLNPGEGAFYGPKLEFVLRDAIGRDWQCGTLQVDLNLPGRLGATFVDEDGQKKIPVMLHRALFGSLERFTGILIEHYAGHLPIWLSPVQVVVATITSDTNDYGHEVLNKIKLEKIRAEIDTRNEKIGYKIREHSNLKVPAILAIEKKEAEEATVSVRR

SEQ ID NO: 188852 - protein, 279 aa, Unknown
  Bacterial polypetide isolated from the Sargasso Sea
DLFHFREESPGSVFWHEKGWSLFQKLVSYMRMKQDQAGYKEINTPEILDRTLWEKSGHWEKFGANMYTSTTPDDKVFAIKPMNCPGCVQVFNQGLKSYRDLPLKMSEFGKVHRYEPSGALHGLLRVRAFTQDDAHIFCTEDQITEECLLVTNLILEIYKDLGFENVLLKYSDRPDLRVGDDSVWDKAEAALLKAIKESKLEYSINKGEGAFYGPKIEFVLRDAIGRDWQCGTLQVDLNLPGRLGASYVDKGGNKKIPVMLHRALFGSLERFIGIIIEHY

SEQ ID NO: 188853 - protein, 280 aa, Unknown
  Bacterial polypetide isolated from the Sargasso Sea
YKAELIEAIPENEDVSIYFHGEWHDLCRGPHLSSTGKIGKYFKLTKVSGAYWRGDSNNEMLQRIYGTSWATQKDLDEYLKRIEEAEKRDHRKLGREMDLFHFREESPGSVFWHERGWGLFQKLINYMRSRQDAAGYKEVNTPEVLDRQLWEKSGHWEKYGENMYTSETPDEKVFAIKPMNCPGHIQVFNQGLKSYRDLPLRFAEFGKVHRYEPSGALHGLLRVRAFTQDDAHIFCTEDQITSECLIVTNLILDIYKDLGFENVILKYADRPEVRVGDDSV

SEQ ID NO: 188854 - protein, 274 aa, Unknown
  Bacterial polypetide isolated from the Sargasso Sea
IGHAVKQIYSDIKMAIGPVIEDGFYYDIFSEYRFTPEDLIKIENRINKLIKTNYDVEILQVSKEEAIKTFQERDETFKLRIIEEIPEEGLINLYKHEEYIDMCRGPHVPNTRHLRHFKLLKLSGSYWRGNSENESLQRIYGTAWAKEKELKDYLTRIEEAEKRDHRKLGKKHSLFHIQEESPGMIFWHPNGWTIYQVLEKYIREILKKNDYLEIKTPQAVDKSLWEKSGHWEKFRDDMFTTASENRTYAIKPMNCPCHIQVFNQGLKSYKDLPI

SEQ ID NO: 188855 - protein, 270 aa, Unknown
  Bacterial polypetide isolated from the Sargasso Sea
LELLNELEDGTITFYNQGNFTDLCRGPHIPNTGYIKAVKLLSIAGAYWRGNENNKQLTRIYGITFEKQKDLNIYLEKLEEAKKRDHRKLGKELELFTFSEKVGQGLPLWLPKGTELKERLISFLKKAQTSSGYLPVSTPHIGHKDLYVCSGHYEKYGEDSFQSIKTPHDGEEFLLKPMNCPHHCEIFNSSPKSYKDLPLRLAEFGTVYRYEQSGELHGLTRVRGFTQDDAHIFCRPDQLEDEFKKVIDLVLYVFGALKFEEFVAQISLRD

SEQ ID NO: 188856 - protein, 223 aa, Unknown
  Bacterial polypetide isolated from the Sargasso Sea
NVILKYSDRPDLRVGDDSVWDKSEKALLKAIQASKLEYSVNKGEGAFYGPKIEFVLRDAIGRDWQCGTLQVDLNLPGRLGASFVDKDGSKKVPVMLHRALFGSLERFIGILIENYSGKLPFWISPLQIVVIPVSNEFDAYAIKVNNEIKKAGLTSEVDLKNHNLNYKIREHSLTKVPILLICGKKEVDSNTVTIRRLDSEKQESMDIKKFLKTYTALNKVSPN

SEQ ID NO: 188857 - protein, 159 aa, Unknown
  Bacterial polypetide isolated from the Sargasso Sea
QVDFSMPERLNSSYIDVDGKKQPPVMLHRAILGSFERFIGILIENYSGNLPIWLCPLQIVVMGITDRNNDACIYTKSKLINFGFRASVDTRNEKVGFKIREHTMQRIPFLIIIGDKEEKNNEISIRTREGKDLGKMTLDKFKLIMDESIRKKSLVESKS

SEQ ID NO: 188858 - protein, 273 aa, Unknown
  Bacterial polypetide isolated from the Sargasso Sea
EVAEKISKSLAKQAMVMSVDGELKDLDYLIDKDCSVKIFTSKNPEGLETIRHDTAHILAMAVQELFPGTQVTIGPVIENGFYYDFARKEPFTEDDLLKIENKMKEIVDRDEITKREVWERNKAIDHFKKKGEIYKSELIKAIPEKEDVSIYFHGDWHDLCRGPHLSSTGKIGKYFKLTKVSGAYWRGDSKNEMLQRIYGTSWATQKDLDEHLKRIEEAEKRDHRKLGREMDLFHFREESPGSVFWHERGWALFQNLINYMRHRQDTAGYKEIN

SEQ ID NO: 188859 - protein, 233 aa, Unknown
  Bacterial polypetide isolated from the Sargasso Sea
MNCPHHCEIYNFKPHSYKDLPYRIAEFGTVYRYEQSGELHGMTRVRGFTQDDAHIFCTIDQVKDEVIGVMDLILKVFKSLSFENFKVQISLRDKDDNSKYMGDEKLWDKAENDLIESVKVKGIDAVVEYGEAAFYGPKIDFMVRDSLEREWQLGTIQVDYQLPQRFNLTYVDKNNEKKTPVLIHRAPFGSLERFIAILIEHCEGNFPLWLAPEQTIILPINENVIQYAEKINA

SEQ ID NO: 188860 - protein, 199 aa, Unknown
  Bacterial polypetide isolated from the Sargasso Sea
RALEDAIDKWSLDYEISVGDGAFYGPKLDFVLTDAIDREWQCGTLQLDFNLPERLDAKYVGEDGEKHQPVMMHRAILGSVERFIGILIEEYDGNFPIWLAPIQAVIMNISQKHEEKATEYADFLKSKGFRVKLDLRNEKITYKIRDHSIQRVPFQLVVGDKEQNSNSLSVRARKGEDLGSMKLDEFSNFLSKKIKSKEV

SEQ ID NO: 188861 - protein, 234 aa, Unknown
  Bacterial polypetide isolated from the Sargasso Sea
MRRKQELDGYVEVNTPQLVDRKLWEASGHWEKYQENMFVVEVDEEHAREKAVNALKPMNCPCHVQVYNQGLKSYRDLPLRMAEFGSCNRYEPSGALHGVMRVRGFTQDDAHIFCREDQIESETKKFINFLSNVYRDLGFEKFSIKFSDRPEKRSGSNEVWDKAEDALKSATIAAGYDFEINPGEGAFYGPKLEFVLTDAIGRDWQCGTLQVDFVLPDRLDANYIGEDGNKHRPV

SEQ ID NO: 188862 - protein, 288 aa, Unknown
  Bacterial polypetide isolated from the Sargasso Sea
KVSGAYWKGDSKNSMLTRIYGTAFSNDKDLQNHLDNIEEALKRDHRKLGKEMDLFHFQDEAPGMVFWHPNGWTVYRKLRNFVRDRLKENNYIEVNTPQVIDRKLWEASGHWDKYRENMFITEIDEEHANEKRINALKPMNCPGHVQIYNQGIKSYKDLPLKYAEFGLCHRYEPSGTMHGLMRVRAFTQDDGHIFCTENQIESETGLFIEFLSSIYADLGFKNFDIKLSTRPEMRVGSDETWDKAEQALEAAIKNLGYSYRIDEGDGAFYGPKLDFVLTDAIGREWQCG

SEQ ID NO: 188863 - protein, 276 aa, Unknown
  Bacterial polypetide isolated from the Sargasso Sea
MYGVGPSIEDGFYYYFLFENNIKEEDLLKIEKEMHKIVQQKQIFSKEFVNDKEALKLFSNQQFKQELINTADKDEGVNGEKVSIYKNGDFIDLCRGPHIPNTGYLKHFKLTKLAGAYWRGIETNPQLQRIYGTSWFSKDDLNKYLTRQKEAEKRDHRKLGKELKLFTTADELGPGQYLWQPNGSILRNQIEEFSKSAHISNGYEFVNTPHIGRSILWETSGHLDHYKEGMYPALSTEDTNEDYYLKPMNCPFHILVYKNDIRSYRDLPIRYFELGS

SEQ ID NO: 188864 - protein, 270 aa, Unknown
  Bacterial polypetide isolated from the Sargasso Sea
QVLALAVKNLYPDAKLAIGPTIDDGFYYDFFMDKPISSDDLPKIEDEMNKIIKSKSKITKTYHSKKEALEVFDGLDEGFKAEIITDSGQKNDFQLYTQDETGFIDLCRGPHLPNLDMCGEFKLTKVAGAYWRGDSTKPMLTRIYGTAWNTRKELEAYLNQLAEAEKRDHRKLGKEMRLFHFQDEAPGMVFWHPSGWTIYSELQNYVRKMQRNAEYQEINTPQVVDRKLWEKSGHWDKYRENMFITEIDEEHANEKRVNALKPIELSMSCS

SEQ ID NO: 188865 - protein, 129 aa, Unknown
  Bacterial polypetide isolated from the Sargasso Sea
LWVESGHWDKYKDNMYKTIIDDRELMIKPMNCPGHVQIYNQGIKSYKVLPLRMAEFGSCLRNEPSGALHGLMRVRNFVQDDAHIFCTEDQIESETISFCKLLQDVYRELGFEEVSIMYADRPDQRVGED

SEQ ID NO: 188866 - protein, 201 aa, Unknown
  Bacterial polypetide isolated from the Sargasso Sea
MSSGVTIILPDGSERVLGGDATGADLAADLGGRAAKEALIAVADGVELDLNRPLPDGANVSLVFPASEEGLEVLRHSTAHVLAQAVLTLYPGATFSIGPPIEDGFYYDFDLPDGQTFSDEDLEKIASKMKEIVGRKQPFIRSEVERREAERLFANHPYKLEILDGEADDPSSGPEGDVITTYRNTDEFVDLCRGPHVPNTG

SEQ ID NO: 188867 - protein, 310 aa, Unknown
  Bacterial polypetide isolated from the Sargasso Sea
MEEARKRDHRVLGKQLDLFTTSPLVGSGLVLWMPKGATLRATLESFVRDELAARGYEPVYTPHIGKVDLYKISGHYPYYSDSQFKPIVMHEDEQYLLKPMNCPHHTMIYKSRPHSYKDLPLRLAEFGTVYRYEQSGELGGMTRVRGFTQDDAHIFCRPEQVEEEVEGCIEFTLKVLESLAFDNFRVRLGFRDQASDKYVGPPERWDEAEAAIERVARRMNLPGCEPEPGEAAFYGPKIDFVVNDSLGREWQLGTVQLDYNLPSKERFDLEYIGADNAKHQPVMIHRAPLGSLERFVGVLIEHFAGAFSLW

SEQ ID NO: 188868 - protein, 243 aa, Unknown
  Bacterial polypetide isolated from the Sargasso Sea
MPTITLPDGNNINFPKKVTGAEVAEKISKSLAKQAMVISVDGELKDLDYLIDKDCSVKIFTSKNPEGLETIRHDTAHILAMAVQELFPGTQVTIGPVIENGFYYDFARKEPFTEDDLLKIENKMKEIVDRDEITKREVWERNKAIDHFKKKGEIYKSELIKAIPEKEDVSIYFHGDWHDLCRGPHLSSTGKIGKYFKLTKVSGAYWRGDSKNEMLQRIYGTSWATQKDLDEHLKRIEEAEKRD

SEQ ID NO: 188869 - protein, 225 aa, Unknown
  Bacterial polypetide isolated from the Sargasso Sea
FKDFDIKLSTRPEMRVGSDKTWDKSEKALEDAIKNLGYPYRIDEGDGAFYGPKLDFVLTDAIGREWQCGTFQLDFNLAERLDAQYVGEDGKKHYPVMIHRAVLGSFERFIGILIENYSGKLPFWLAPQQVVIASIISDVNDYSIEIMEQLKKEGIRAEVDLRNEKISYKIREHSSKKVPIIIAIGKSEKSEKTVSIRRIGSSETEILELNEALKQIKKENILVST

SEQ ID NO: 188870 - protein, 174 aa, Unknown
  Bacterial polypetide isolated from the Sargasso Sea
MDIKIKDAIERQWQCSTIQLDFNLPTRFNMSFINTKGIKEEPYMIHRALLGSIERFFGILIEHYAGWFPAWLAPVQCTILTINSESHDYAKNVLSELQKSNIRVDYDDSSEKIGYKIKQAISQKIPYLLIIGDQEVSDNKITIRHKKENMGSLSVADFIEKFGPEFTSPIDNVI

SEQ ID NO: 188871 - protein, 227 aa, Unknown
  Bacterial polypetide isolated from the Sargasso Sea
LGFENVILKYSDRPDQRVGEDDVWDKSEKALLEAIKASNLEYTVNKGEGAFYGPKIEFVLRDAIGRDWQCGTLQVDLNLPGRLGASFVDKDGSKKVPVMLHRALFGSLERFIGILIENYSGKLPFWISPLQTMVIPVSEDFDNYAKEVNKKIKKAGITSEVDLKNHNLNYKIREHSLSKVPILLICGKKEVDSNSVTIRRLDSNKQENMDLELFIKKYSALNKVLSN

SEQ ID NO: 188872 - protein, 182 aa, Unknown
  Bacterial polypetide isolated from the Sargasso Sea
MENEEKFIDTLRHDTAHVMAMAVQELYPETKVTIGPVIENGFFYDFSRETPFTEKDLIVIEKKMKEIVNRDIPVTFKIVSRKEAIEIFSKIGENYKVEIINSIPENEEIKIYYHGDWFDLCRGPHLNSSGEIGKAFKLTKVAGAYWRGDSKNEMLQRIYGTAWETQEELDNYLNLIKEAEKR

SEQ ID NO: 188873 - protein, 107 aa, Unknown
  Bacterial polypetide isolated from the Sargasso Sea
AGLFPTWLSPKQVVIMNITDKLADYVHEIVQKLNKLGIRAAADLRNEKIGFKIREHTLKRIPYLLVVGDKEVEQQEVAVRTRTGEDLGKFNVDDFVAKISEEIKNRQ

SEQ ID NO: 188874 - protein, 322 aa, Unknown
  Bacterial polypetide isolated from the Sargasso Sea
DLECKITKDSSIKIFTSKDKEGLDTIRHDTAHILAMAVQELFPETQVTIGPVIEDGFYYDFARKESFTSEDLEKIEKKMKEIVDRDEKTYREVWKRNDAVEHFKKRGETYKAEIINSIPEKEEVSIYFHGKWHDLCRGPHLVSTGKIGKYFKLTKVSGAYWRGDSNNEMLQRIYGTSWPSQKELDDYLKRIEEAEKRDHRKLGKEMDLFHFREESPGSVFWHQKGWSLFLKLVSYMRMKQDQAGYEEINTPEILDRSLWEKSGHWEKFGENMYTSTTPDEKVFAIKPMNCPGCVQVFNQGLKSNRDLPLKMSELEKYIDMNH

SEQ ID NO: 188875 - protein, 256 aa, Unknown
  Bacterial polypetide isolated from the Sargasso Sea
MPTITLPDGKNLEFSKEVTGLEIAEKISKSLLKQALIMSVNGELKDLYFSVKKDCSIKIFTAKDPEGLEVIRHDTAHIMAMAVQELYPGTQVTIGPVIENGFYYDFARKEPFTEDDLEKIEKKMSEIIDKDVKTRREVWKRDKAISHFKKIGEKYKAEIIESIPEKEELTVYHHGDTWHDLCRGPHLVSSGKIGKAFKLTKVAGAYWRGDSKNEMLQRIYGTSWASQKDLDDYLKRKKKPRKGITENLKRDGLISF

SEQ ID NO: 188876 - protein, 233 aa, Unknown
  Bacterial polypetide isolated from the Sargasso Sea
MPNITLPDGKKISFEKSISGFEVAEKISKSLSKQALLISVDGELKDLNHNISKDSSIKIFTSKDKEGLETIRHDTAHILAMAVQELFPGTQVTIGPVIEDGFYYDFARKESFTSEDLEKIESKMKEIVDRDEKTYREVWKRNDAIEHFKKKGEIYKAEIIESIPEGEEVSLYFHGDWHDLCRGPHLSSTGKIGKFFKLTKVSGAYWRGDSNNEMLQRVYGTSWSTQKELDDYL

SEQ ID NO: 188877 - protein, 278 aa, Unknown
  Bacterial polypetide isolated from the Sargasso Sea
MLQRIYGTAWPDSKDLDNYILQQEEAEKRDHRKLGRQLDLFHFQEEAPGMVFWHPKGWSIYSVLKNFIKEKQDEFDYQEINTPQIVDRKLWEASGHWDKYRENMFITEIDEEHANEKRTNALKPMNCPCHVQVFNQGLRSYKDLPVRFSEFGSCHRYEASGTLHGLMRVRGFTQDDGHIFCTEDQIQDETKNFIELLSDIYAQLGFEAFEIKLSTRPEVRAGTDEIWDKAELALENAIKNLKLPYEVVEGDGAFYGPKLDFVLIDALGREWQCGTFQA

SEQ ID NO: 188878 - protein, 267 aa, Unknown
  Bacterial polypetide isolated from the Sargasso Sea
FRENMFITQGEDEKPMALKPMNCPAHVQIFKQGIKSYRDLPYRMSEFGSCHRNEPSGSLHGLMRVRGFTQDDAHIFCTKDQINSETESFCKLLTEIYHDFGFTKINIRFADRPEKRAGDDSTWDQAENSLENAIKAINLPYQKDPGGGAFYGPKLDFVLTDTLGREWQCGTLQVDFVLPERLDAFYIDERGSKVRPVMLHRAILGSMERFIGVLMESTGGKFPLWLAPIQIMITNISEESIEYAKKIYEICINRNLRAEIDIRNEQL

SEQ ID NO: 188879 - protein, 294 aa, Unknown
  Bacterial polypetide isolated from the Sargasso Sea
GMVFWHSKGWTIYNIIKDYIRNITLKNGYQEVNTPQVLDRKLWEKSGHWDKFGEMIFTTSSEKKDYAIKPMNCPAHVQIFNQGLKSYKDLPIKISEFGLVHRNEPSGTLHGLMRARQFVQDDAHIFCTEEQLSKEIHNLIKMTFMVYKYFGFQNISIALSTRPEKRVGNEELWDKSEDILKKVLSESVESFSIQEGEGAFYGPKIEFSLTDSLDRVWQCGTIQLDFSMPSALSASFIDEKGEKSTPVMIHRAILGSIERFIGILIEHYGGNLPFWLSPEQIIIANITDKHIECA

SEQ ID NO: 188880 - protein, 154 aa, Unknown
  Bacterial polypetide isolated from the Sargasso Sea
KKAGEIYKAEIIKDIPKEEEVSVYFHGKWHDLCRGPHLSSTGKIGKYFKLTKVSGAYWRGDSKNEMLQRIYGTSWPSQKELDNYLKMIEEAEKRDHRKLGKEMDLFHFREESPGSVFWHERGWNLFQKLIDYMRLRQKKAGYKEINTPEILDRG

SEQ ID NO: 188881 - protein, 165 aa, Unknown
  Bacterial polypetide isolated from the Sargasso Sea
MPIITLPDGNNIDFPNKVTGLEVAEKISKSLAKQAMVISVDGELKDLDFLIENDCSVKIFTSKNPEGLETIRHDTAHILAMAVQELFPGTQVTIGPVIENGFYYDFARKEPFTEDDLIKIENKMKEIVDRNEITKREVWDRNKAISHFKKKGEFYKAELMKRTEN

SEQ ID NO: 188882 - protein, 157 aa, Unknown
  Bacterial polypetide isolated from the Sargasso Sea
GTLQVDFVLPDRLDASYVGKDGAKHRPVMLHRAILGSFERFIGILIEHYAGRFPFWLAPLQVVVASITDEANLYAEKVKNQLIEAGLTVETDLRNEKINFKIREHSVAKVPIILVVGTKEIEKNTVAMRRLGGDNQEILALEAAVAKLQTEAIIPCN

SEQ ID NO: 188883 - protein, 310 aa, Unknown
  Bacterial polypetide isolated from the Sargasso Sea
HFKKKGEIYKAELIEAIPENEDVSIYFHGEWHDLCRGPHLSSTGKIGKYFKLTKVSGAYWRGDSNNEMLQRIYGTSWANQKQLDDYLKRIEEAEKRDHRKLGKEMNLFHFREESPGSVFWHEKGWALFQKLINYMRSRQDAAGYKEVNTPEILDRQLWEKSGHWEKYGENMYTSETPDEKVFAIKPMNCPGHIQVFNQGLKSYRDLPLRIAEFGKVHRYEPSGALHGLLRVRAFTQDDAHIFCSEDQITSECLEVTNLILDIYKDLGFENVILKYADRPEVRVGDDKIWDKAEASLLEAVKASKLEYSIN

SEQ ID NO: 188884 - protein, 259 aa, Unknown
  Bacterial polypetide isolated from the Sargasso Sea
MPNIKLSDGNTLAFDKKVTGFKIAEKISKSLSKQALVISVDGNLRDLNFEIEHDCSVKIYTSKDKEGIETIRHDTAHVLAMAVQELFPGTQVTIGPVIDNGFYYDFARKETFTEEDLQKIEKKMKEIVERDEQTRREVWERDKAIEHFKKAGEIYKAEIIKSIPKGEEVSIYFHGKWHDLCRGPHLTSTGKIGKYFKLTKVAGAYWRGDSNNEMLQRIYGTAWPSQKELDEYLKRIEEAEKRDHRKLGKEMNLFHFREE

SEQ ID NO: 188885 - protein, 231 aa, Unknown
  Bacterial polypetide isolated from the Sargasso Sea
IYKDLGFEDVILKYSDRPELRVGDDSVWDKAEAALLEAVKATKLEYTINKGEGAFYGPKIEFVLRDAIGRDWQCGTLQVDFNLPGRLGASYVDKDGTKKVPVMLHRALFGSLERFIGILIENYAGKFPFWISPLQTVVIPISEDFEEYGSKVSQKIKEAGITSIVDLKNHNLNYKIREHSLAKVPILLICGKKEVDSNSVTIRRLDSNKQENMELNKFLKTFSALNKASSI

SEQ ID NO: 188886 - protein, 312 aa, Unknown
  Bacterial polypetide isolated from the Sargasso Sea
CLLMAFKKDLHDVIEADASVSIITIDSDEGVEIMRHTLTAQVLARAIKNLYPKSKLAIGPTVQDGFYYDVESDESISSDDLSKIEEEMKKIIKTKSAITKKLVSKKEALKIFKSNKESYKEIIINESDQDDNFQLYYQDDEEFVDLCRGPHLPNLGFIGSFKLTKVSGAYWKGDSKNSMLTRIYGTAFGNDKDLQNHLDNIEEALKRDHRKLGKEMDLFHFQDEAPGMVFWHPNGWTVYRKLRNFVRDRLKENNYIEVNTPQVIDRKLWEASGHWDKYRENMFITEIDEEHANEKRVNALKPMNCPGPCSNI

SEQ ID NO: 188887 - protein, 285 aa, Unknown
  Bacterial polypetide isolated from the Sargasso Sea
RLEEAEKRDHRKLGKEMDLFHFREESPGSVFWHEKGWLLFQRLIEYMRMKQRLAGYKEINTPELLDKSLWEKSGHWEKFGEHMFTSETPDEKTFAVKPMNCPGCVQIFNQGLKSYRDLPLKLSEFGKVHRYEPSGALHGLLRVRAFTQDDAHIFCTEDQITEESLSVTNLILEIYKDLGFKNVILKYSDRPKERVGEDSVWDKSESALLTAIKKSKLEYTINKGEGAFYGPKIEFVLRDAIGRDWQCGTLQVDLNLPGRLGASYVAKDGTKKIPVMLHRALFGSL

SEQ ID NO: 188888 - protein, 226 aa, Unknown
  Bacterial polypetide isolated from the Sargasso Sea
YHHGDTWHDLCRGPHLASSSKIGKAFKLTKVSGAYWRGDSNNEMLQRIYGTCWSTKKELDDYLHRLEEAEKRDHRKLGKEMDLFHFREESPGSVFWHEKGWLLFQRLVEYMRMKQRLAGYKEINTPELLDKTLWEKSGHWEKFGEHMFTSETPDEKTFAVKPMNCPGCVQVFNQGLKSYRDLPLKLSEFGKVHRYEPSGALHGLLRVRAFTKDDAHIFCTEDQITE

SEQ ID NO: 188889 - protein, 236 aa, Unknown
  Bacterial polypetide isolated from the Sargasso Sea
MRSYRDLPLRIAEFGKVFRFEPSGALHGLMRVREFTQDDAHIYCLKEQMEEECEKVINLTLDIYKDFGFENVKIKFSDRPKKRIGDDDTWDFLEKSLLGSLKKLNLEFNVNKGEGAFYGPKIEFVLVDAIGREWQCGTLQVDLNLPPRLGANFIDKDGSKKHPVMLHRAFFGSIERFIGILIENYAGRLPHWLAPVQVAIATINDNCIEYSKTIGNHLSKDGIKFKFDFRNEKLNY

SEQ ID NO: 188890 - protein, 312 aa, Unknown
  Bacterial polypetide isolated from the Sargasso Sea
IEKKMSEIIDRDVKTKREVWKRKEAIKHFKKIGEKYKAEIIESIPENEELSVYHHGDTWHDLCRGPHLASSGKIGKAFKLTKVSGAYWRGDSNNEMLQRIYGTCWSTKKELDDYLHRLEEAEKRDHRKLGKEMDLFHFREESPGAVFWHEKGWLLFQRLVEYMRVKQRLAGYKEINTPELLDKSLWEKSGHWDKFGEHMFTSETPDEKTFAVKPMNCPGCVQVFNQGLKSYRDLPLKLSEFGKVHRYEPSGALHGLLRVRAFTQDDAHIFCTEDQITEESLSVTNLILEIYKDLGFENVILKYSDRPEKRVG

SEQ ID NO: 188891 - protein, 302 aa, Unknown
  Bacterial polypetide isolated from the Sargasso Sea
FHFQEEAPGMVFWHANGFHIFNQVKNYITTYLIENNYKIIDTPQILDKSLWKKSGHLDKFSDLIFDAGSENKEFAIKPMSCPGHIQVYNHGLKSYRDLPIKYAEFGKVHRNEPSGTLHGLLRLRAFTQDDAHIFCTIHQVEDEIGKLIDNIYDIYNIFGFKDIFVELSTRPEKRVGDDRIWDISESALKKTLESKNVKWKINEGDGAFYGPKIDFSLKDSIGRVWQLGTIQLDFSMPERLSATYVNEEGNRVAPVMIHRAILGSLERFVGILIEEYSGNFPLWLSPQQIQIINITSAQDDYC

SEQ ID NO: 188892 - protein, 227 aa, Unknown
  Bacterial polypetide isolated from the Sargasso Sea
IYAHGWWTINGEKMSKSLGNVIDPNYLVDTYGIDQVRYFLLKEIPFGQDGNFSEELLVNRINSDLANDFGNLVQRVLAMIQKYSSGNIPKADNLNETDLSLIELPENIYNINNAEMNNYQFNIILENIWKIIRSANSYVDNNEPWNLHKNNNFKRLNNVLYTLLNTIYKVTILLQPFLPESSKKIFHLLKQKEEISFSEIKNNIQEGVKLEKSQPIFPRFDKKDLKI

SEQ ID NO: 188893 - protein, 259 aa, Unknown
  Bacterial polypetide isolated from the Sargasso Sea
MPNITLPDGKQIKFDKPVNGLDICNKISKSLSKNALIMSVDGEQKDLSFNIEKDSTVKIFTSKDREGVDTIRHDTAHILAMAVQEIFPGTQVTIGPVIDNGFYYDFARKEPFTQDDLDKIEKRMKEIVDRDEETRREVWERNKAADHFKKKGEIYKSEIIESIPEGEEISLYFHGKWHDLCRGPHLSSTGKIGKHFKLMKVSGAYWRGDSNNEMLQRIYGTAWPSQKELDDYLKRIEEAEKRDHRKLGKEMDLFHFREE

SEQ ID NO: 188894 - protein, 275 aa, Unknown
  Bacterial polypetide isolated from the Sargasso Sea
FGKVHRYEPSGALHGLMRVRAFTQDDAHIFCTEDQITEESLSVTNLILDIYKDLGFSNVILKYSDRPETRVGNDKVWDKAEAALLEAVKASKLEYSINKGEGAFYGPKIEFVLRDAIGRDWQCGTLQVDLNLPERLGATFVDKDGSKKIPVMLHRALFGSLERFIGILIENYAGKLPFWINPLQVVVIPVSAEFDDYAKKIYNKINSIGLNCEVDLKNHNLNYKIREHSLSKVPILLICGKKEVDSNTVTIRQLDSTKQENMEVKKFLETYSSLN

SEQ ID NO: 188895 - protein, 154 aa, Unknown
  Bacterial polypetide isolated from the Sargasso Sea
DFSMPIRLDATYVDIDNEKRNPVMLHRAILGSFERFIGILIEEYEAKFPIWIAPYQIILLSITDRNIEKCLKFNELINNNGYRSKVDVRNEKIGYKIREATLGRVPLIAVIGDKEEEIDSVALRALDGTNLGIFDLPNLYKLMDELIEKKGRTV

SEQ ID NO: 188896 - protein, 286 aa, Unknown
  Bacterial polypetide isolated from the Sargasso Sea
WHYKGWTLFQTLVNYMRQKQKNAGYKEINTPEILDKTLWEQSGHWEKFGENMYTSETPDEKIFAIKPMNCPGGIQVFNQGLKSYRDLPLKLSEFGKVHRYEPSGALHGLLRVRAFTQDDAHIFCTEDQITEECLSVTNLILEIYKDLGFEKVLLQFSDRPKKRVGDDNIWDKAETALLNAIKQTKLKYEINKGEGAFYGPKIDFVLRDTIGRDWQCGTLQVDLNLPGRLGSTYIASDGSKKVPVMLHRALFGSLERFIGILIEHYAGKLPLWLAPLQVVILPIASE

SEQ ID NO: 188897 - protein, 146 aa, Unknown
  Bacterial polypetide isolated from the Sargasso Sea
MPQIQLLDGKKIKFDKSINGFDLIKKISKSLEKMALIMEVDGDLKDLSHLITKDAKVRIITSKDKEGLEVIRHDAAHIMAMAVQELFPSTQVTIGPVIENGFYYDFARQEPFTSDDLNKIEKKMSEIIDRDVKTKREVWKRKEAIK

SEQ ID NO: 188898 - protein, 240 aa, Unknown
  Bacterial polypetide isolated from the Sargasso Sea
MIVTNLILEIYKDLGFENVILKYSDRPNVRVGDDNVWDKAETALLEAVKASKLEYSINKGEGAFYGPKIEFVLRDAIGRDWQCGTLQVDFNLPGRLGASYVDKDGTKKVPVMLHRALFGSLERFIGILIEHYAGKFPFWISPLQTVVIPISEEFDNYAIQVSKKIKKAGISSFVDLKKHNLNYKIRDHSHAKIPLLLICGKKEVDSNSVTIRRMDSNKQENMDLNLFLKKFSAFNKASSN

SEQ ID NO: 188899 - protein, 286 aa, Unknown
  Bacterial polypetide isolated from the Sargasso Sea
LGKEMDLFHFREESPGSVFWHERGWTLFQKLIDYMRLRQKKAGYKEINTPEILDRGLWEKSGHWEKFGEHMYTSTTPDEKIFAIKPMNCPGCVQVFNQGLKSYRDLPLKMSEFGKVHRYEPSGALHGLMRVRAFTQDDAHIFCTEDQITQESLTVTNLILDIYKDLGFKNVILKYSDRPEVRVGDDKVWDKSEAALLEAVKETKLEYSINKGEGAFYGPKIEFVLRDAIGRDWQCGTLQVDLNLPERLGASYVDKDGSKKIPVMLHRALFGSLERFIGILIENYSG

SEQ ID NO: 188900 - protein, 227 aa, Unknown
  Bacterial polypetide isolated from the Sargasso Sea
MLNITLQDGNKLKFDKKTTGLEIAEKISKSLSKNALLISIDGKLKDLNTVIEKDCSVKIFTSKDKEGLETIRHDTAHILAMAVQELFPGTQVTIGPVIEDGFYYDFARKKPFTEDDLNKIENKMKEIVGRDEKTIREIWPRDKAIEHFKKIGEIYKAEIIKSIPEGEEVSIYFHGKWHDLCRGPHLTSTGKIGKFFKLTKVAGAYWRGDSNNEMLQRVYGTSWSTQK

SEQ ID NO: 188901 - protein, 162 aa, Unknown
  Bacterial polypetide isolated from the Sargasso Sea
MPIITLPDGKNIEFPKEVTGLDIAEKISKSLLKQALIMSVDDELKDLYFSIKKDCSVKIFTAKDPEGLEVIRHDTAHIMAMAVQELYPGTQVTIGPVIENGFYYDFVRKEPFTEDDLEKIEKKMSEIIDKDVKTRREVWKRDKAISHFKKIGENYKAEIIES

SEQ ID NO: 188902 - protein, 200 aa, Unknown
  Bacterial polypetide isolated from the Sargasso Sea
MPTITLPDGNNLNFSKKVTGVEVAEKISKSLAKKAMVISVDGELKDLDYLIEKDCSVKIFTSKNPEGLETIRHDTAHILAMAVQELFPGTQVTIGPVIENGFYYDFARKEPFTEDDLVKIENKMKEIVDRDEITKREVWDRNKAIDHFKKKGEIYKSELIKAIPEKEDVSIYFHGDWHDLCRGPHLSSTGKIGKYFKLTK

SEQ ID NO: 188903 - protein, 129 aa, Unknown
  Bacterial polypetide isolated from the Sargasso Sea
MPIITLPDGKNIDFPNKVTGLEVAEKISKSLAKQAMVISVDGELKDLEHLIEKDCSVKIFTSKNPEGLETIRHDTAHILAMAVQELFPGTQVTIGPVIENGFYYDFARKDPFTEDDLTMIENKMKEIVD

SEQ ID NO: 188904 - protein, 320 aa, Unknown
  Bacterial polypetide isolated from the Sargasso Sea
IRINGELDDLSTVMDADAEVAIITDKNEEEALDLIRHDTAHVLAEAVQELFPGTQVTIGPNIENGFYYDFAREESFSTEDLEAIEAKMREIIDRDDVFTKEVWDRDEAVKTFSDMGEKYKAELIEGLPEDEEVKIYRQGKWFDLCRGPHLPSTGRIGKAFKLMKVAGAYWRGDSNKDMLQRIYGTAWRTEKELKKHLLMLEEAEKRDHRRLGREMGLFHQQEQATGSVFWHPKGWTFYRTIQKYMRKRLEAGGYVEVNTPQMVDRTLWEDSGHWDKFRENMFIAESEDRMLAIKPMNCPCHVQIFKQGQTSYRDYPIAWP

SEQ ID NO: 188905 - protein, 244 aa, Unknown
  Bacterial polypetide isolated from the Sargasso Sea
FSAEDLPKIEKKMRQIIEQNQPFTREIWSRAEAIEFFKNKGEHFKVELIQDLPKDETITIYKQGKWLDLCRGPHMPSTNHIGTAFKLMKVAGAYWRGDSSKPMLSRIYGTAWRTQEELDTHLHQLEEAEKRDHRKLGKEMELFHFQDEAPGQVFWHHKGWTIYTELLAYMRRKVHNHNYIEVNTPQMLDSRFWQASGHWDKYRENMFIIDDDSQVQKDKNPYALKPMSCPGNAQLYNYGVKSYR

SEQ ID NO: 188906 - protein, 278 aa, Unknown
  Bacterial polypetide isolated from the Sargasso Sea
IVDRDEKTRREVWERKKAIDHFKKNGEIYKSEIIKSIPENEEVSLYFHGEWHDLCRGPHLPSTGKIGKYFKLMKVSGAYWRGDSKNEMLQRIYGTSWASQKELDDYLKRIEEAEKRDHRKLGKEMDLFHFREESPGSVFWHEKGWTLFQKLIDYMRLRQKRAGYKEINTPEILDRSLWEKSGHWEKFGEHMYTSTTPDEKIFAVKPMNCPGCVQVFNQGLKSYRDLPLKMSEFGKVHRYEPSGALHGLMRVRAFTQDDAHIFCTEDQITSESLSVTNL

SEQ ID NO: 188907 - protein, 243 aa, Unknown
  Bacterial polypetide isolated from the Sargasso Sea
MPIITLPDGNNIDFPNKVTGTEVAEKISKSLAKQAVVMSVNGELKDLNHLIDNDCSVKIFTSKNPEGLETIRHDTAHILAMAVQELFPGTQVTIGPVIENGFYYDFARKEPFTEDDLVKIENKMKEIVDRDEITKREVWERNKAISHFKKKGEIYKAELIEAIPENEDVSIYFHGEWHDLCRGPHLSSTGKIGKYFKLTKVSGAYWRGDSNNEMLQRIYGTSWATQKDLDEYLKRIEEAKKEI

SEQ ID NO: 188908 - protein, 270 aa, Unknown
  Bacterial polypetide isolated from the Sargasso Sea
IWEKFGEHMYTSTTPDEKIFAIKPMNCPGCVQVFNQGLKSYRDLPLKMSEFGKVHRYEPSGALHGLMRVRAFTQDDAHIFCTEDQITQESLSVTNLILDIYKDLGFKNVILKYSDRPEVRVGDDKVWDKSEAALLEAVKESKLEYSINKGEGAFYGPKIEFVLRDAIGRDWQCGTLQVDLNLPERLGASYVDKDGSKKIPVMLHRALFGSLERFIGILIENYAGKFPFWISPLQVVVIPVSDDFDKYSREVANKVNNSGINCQVDLKITT

SEQ ID NO: 188909 - protein, 314 aa, Unknown
  Bacterial polypetide isolated from the Sargasso Sea
FTTEDLAAIESKMHELADRSIPLERITYSRDEAVKFFTDIGEKYKAEIIASIPEEEDISLYRQGEFVDLCRGPHVSNTGILKDFKLTKVAGAYWRGDSRNEMLQRIYGTAWNSRKELDNYLRRVEEAEKRDHRKIGKQLDYFHFQEEAPGMVFWHEKGWSLFKSVEKHIRDVCYADYQEVHTPQVIDRSLWEKSGHWDKFHDMIFQTNSDNREYAIKPMNCPGHIQIFNEGLRSYRDLPFRIAEFGVVHRNEPSGTLHGLLRARRFTQDDAHIFCQEDDLQEEVGRLIDKTFEVYRDFGFNEVEMALSLRPEQR

SEQ ID NO: 188910 - protein, 145 aa, Unknown
  Bacterial polypetide isolated from the Sargasso Sea
LGASYVAKDGNKKVPVMLHRALFGSLERFIGILIENYAGKLPFWLSPAQAVVCPIAEENNDYVKKLFEDLFKEGIKCEMDLRNEKINYKVREHSLAKVPFIIVCGKKEVADNTVTVRKLGSDKQEIMKREDLIKNMLASNKLPLN

SEQ ID NO: 188911 - protein, 312 aa, Unknown
  Bacterial polypetide isolated from the Sargasso Sea
TSKDKEGLEVIRHDAAHIMAMAVQELFPGTQVTIGPVIENGFYYDFARKESFSSEDLKKIEKKMSEIIDRDVKTRREVWERDKAITHFKKIGEKYKAEIIESIPKNEELSVYHHGDTWHDLCRGPHLTSSSKIGKAFKLTKVSGAYWRGDSNNEMLQRIYGTCWSSKKELDDYLHRLEEAEKRDHRKLGKEMDLFHFREESPGSVFWHEKGWLLFQRLVEYMRMKQRLAGYKEINTPELLDKTLWEKSGHWEKFGEHMFTSETPDEKTFAIKPMNCPGCVQVFNQGLKSYRDLPLKLSELEKFIDMNLRERC

SEQ ID NO: 188912 - protein, 138 aa, Unknown
  Bacterial polypetide isolated from the Sargasso Sea
MPTITLPDGNNLDFPKKVTGLEVAEKISKSLAKEAMIMSIDGELKDLSYLIEKDCSVKIFTKKNEEGLETIRHDTAHILAMAVQELFPGTQVTIGPVIENGFYYDFARKEPFTEDDLKKIEQKMREIVDRDEKTKREV

SEQ ID NO: 188913 - protein, 305 aa, Unknown
  Bacterial polypetide isolated from the Sargasso Sea
DENNKMLQRIYGTVFSTKEALKEHLHNLEEAKRRDHRKIGKEMKLFTFDSDIGPGLPLWLPNGTVMIEELEKLAKFTEKKAGFSQVRTPHLTKGTIYEKSGHLDHYKESMYPGMEIDGVDYYVKPMNCPHHHKIFSSLPRSYRDMPIRLSEYGTCYRYEKSGQLFGLMRVRSLQMNDAHIYCTPNQFKKEFMDVCRMYLEYFELFNIEKYSMRLSLHDKEGLGEKYVNEPELWLETEQWVREALDEGGFNYSEVSGEAAFYGPKIDVQVWSAIGKEFTLATNQVDFVVPKRFGLTYKDENGERQT

SEQ ID NO: 188914 - protein, 234 aa, Unknown
  Bacterial polypetide isolated from the Sargasso Sea
LILEIYKELGFEKVLLKYSDRPEVRVGDDAVWDKAEDALLKAIKETKLEYSINKGEGAFYGPKIEFVLRDAIGRDWQCGTLQVDLNLPDRLGATFVDKDGTKKVPVMIHRALFGSLERFIGILIEHYEGKLPFWISPLQAVIIPISDEFDDYAKKIFKLASQSGINCEIDLKNHNLNYKIREHSLSKVPLLLICGKKEVDSDTITIRQLDSKKQETMKTKDFLKNYSSLNKAPL

SEQ ID NO: 188915 - protein, 233 aa, Unknown
  Bacterial polypetide isolated from the Sargasso Sea
MEIYKNLGFENVILKYSDRPDKRVGDDKVWDKSEAALLAAVKKSNLEYSVNKGEGAFYGPKIEFVLRDAIGRDWQCGTLQVDLNLPGRLGASFVDKDGTKKVPVMLHRALFGSLERFIGILIENYEGKLPFWLSPAQVVVCPISEENNEYVKKLFEDLFKEGIKCEVDLRNQKINYKIREHSLAKVPYILVCGKKEEDNKTVTIRKLGSDKQETIKREVLIKNMLHANKMPLN

SEQ ID NO: 188916 - protein, 36 aa, Unknown
  Bacterial polypetide isolated from the Sargasso Sea
RVRAFTQDDAHIFCTEDQITQESLTVTKLIWKSIKI

SEQ ID NO: 188917 - protein, 136 aa, Unknown
  Bacterial polypetide isolated from the Sargasso Sea
MPQIQLLDGKKISFTKSINGFDITKKISKSLEKSALIMEVNGQLKDLSFEIKSDSEVKIITNKDKEGLEVIRHDAAHIMAMSVQELFPGTQVTIGPVIENGFYYDFARKEPFTNDDLKKIEKKMEEIIDRDVKTRR

SEQ ID NO: 188918 - protein, 326 aa, Unknown
  Bacterial polypetide isolated from the Sargasso Sea
LTDLSTKLMNDCSITIHTINDTEVALELIRHDCAHILARAVQEIWPNVKVTIGPVIQDGFYYDFDKDEPFSENDIEKIELLMKSIIEKKDPVKKETWDRARALEFYKERNEPYKVELVQDIPTGEDIKMYWHGDWQDLCRGPHLAHTGQVPADAFKLTRVAGAYWKGDSKNKMLQRIYGVAFRSKEELKQYFFRQEEAERRDHRKLGREMELFHLQEEATGSIFWHPKGWKLYSTLQEYMTRKLEHNGYLEVKTPQIVDRRLWEKSGHWDKFRENMFIVEVDEQEKTPRINALKPMNCPCHVQIYNQGLKSYRDLPLRMAEFGACH

SEQ ID NO: 188919 - protein, 247 aa, Unknown
  Bacterial polypetide isolated from the Sargasso Sea
AKTVFKDRDENYKLKLIDDIPEDEVIALYHHNEYIDMCRGPHLINTKFLKYFKLMKISGSYWRGNSNNQTLQRIYGTAWEKKSSLDNYLLKLEEAEKRDHRKLGQKLDFFHFQEEAPGMVFWHANGFHIFNQVKNYITAYLIDNDYKIIDTPQILDKSLWKKSGHLDKFSDLIFDAGSENKEFAIKPMSCPGHIQVYNHGLKSYRDLPLKYAEFGKVHRNEPSGTLHGLLRLRAFTQDDAHIFCTIH

SEQ ID NO: 188920 - protein, 292 aa, Unknown
  Bacterial polypetide isolated from the Sargasso Sea
MFTSETPDEKIFAVKPMNCPGCVQVFNQGLKSYRDLPLKLSEFGKVHRYEPSGALHGLLRVRAFTQDDAHIFCTEDQITEECIEVTKLILEIYKDLGFKKVFLKYSDRPKKRVGDDSVWDKSEKALLATIKKTKLEFEINKGEGAFYGPKIEFVLRDAIGRDWQCGTLQVDLNLPGRLGATYIDKDGQKKTPVMLHRALFGSLERFIGIIIENYAGKLPFWLSPTQLVVLPISEEHNKYAKKIFEEAFKEGINCEVDLRNQKINYKIREHSLAKVPMLFICGDKEIKEKKVQ

SEQ ID NO: 188921 - protein, 288 aa, Unknown
  Bacterial polypetide isolated from the Sargasso Sea
DVAADIGPGLAKAALLGIVDGGEWDLSRPIEADVSLALLTAKDDSALALLRHDCAHVMAEAVLEIFPETQVTIGPSIENGFYYDFHRETPFTDADLEAVEARMHEIVDRDEPIIREVWTRDQAVTFYRENAEPFKVELVEAIPADETVTFYRQGDFIDLCRGPHLPSTGRLGHAFKLMSVAGAYWRGDSDRPMLQRIYGTAWRTEKELGAYLHMLEEAEKRDHRKLGKQLGFFHMQEEATGSVFWHPKGWAIYREIEAYVRRRLDEGGYSEVKTPQLVDRTLWEASGH

SEQ ID NO: 188922 - protein, 200 aa, Unknown
  Bacterial polypetide isolated from the Sargasso Sea
EAALLTAIKKSKLDYTVNKGEGAFYGPKIEFVLRDAIGRDWQCGTLQVDLNLPNRLGATYVSKDGSKKVPVMLHRALFGSLERFIGILIENYAGKLPFWLSPAQAVVCPIAEENNNYVKKLFEDLFKEGIKCEMDLRNEKINYKIREHSLAKIPFIIVCGKKEVADNTVTIRKLGSEKQETIKREELIKNMLDLNKLPLN

SEQ ID NO: 188923 - protein, 222 aa, Unknown
  Bacterial polypetide isolated from the Sargasso Sea
IKLSTRPEKRIGSDASWDKAEKALQDAIEKLKLEYFIDEGDGAFYGPKLDFVLTDAIGRKWQCGTLQVDFNLPGRFDSTYIGEDGAKHTPVLLHRAALGSFERFIGILLENYEGKLPLWLAPTQTVIAAITDDANEYATKLHENLIGKGIRSEVDVRNEQISYKVREHSLQKVPYILAVGKKEIADESVSVRKLGSDKNEVISVDKFIETIVLESKNPLQIK

SEQ ID NO: 188924 - protein, 268 aa, Unknown
  Bacterial polypetide isolated from the Sargasso Sea
MHNITLPDGKKLNFTESISGLKIAEKISKSLMKQALIMSVNGELKDLEYEITTDSEVKIFTSKDKEGLETIRHDTAHILAMAVQELFPGTQVTIGPVIEDGFYYDFARKEPFTNDDLEKIEKKMKEIVDRDEKTYREVWKRNDAIEHFKEKGEIYKAEIINSIPENEEVSIYFHGKWHDLCRGPHLVSTGKIGKYFKLTKVSGAYWKGDSNNEMLQRVYGTSWSSQNELDEYLKRIEEAEKRDHRKLGKEMDLFHFREESPGSVFWHQ

SEQ ID NO: 188925 - protein, 261 aa, Unknown
  Bacterial polypetide isolated from the Sargasso Sea
MKSIPVDEELSFYKQGDFIDLCRGPHIPSTGRCGVFKLTKVAGAYWRGDSDNEMLQRIYGTAWADKKSLKTYLSRMEEAEKRDHRKLGKRLDLFHVQEEAPGMVFWHPKGWQIWQIVEQYIRDVQNANGYQEIKTPQLVDMALWEASGHADKFSEDMFAVNTENRQYAIKPMNCPCHVQVYNQGLKSYRELPIRLAEFGSCHRNEPSGTLQGIMRVRGFVQDDAHIFCAEEQVQDEVTKFIDLLTEVYRDFGFNEIIVKLS

SEQ ID NO: 188926 - protein, 268 aa, Unknown
  Bacterial polypetide isolated from the Sargasso Sea
GAYWRGDHKNPMLQRIYGTAWRNKKELRAYLNQLEEAEKRDHRILGKNMNLFHFQEEAPGAVFWHSKGWVLFQSLIEFMRKKQNDAGYIEINTPDIMDKSLWEKSGHWEKFGENMFTTESKEERIYALKPMNCPGHVQVFKQGIKSYRDLPLKFSEFGKVHRYEPSGALHGLMRVRAFTQDDAHIFCTDAQITDECVEVCKLILDIYKDFGFKDVFIKFSDRPNKRVGNDEIWDKSEKALMTAIDSTGLPYSLNSGEGAFYGPKLEFV

SEQ ID NO: 188927 - protein, 289 aa, Unknown
  Bacterial polypetide isolated from the Sargasso Sea
EKDCSVKIITSKDKEGLDAIRHDTTHIMAMAVQELFPGTKIAIGPAIKDGFYYDFSRKEPFTLEDLENIEKKMKEIVEKNEPTRREVWERKQTRDHYKKIGEDYKVQLVDSIPDEEEVSVYYHGKWYDLCRGPHLTSTGKIGKFFKLTKVSGAYWRGDSNNEMLQRIYGTSWPSQKELDEYLSRIVEAEKRDHRKLGKEMDLFHFREESPGSVFWHEKGWNLFQKLVTYMRMKQLQAGYKEINTPEILDRSLWEKSGHWEKFGANMYTSTTPDEKVFAIKPYELSWLCT

SEQ ID NO: 188928 - protein, 248 aa, Unknown
  Bacterial polypetide isolated from the Sargasso Sea
MLNITLPDGKKLNFEKKVTGLEVAEKISKSLSKNALLISVDGKLKDLNTIIDKDCSIKIFTSKDKEGLETIRHDTAHILAMAVQELFPGTQVTIGPVIEDGFYYDFARKEPFSEDDLNKIENKMREIVERDEKTTREVWPREKAIDHFKKIGEIYKAEIIKSIPEGEEVSVYFHGKWHDLCRGPHLTSTGKIGKFFKLTKVSGAYWRGDSNNEMLQRVYGTSWSTQKDLDEHLKRIEEAEKRDHRKLG

SEQ ID NO: 188929 - protein, 276 aa, Unknown
  Bacterial polypetide isolated from the Sargasso Sea
VTIGPVIENGFYYDFARKEPFTSEDLKKIEKKMTEIIDKDVKTRREIWERKKAISHFKKIGEKYKAEIIESIPENEELSIYHHGETWHDLCRGPHLVSSGKIGKAFKLTKVSGAYWRGDSKNEMLQRIYGTGWANQKDLENYLTRIEEAEKRDHRKIGRQMDLFHFREESPGSVFWHEKGWALFQKLINYMRMKQDIAGYKEINTPEVLDRSLWEKSGHWEKFGENMYTSITPDEKIFAIKPMNCPGCVELYNQGLKSYKDLPLKMSEFGKVHRYE

SEQ ID NO: 188930 - protein, 253 aa, Unknown
  Bacterial polypetide isolated from the Sargasso Sea
QVEEETKKFIDLLSEVYRDFGFNEFKIKFSDRPKIRAGTDKIWDKAEESLQKATVAAGCNFSINKGEGAFYGPKLEFVLTDALGREWQCGTLQVDFVLPERLNANYINEFGEKKIPVMLHRAILGSFERFIGIILEDSGGRLPLWLAPIQLVIATITTKVESYLNIVTNTFKQSGLRIKIDNRNEKINYKIREHSLAKIPIILVIGEKEAASNTVNIRRFGTKQSETLDLDKACEEIIIEAYPPDQNLNKKSS

SEQ ID NO: 188931 - protein, 302 aa, Unknown
  Bacterial polypetide isolated from the Sargasso Sea
DFDLDTTFSPEDLKKLERQMKKSIKRNTKFESKEISKKQALEIYKNNPYKLEIIDSMPTDEIITEYSHSNGNFVDLCEGGHVDKTGEVKAVKLLSIAGAYWRGDENNKMLQRIYGTAFENQEELDNHISLLEEAAKRDHRKLGTELDLFSISSDVGSGLIIWHPKGAFVRNKIEEYWKEEHIKDNYDLIYTPHIGKSDLWKKSGHLDNFSENMFSSIEMENNDYYLKPMNCPFHIAYYKNSLRSYRDLPMRIGELGTVYRYEKQGVLHGLLRVRGFTQDDAHIFSTPEQVVVEFNKVLDLTF

SEQ ID NO: 188932 - protein, 269 aa, Unknown
  Bacterial polypetide isolated from the Sargasso Sea
ESLYQKTGHLPYYAESMYPAMDIDGTKYYIKPMNCPHHHKLFKALPRSYRDLPIKFSEYGTCYRYEKSGQLFGLMRVRSLQMNDAHIYCTKEQFKFEFLQVCKLYLEYFRIFGIEKYKMRLSLHDKSGLGEKYVNEPELWISTENLVREAMIDGNIEFDEVEGEAAFYGPKIDVQIWSAIGKEFTLATNQVDFAIPKRLKMNYVNKVGNYETPLCIHRAPLGTHERFIGFLIEHFGGNFPLWLAPIQVIVIPISENNLNYAMEIKQKSI

SEQ ID NO: 188933 - protein, 221 aa, Unknown
  Bacterial polypetide isolated from the Sargasso Sea
SGKIGKYFKLTKVSGAYWRGDSNNEMLQRIYGTAWPSQKDLDQYLKRIEEAEKRDHRKLGKEMDLFHFREESPGSVFWHDKGWSLFQKLVSYMRVKQDHAGYKEINTPEILDRTLWEKSGHWDKFGDNMYTSITPDEKVFAIKPMNCPGCIQVYNQGIKSYRDLPLKMSEFGKVHRYEPSGALHGLLRVRAFTQDDAHIFCTEDQITEECLSVTNLILEIY

SEQ ID NO: 188934 - protein, 232 aa, Unknown
  Bacterial polypetide isolated from the Sargasso Sea
YFKLAKRVGKGLPLWLPNGTVIRDEMEKLAKEKEFIAGYKRVVTPHITREKIFQISGHLPYYKDSMFPPIEIDGERIFLKPMNCPHHHMIYKSEQRSYRDLPLRFAEYGTCYRYEQSGELAGLLRVRCMSMNDAHIYCSPEQAKNEFVSVMRMHADYYKLFGLKDFWMRLSLSEKNADKYVDEPKLWQKSEEIVIEAMNEVEIPYESVRGEAAFYGPKIDFQVTNVVGREET

SEQ ID NO: 188935 - protein, 199 aa, Unknown
  Bacterial polypetide isolated from the Sargasso Sea
SEKHYYQLFEKLEIPYKVNPGEGAFYGPKLEFVLRDAIGRDWQCGTVQIDLNLPERLSCTYVNREGEKKNPVLIHRALFGSLERFIGILIEHYAGKLPLWLSPVNVAIVTINNKFDEYAKKLYKKLLKEEITCKLDLRNEKISYKIREHSSTKVPLIFVIGEKEVESDTVALRTLGSKDIESISIEKVIRLIKNEKNKF

SEQ ID NO: 188936 - protein, 259 aa, Unknown
  Bacterial polypetide isolated from the Sargasso Sea
QEKAGYKEINTPEILDRSLWEKSGHWEKFGANMYTSTTPDDKIFAIKPMNCPGCVQVFNQGLKSYRDLPLKMSEFGKVHRYEPSGALHGLLRVRAFTQDDAHIFCTEDQITEECLSVTNLILDIYKDLGFENVILKYSDRPDLRVGEDHIWDKAESALLKAIKASKLEYTVNKGEGAFYGPKIEYVLRDAIGRDWQCGTLQVDLNLPERLEATYVDKDGTKKIPVMLHRALFGSLERFIGILIEHYSGKLPFWISPLQT

SEQ ID NO: 188937 - protein, 280 aa, Unknown
  Bacterial polypetide isolated from the Sargasso Sea
MSEIIDRDVKTKREVWKREEAIKHFKKIGEKYKAEIIEGIPKGEELSIYHHGETWHDLCRGPHLASSGKIGKAFKLTKVSGAYWRGDSKNEMLQRIYGTCWSSKKELEDYLHRLEEAEKRDHRKLGKEMNLFHFREESPGSVFWHEKGWLLFQRLIEYMRLKQRLAGYKEINTPELLDKSLWEKSGHWEKFGEHMFTSETPDEKIFAVKPMNCPGCVQIFNQGLKSYRDLPLKLSEFGKVHRYEPSGALHGLLRVRAFTQDDAHIFCTEDQITDESLTSY

SEQ ID NO: 188938 - protein, 236 aa, Unknown
  Bacterial polypetide isolated from the Sargasso Sea
QITDECLSVTNLILEIYKDLGFENVILKYSDRPDTRVGEDAVWDKSEAALLKAIKASKLEYTINKGEGAFYGPKIEFVLRDAIGRDWQCGTLQVDLNLPERLGATYVAKDGSKKVPVMLHRALFGSLERFIGILIENYAGKLPFWITPLQTVVIPISNDFDDYAKNVHQQLKKAGISSEVDLKNHNLNYKIRDHSLTKVPLLLICGKKEVDTNTVTIRRLDSNKQENMELKEFLKK

SEQ ID NO: 188939 - protein, 252 aa, Unknown
  Bacterial polypetide isolated from the Sargasso Sea
HIEVFNQGLKSYRDLPLRISEFGKVHRYEPSGALHGLLRVRAFTQDDAHIFCSDDQITSECLNVTNLILDIYKDLGFENVILKYADRPEVRVGEDKVWDKAEASLLEAVKASKLEYTINKGEGAFYGPKIEFVLRDAIGRDWQCGTLQVDLNLPGRLDASYIDKDGTKKIPVMLHRALFGSLERFIGILIEHYAGKFPFWISPLQTVVIPISEEFDDYAIKVSNKIKQVGISSTVDLKKHNLNYKIRDHSLA

SEQ ID NO: 188940 - protein, 284 aa, Unknown
  Bacterial polypetide isolated from the Sargasso Sea
IRHDTAHILAMAVQELFPKTQVTIGPVIENGFYYDFARKEPFTEDDLRKIEEKMREIVDRDEITKREIWDRDKAIKHFKKKGEFYKAELIESIPKNEEVSIYFHGKWHDLCKGPHLPSTGKIGKFFKLTKVSGAYWRGDSKNEMLQRIYGTSWASQKDLDEHLKRIEEAEKRDHRKLGKEMNLFHFREESPGSVFWHEKGWALFQKLINYMRMKQDIAGYKEINTPEVLDRSLWEKSGHWEKFGANMYTSTTPDEKIFAIKPMNCPGCVEVFKQGLKSYKDLPL

SEQ ID NO: 188941 - protein, 267 aa, Unknown
  Bacterial polypetide isolated from the Sargasso Sea
MYTSTTPDEKIFAIKPMNCPGCVQVFNQGLKSYRDLPLKMSEFGKVHRYEPSGALHGLMRVRAFTQDDAHIFCTEDQITEESLSVTNLILDIYKELGFTNVILKYSDRPDVRVGSDEVWDKSEAALLEAVKATKLKYTINKGEGAFYGPKIEFVLRDAIGRDWQCGTLQVDLNLPERLGASFIDKDGSKKVPVMLHRALFGSLERFIGILIENYAGKLPFWISPLQVIAIPVSDEFDKYASHVADKIRNAGMNCEVDLKNHNLNYKI

SEQ ID NO: 188942 - protein, 239 aa, Unknown
  Bacterial polypetide isolated from the Sargasso Sea
RTRHEHGGYNFVFSPHIAKSVLWETSGHLDFYAEGMYPPMEMDGATYYPKPMNCPFHVMVYRSSQRSYRDLPTRYFELGTVYRYELSGAVHGLLRSRGFTQDDSHIFCTREQVPEELSSLLAFCLSVLRDFGFTDFQAKLSTRPQEKSVGDDDLWDIATEGLREALEKEGLPYIVDEGGGAFYGPKIDMDVNDAIGRPWQLTTIQLDFNLPERFGLEYIGTDGARHQPVMIHRALLGSV

SEQ ID NO: 188943 - protein, 309 aa, Unknown
  Bacterial polypetide isolated from the Sargasso Sea
EIIESIPKNEELSVYHHGDTWHDLCRGPHLASSGKIGKAFKLTKVSGAYWRGDSNNEMLQRIYGTCWSSKKELDDYLHRLKEAEKRDHRKLGKEMDLFHFREESPGAVFWHEKGWLLFQRLVEYMRAKQRLAGYKEINTPELLDKTLWEKSGHWDKFGEHMFTTETPDEKTFAVKPMNCPGCVQVFNQGLKSYRDLPLKLSEFGKVHRYEPSGALHGLLRVRAFTQDDAHIFCTEDQITEESLSVTNLILEIYKDLGFENVILKYSDRPEKRVGDDNVWDKSEAALLSAIKKSKLEYTINKGEGAFTDL

SEQ ID NO: 188944 - protein, 196 aa, Unknown
  Bacterial polypetide isolated from the Sargasso Sea
MSKELLINRKSEEELDTIRHDCAHILAEAVQSLFPETQVTIGPTIENGFYYDFAREKPFTSDDLIVIEKKMHEIVDKGENFKREVWTQKKAIDYFTKKGELYKVELIKDIPKTEEITIYRQGDWLDLCRGPHGISTKDIGQGFKLTKVAGAYWRGDSSKTMLTRIYGTAWRNKKELKEYLIQLEESEKRDHRKLEK

SEQ ID NO: 188945 - protein, 126 aa, Unknown
  Bacterial polypetide isolated from the Sargasso Sea
MPNITLPDGKKLNFEKSVTGSEVAEKISKSLAKQALIMSVNGELKDLDSIIDKDSSVKIFTSKDPEGLEVIRHDAAHIMAMAVQELYPGTQVTIGPVIENGFYYDFARKDPFTSDDLKNMKKECPR

SEQ ID NO: 188946 - protein, 217 aa, Unknown
  Bacterial polypetide isolated from the Sargasso Sea
MPDITLPDGKKINFEKSISGFEVAEKISKSLSKQALLISVDGELKDLNHSISKDSSIKIFTSKDKEGLETIRHDTAHILAMAVQELFPGTQVTIGPVIEDGFYYDFARKEPFTTEDLEKIENKMKEIVDRDEKTYREVWKRNDAIEHFKKKGEIYKAEIIESIPEGEDVSLYFHGDWHDLCRGPHLTSTGKIGKYFKLTKVSGAYWRGDSNNEMLQR

SEQ ID NO: 188947 - protein, 291 aa, Unknown
  Bacterial polypetide isolated from the Sargasso Sea
PVIENGFYYDFARKEPFTSDDLSKIEKKMIEIIDKNLKTRKEVWGREKAINHFKKIGEKYKAEIIESIPKNEELTIYYHGDSWHDLCRGPHLVSSGKIGKAFKLMKVAGAYWRGDSNNEMLQRIYGTGWATQKELDLYLQRIEEAEKRDHRKIGKEMDLFHFREESPGSVFWHQKGWNLFQKLVSYMRAKQDHDGYQEINTPEILDRSLWEKSGHWEKFGANMYTSTTPDEKIFAIKPMNCPGCVQVFNQGLKSYRDLPLKMSEFGKVHRYEPSGSLHGLLRVRAFTQDDA

SEQ ID NO: 188948 - protein, 248 aa, Unknown
  Bacterial polypetide isolated from the Sargasso Sea
EDQITKECLSVTNLILEIYKDLGFENVILKYSDRPDLRVGDDAVWDKSEAALIKAVEASKLEYSINKGEGAFYGPKIEFVLRDAIGRDWQCGTLQVDLNLPARLGASYVDKDGSKKIPVMLHRALFGSLERFIGILIENYSGKLPFWISPLQTVVIPISDDFNDYALTVYKKIKKAGISCEVDLKNHNLNYKIREHSNSKAPMLLICGKKEVDSNAVTIRRLDSDKQENMLVDEFIKKYTALNKAPSI

SEQ ID NO: 188949 - protein, 245 aa, Unknown
  Bacterial polypetide isolated from the Sargasso Sea
KFFKLTKVSGAYWRGDSNNEMLQRIYGTSWASQKDLDIYLKRIEEAEKRDHRKLGKEMDLFHFREESPGSVFWHEKGWALFQKLINYMRMKQDIAGYKEINTPEVLDRSLWEKSGHWEKFGANMYTSTTPDEKIFAIKPMNCPGCVEVFNQGLKSYKDLPLKMSEFGKVHRYEPSGALHGLLRVRAFTQDDAHIFCTEDQITEECLTITNLILEIYKDLGFENVILKYSDRPDLRVGDDSVWDKA

SEQ ID NO: 188950 - protein, 175 aa, Unknown
  Bacterial polypetide isolated from the Sargasso Sea
EDWDRAERALIDALDSHGLPWKELPGEGAFYGPKIEFSLKDCIGRVWQLGTIQVDFSMPSRLDAQFVAEDGLRKTPVMLHRAILGSFERFIGILVENYEGVFPTWLSPVQAIVLNITDKHAEYAQKVEEAIKNKGFRAISDLRNEKIGFKIREHTLRKIPYQLVVGGKELESRQV

SEQ ID NO: 188951 - protein, 246 aa, Unknown
  Bacterial polypetide isolated from the Sargasso Sea
MPIITLPDGKNIEFPKEVTGLDVAEKISKSLSKQALIMSVDGELKDLYFSIKKDCSVKIFTAKDPEGLEVIRHDTAHIMAMAVQELYPGTQVTIGPVIENGFYYDFARKEPFTEEDLEKIEKKMSEIIDKDVKTKREVWKRDKAISHFKKIGEKYKAEIIESIPESEELTVYHHGDTWHDLCRGPHLVSSGKIGKAFKLTKVAGAYWRGDSKNEMLQRIYGTGWASQKDLDDYLKRIEEAEKRDHR

SEQ ID NO: 188952 - protein, 269 aa, Unknown
  Bacterial polypetide isolated from the Sargasso Sea
KKKGEIYKAEIIESIPEGEDVSLYFHGDWHDLCRGPHLSSTGKIGKYFKLTKVSGAYWRGDSNNEMLQRVYGTSWSTQKDLDDYLNRIEEAEKRDHRKIGKEMDLFHFREESPGSVFWHQKGWSLFQKLISYMRMKQETAGYQEINTPEILDRSLWEKSGHWEKFGANMYTSTTPDEKVFAIKPMNCPGCVQVFNQGLKSYRDLPLKMSEFGKVHRYEPSGALHGLLRVRAFTQDDAHIFCTEEQITEECLTVTNLILEIYKDLGFEEV

SEQ ID NO: 188953 - protein, 114 aa, Unknown
  Bacterial polypetide isolated from the Sargasso Sea
KASKLEYTINKGEGAFYGPKIQFVLRDAIGRDWQCRTLQVDFNLPRRLGASYMSKDGTKKVPVMLHTALFGSLERFIGILIEHYAGKLPFWLSPLQTIIIPVSNEFDEYAKDIN

SEQ ID NO: 188954 - protein, 201 aa, Unknown
  Bacterial polypetide isolated from the Sargasso Sea
MPIITLPDGNNIDFPNKVTGLEVAEKISKSLAKQAMVISVDGELKDLEHLIEKDCSVKIFTSKNPEGLETIRHDTAHILAMAVQELFPGTQVTIGPVIDNGFYYDFARKEPFTEDDLTMIENKMKEIVDRDEITKREVWDRNKAIDHFKKKGEIYKAELIEAIPENEDVSIYFHGDWHDLCRGPHLSSTGKIGKYFKLMKV

SEQ ID NO: 188955 - protein, 190 aa, Unknown
  Bacterial polypetide isolated from the Sargasso Sea
MAADMQVPVSSTAVTALPPNETVVLPKTSESETLLRIRHSMSHVMAMAVQKLFPKAQVTIGPWTESGFYYDFDNPDPFTEADLKAIRKEMIKIINRKLPLQRLEVDRAEAEAKITAQNEPYKLEILAGIQEPISLYTLGDDWWDLCAGPHVANTSELNPKAFELESVAGAYWRGDETKAQLQRITAPHGN

SEQ ID NO: 188956 - protein, 244 aa, Unknown
  Bacterial polypetide isolated from the Sargasso Sea
MSEKIIITFPDGNKKEVDKGINGLELASQISKSLAKESVAIKINNEIKDISLPINGDSSVAILKRDSEEALELIRHDCAHVMAEAVQELFPGTQVTIGPAIENGFYYDFARDEPFTVSDLPKIEKKMHDIIQRNKNFIREVWSKEESIKHFKDKGENYKVELINDLPDNEEISIYKQGDWLDLCRGPHMVSTKQIGKAFKLMKVAGAYWRGDSSNTMLTRIYGTAWATEKDLEQHLLQIEEAEK

SEQ ID NO: 188957 - protein, 222 aa, Unknown
  Bacterial polypetide isolated from the Sargasso Sea
MPNITLPDGKQLSFSEKVNGNKIVEKISKSLAKEALIMSVNGHLKDLSFEIEKDAKVKILTSKDEDGLDTIRHDTAHILAMAVQELFPGTQVTIGPTIENGFYYDFARKEPFTETDLKKIETKMSEIVDRNETTYREVWERDKAISHFEKMGEKYKAEIIQDIPKSEEISIYFHGKWHDLCRGPHLPSTGRIGKHFKLTKVAGAYWRGDSKNEMLQRIYGTS

SEQ ID NO: 188958 - protein, 263 aa, Unknown
  Bacterial polypetide isolated from the Sargasso Sea
LAKEAMVISVDGELKDLDFQIEKNCSIKILTSKNEEGLETIRHDTAHILAMAVQELFPGTQVTIGPVIENGFYYDFARKEPFTEDDLTKIEEKMKEIVDRDEKTKREVWDRDKAIKHFKNKGELYKAELIESIPQNEEVSIYFHGAWHDLCRGPHLSSTGKIGKFFKLTKVAGAYWRGDSNNEMLQRIYGTSWASQKDLDNYLKRIEEAEKRDHRKLGKEMDLFHFREESPGSVFWHEKGWALFQKLINYMRMKQEIAGYKEI

SEQ ID NO: 188959 - protein, 220 aa, Unknown
  Bacterial polypetide isolated from the Sargasso Sea
IETECKILCDLITDIYKDFGFEKIMIKYSDRPKKRVGTDQIWDKAEKALLTTIDKIGLPYSINSGEGAFYGPKLEFVLRDAIGRDWQCGTVQIDLNLPERLACSFVNKRGEKQRPVLIHRALFGSLERFIGILLEHYSGNLPLWISPLEVIIATISEKFNKYALEIKKQLKINNISVEIDDRNEKIGYKIREHSFSKVPFIIVIGEKEVTNKNITIRRLG

SEQ ID NO: 188960 - protein, 256 aa, Unknown
  Bacterial polypetide isolated from the Sargasso Sea
SKDDLAVIRHSASHVLAQAVQQLFPDAKLGIGPAIDDGFYYDFELSRPLNDDDLLVLQKRVNKILAEKQVFKQFDLSKTEAVRLLKEKGQDFKLELIKDLDLEEYSFYENGPFVDLCRGPHIENTSEIPVIKLLKVSGAYWKGSESNPMLQRIYGTAFFSQEELDDYLTRLEEAKTRDHRTIGKSMDLYSIQDEIGSGLVVWTPQGAFMRHVIENLWKEIHFQTGYQLLYSPHIGKSNLWKTSGQLDFYEENMYSP

SEQ ID NO: 188961 - protein, 292 aa, Unknown
  Bacterial polypetide isolated from the Sargasso Sea
GSFGKKFGANMYTSTTPDEKVFAIKPMNCPGCVQVFNQGLKSYRDLPLKMSEFGKVHRYEPSGALHGLLRVRAFTQDDAHIFCTEEQITQECLSVTNLILEIYKDLGFEDVILKYSDRPDLRVGDDKVWDKSEAALLEAIKATKLEYSINKGEGAFYGPKIEFVLRDAIGRDWQCGTLQVDLNLPGRLGASFVDSDGNKKVPVMLHRALFGSLERFIGILIENYSGKLPFWLCPVQTIVIPISSDFDDYAKEVNSQLKKVGISSEVDLKNHNLNYKIREHSLTKVPMLLICG

SEQ ID NO: 188962 - protein, 301 aa, Unknown
  Bacterial polypetide isolated from the Sargasso Sea
GFYYDFARKEPFTEDDLKKIEEKMKEIVDRNEITKREVWDRDKAIKHFKNKGEIYKAELIEKIPSGEEVSIYFHGDWHDLCRGPHLSSTGKIGKFFKLTKVSGAYWRGDSNNEMLQRIYGTSWASQKDLDNYLKRLEEAEKRDHRKLGKEMDLFHFREESPGSVFWHEKGWALFQKLINYMRMKQEIAGYQEINTPEVLDRSLWEKSGHWEKFGANMYTSTTPDEKIFAIKPMNCPGCVEVFNQGLKSYKDLPLKMSEFGKVHRYEPSGALHGLLRVRAFTQDDAHIFCTEDQITKECLIV

SEQ ID NO: 188963 - protein, 280 aa, Unknown
  Bacterial polypetide isolated from the Sargasso Sea
SCHRNEPSGALHGLMRVRIFTQDDAHIFCTEEQIQEEVSTFIDLVFAVYKTFGFDEIIIKLSTRPEKRVGSEEIWDKSEEALTKALDNKDLKWELQPGEGAFYGPKIEFSLKDCLNRVWQCGTIQVDFSMPIRLNATFVDINNEKRNPVMLHRAILGSFERFIGILIEQYEAKFPIWLAPYQIILLSITDRNIEKCLEFNELINNRGYRSKVDIRNEKIGYKIREATLDRVPLIAVIGDKEEEIDSVALRSLNGKNLGIFNLPNLFKLMDEQIEKKGRLE

SEQ ID NO: 188964 - protein, 238 aa, Unknown
  Bacterial polypetide isolated from the Sargasso Sea
IGDSSNQALTRVYGTAWETHESLDSYLKSLEEAEKSDHRILGKKLDLFHFQEESPGMVFWHDKGWTIFNLIKDYITSYLKKNSYKIINTPQMLDKSLWKKSGHLDKFGDLIFDVGSEKKEYAIKPMSCPGHVQVFNQGLKSYKELPVKYAEFGFVHRNEPSGTLHGLLRIRAFTQDDAHIFCTPDQIKQEISILINTIKDIYNKFGFDDLKIELSTRPEKRVGSDEIWDKAENSLIEA

SEQ ID NO: 188965 - protein, 322 aa, Unknown
  Bacterial polypetide isolated from the Sargasso Sea
LFILEKKVWALFFGMRKDGRFFKKLIDYMRMKQNIAGYKEINTPEVLDRTLWEKSGHWEKFGENMYTSTTPDEKVFAIKPMNCPGCVEVFNQGLKSYKDLPLKMSEFGKVHRYEPSGALHGLLRVRAFTQDDAHIFCTEDQIIDECLIVTNLILEIYKDLGFENVILKYSDRPEVRVGDDKAWDKAETALLKAVKATKLEYSINKGEGAFYGPKIEFVLRDAIGRDWQCGTLQVDFNLPGRLGASYVDKDGSKKVPVMLHRALFGSLERFIGILIENYAGKFPFWISPLQSVVIPISEEFNDYAITVSEKIKKSGISSIVDL

SEQ ID NO: 188966 - protein, 315 aa, Unknown
  Bacterial polypetide isolated from the Sargasso Sea
MIKITLPSGELKKYNNPVSPLDVVKEISTTLFKDALIASVDGILWDLKRLIEKDCSLKILTKKDPETLSVLRHDAAHVMAEAVLELFPETEITIGPAIEDGFYYDFFRDESFNIEDLKKIEKRMHKIVDRNEKIEREVWSRKDALKFFKENKQKFKIELLSDISENEEVTFYKQGDFIDLCRGPHFRTTKFMGHSFKLMKLAGSYWRGDSKRETLQRIYGTAFFSDDDLNRHLNMIEEAEKRDHRKIGKQLNLFHLQEEAAGSVFWHPKGWSIYLEIEFYIRRKLFSNNYQEVKTPQIIDRSLWEKSGHWDKLKK

SEQ ID NO: 188967 - protein, 227 aa, Unknown
  Bacterial polypetide isolated from the Sargasso Sea
CPHHHKIYDSQPKSYRDLPVRFSEYGTCYRYEKSGQLFGLMRVRSMQMNDAHIYCTPEQFKEEFLAVCNMYLHYFEIFGIDKYQMRLSLHDPAGLGKKYINEPTLWKKTEEEVREALIEGNIDHVEISGEAAFYGPKIDVQVWSAIGKEFTLATNQVDFAIPKRFGLTYTDEQGKDQTPLCIHRAPLSTHERFIGFLIEHYGGDFPLWLAPVQVAVLPISDKVIDYA

SEQ ID NO: 188968 - protein, 308 aa, Unknown
  Bacterial polypetide isolated from the Sargasso Sea
MQQDLEFAEVNTPILVDYKLWEESGHAEKFSDDMFTLEADHRRFAIKPMNCPCHVQIFKQGLKSYRDLPVRYSEFGSCHRNEPSGSLHGLMRVRGFVQDDGHIFCTEQQIASEAADFIKSLYELYKDLGFDQIEVKLSTRPEKRVGSDSAWDEAETIMENVLKEQGLAYEISEGEGAFYGPKYEFALKDCLGRVWQCGTFQLDFFLPQRLNATYIAEDGSKQHPVMLHRAALGSIERFIGILLEHYAGDLPLWLAPVQVVIATITEKHSAYAENLAKKLKNLGIRGEIDLRNEKISFKIRQHSIARVP

SEQ ID NO: 188969 - protein, 213 aa, Unknown
  Bacterial polypetide isolated from the Sargasso Sea
MHNIIVTLPDNSVKEVPKGTNSQEIASMIGERLSNSVVVSKINGVLSDLNKPINEDCTLELLTGQSPEGHETLLHSTAHLMAQAVKELFPDAKISIGPTIEKGFYYDFELEDFISENDLRVIEKKMMELARSNQEIIRKEVSAKQALKIFKDKKENYKLEIINQINPEDIISLYTQTNFTDLCRGPHVSNTSKIKYFKLLSTSGAYWRGDEKN

SEQ ID NO: 188970 - protein, 289 aa, Unknown
  Bacterial polypetide isolated from the Sargasso Sea
PGHVQVYNQGIRSYKELPFRLCEFGSCHRYEASGTMHGLMRVRGFTQDDGHIFLTEDQIESETAIFIDLLSKVYADLGFNQFEIKLSTRPEQRVGSDEIWDKAELSLKNAIEKLGLEYRIDEGDGAFYGPKLDFVLTDAIGRKWQCGTLQLDFNLADRLDAQYVAEDGNKYNPVMFHRAILGSFERFIGILIENYSGNLPLWLAPTQVTVCSITDEADDYVKEISETLRSNNIRCNSDLRNEKISYKVREHSVSKVPIILAVGKKEVSERTVSIRRLGSDDTSILPLDD

SEQ ID NO: 188971 - protein, 295 aa, Unknown
  Bacterial polypetide isolated from the Sargasso Sea
KVFAIKPMNCPGCVQIFNQGLKSYRDLPLKMSEFGKVHRYEPSGSLHGLLRVRAFTQDDAHIFCTEDQITEECLSVTNLILEIYKDLGFENVILKYSDRPEIRVGEDKVWDKSEKALLQAIKASKLEYSINQGEGAFYGPKIEFVLRDAIGRDWQCGTLQVDLNLPERLGASFVDKDGTKKVPVMLHRALFGSLERFIGILIENYAGKLPFWLAPLQIIVIPVSSEFDEYAKEINRKIKSNGIISEVDLKNHNLNYKIRDHSLSKIPILLICGKKEVDSNTVTIRRLDSKKQENM

SEQ ID NO: 188972 - protein, 180 aa, Unknown
  Bacterial polypetide isolated from the Sargasso Sea
EGAFYGPKIEFVLRDAIGRDWQCGTLQVDLNLPNRLGASYVAKDGTKKVPVMLHRALFGSLERFIGILIENYAGKLPFWLSPAQAVVCPIAEESNNYVKKLFEDLFKEGIKCEMDLRNEKINYKVREHSLAKIPYIVVCGKKEVSENTVTVRQLGSEKQQVMKREEFIKNMLDLNKLPLN

SEQ ID NO: 188973 - protein, 201 aa, Unknown
  Bacterial polypetide isolated from the Sargasso Sea
KAEKALQDAIEKLNIDYEIDEGDGAFYGPKLDFVLTDAIGRKWQCGTWQADFNLPGRFDSTYVGEDGAKHTPVLLHRAALGSFERFIGILLENYGGNLPLWLSPTQVVLATITDEAKAYADDIEKQLLDLGVRVISDKRNEQISYKVREHSKSKSSTILALGKKEVDDKTVSIRRLGSEKTEVKKLEKFLKEIENEIVIPG

SEQ ID NO: 188974 - protein, 315 aa, Unknown
  Bacterial polypetide isolated from the Sargasso Sea
SQLRTEKRDHRKLAKEMNLFHFQDEAPGMVFWHQNGWSIYTSLLNFMREKLNLSGYQEINTPQVVDRKLWEASGHWEKYRENMFIAEIDEEYANEKRTNALKPMNCPCHVQVYNQGLTSYKDLPIRFSEFGSCHRYEASGTMHGLMRVRGFTQDDGHIFCTEDQIEDETKSFIMLLSDIYKTLGFNEFNIKLSTRPEVRIGNDETWDKAENALQKAIERLDLPYVIEEGEGAFYGPKLDFVLTDAIGRQWQCGTFQADFILPSRLDAVYVGEDGKKHNPVMIHRAILGSFERFLGILIENYSGKLPLWLAPKQIA

SEQ ID NO: 188975 - protein, 265 aa, Unknown
  Bacterial polypetide isolated from the Sargasso Sea
TNPQLQRIYGTAWFSKEDLDNYLARQKEAEKRDHRKLGNELNLFVNTDEIGPGQFLWKPKGSILRQIIEDYSKKAHADNGYEYAYTPHIGRSILWETSGHLDYYKEGMYPPLKNENNDDDEYYLKPMNCPFHILIYKSDIRSYKELPLRFFELGSVYRFEKTGVLHGLLRARGFTQDDAHIFCTNDQIEEEILNLLTFSIKLLNAFGFDSIEADLSTRPEKSIGNDDDWVKATNSLASALDNQSISFVTAHGEGAFYGPKIDLHV

SEQ ID NO: 188976 - protein, 279 aa, Unknown
  Bacterial polypetide isolated from the Sargasso Sea
GYKEINTPEVLDRSLWEKSGHWEKFGANMYTSTTPDEKVFAIKPMNCPGCIEVFNQGLKSYKDLPLKMSEFGKVHRYEPSGALHGLLRVRAFTQDDAHIFCTEDQITKECLIVTDLILEIYKDLGFENVILKYSDRPEKRVGDDSVWDKAESALLEAVKATKLEYSINKGEGAFYGPKIEFVLRDAIGRDWQCGTLQVDFNLPGRLGASYVDKDGSKKIPVMLHRALFGSLERFIGILIENYAGKFPFWISPLQTVVIPISEDFEDYAVKVSEKIKLAG

SEQ ID NO: 188977 - protein, 301 aa, Unknown
  Bacterial polypetide isolated from the Sargasso Sea
EALELIRHDCAHVMAEAVQELFPGTQVTIGPAIENGFYYDFARDEPFTVADLPKIEKKMHDIIQRNKNFIREVWSKEESIKFFKEKGEDYKVELINDLPDNEEISIYKQGNWLDLCRGPHMVSTKQIGKAFKLMKVAGAYWRGDSSNTMLTRIYGTAWATEKELEQHLLQIDEAEKRDHRKLGREMDLFHFQEEAPGAVFWHPKGWKLFQSLINYMRNRQDKAGYVETNTPDMMDKSLWETSGHWDKFSDMMFRTEAKDDKIYAIKPMNCPGAVEIFKQGLKSYRDLPFLLSELEKCIVRT

SEQ ID NO: 188978 - protein, 256 aa, Unknown
  Bacterial polypetide isolated from the Sargasso Sea
QRLEEAEKRDHRKLGRKLDLFHFSDEAPGSVFWHPKGWTLFLQLLDYMRQRQEKAGYVEVNTPDVMDRSLWETSGHWFNYRENMFSTQTEDDRIFALKPMNCPGSVSMFAQGLKSYRDLPLRMAEFGKVHRYEPSGALHGLMRVRHFTQDDAHIYCTEDQMEGECIDVVSLVLDIYRDFGFTDVVIKLSTRPEKRIGSDEVWDKLEGALINALKVMGLDYVLYPGEGAFYGPKLEFVLRDAIGRDWQCGTLQVDMN

SEQ ID NO: 188979 - protein, 259 aa, Unknown
  Bacterial polypetide isolated from the Sargasso Sea
AFTQDDGHIFCTEDQIESETGLFIEFLSSIYADLGFKEFDIKLSTRPEMRVGSDEIWDKAEEALEAAIKNLGYPYRIDEGDGAFYGPKLDFVLTDAIGREWQCGTFQLDFNLAERLDAHYIGEDGKKHNPVMIHRAVLGSFERFIGILIENYAGKLPLWLAPQQVVIASIISDVNDYSLEIMNLLKKEGIRAEADLRNEKISYKVREHSSKKVPIILAIGNNEKNDRTVSIRRIGSKDTEVLSLDDAINQINNESKTLN

SEQ ID NO: 188980 - protein, 319 aa, Unknown
  Bacterial polypetide isolated from the Sargasso Sea
FMVKWHDLCRGPHLVSTGKIEKNFKLTKVAGAYWRGDSKNEMLQRIYGTAWSTKKELDEYLKRIEEAEKRDHRKLGKEMDLFHFREESPGSVFWHEKGWSFFQKLISYMRAKQDEAGYKEINTPEILDRTLWEKSGHWEKFGENMYTTTTPDEKIFAIKPMNCPGCVQVYNQGLKSYRDLPLKMSEFGKVHRYEPSGALHGLLRVRAFTQDDAHIFCTEDQITEECLSVTNLILEIYKDLGFKNVILKYSDRPEVRVGEDHIWDKSEAALLKAVQASKLEYSINKGEGAFYGPKIEFVLRDAIGRDWQCGTLQVDLNCQ

SEQ ID NO: 188981 - protein, 203 aa, Unknown
  Bacterial polypetide isolated from the Sargasso Sea
WGKEMDLFHFREESPGAVFWHPKGWALFQKLVGYMRQKQKNAGYKEINTPEILDKSLWEQSGHWEKFGENMFTSDTPDEKTFAIKPMNCPGCIQVFNQGLKSYRDLPLKLSEFGKVHRYEPSGALHGLLRVRAFTQDDAHIFCTEDQITEECLSVTNLILEIYKDLGFENVLLQFSDRPKKRVGDDKIWDKAESALLKAIKQS

SEQ ID NO: 188982 - protein, 240 aa, Unknown
  Bacterial polypetide isolated from the Sargasso Sea
GPHLVSSGKICKAFKLTKVAGAYWRGDSKNEMLQRIYGTGWASQKDLDDYLKRIEEAEKRDHRKLGKEMDLFHFREESPGSVFWHEKGWALFQKLINYMRARQDAAGYKEVNTPEVLDRLLWEKSGHWEKYGENMYTSETPDEKVFAIKPMNCPGHIQVFNQGLKSYRDLPLRITEFGKVHRYEPSGALHGLLRVRAFTQDDAHIFCSEDQITSECLNVTNLILDIYKDLGFENSGVKIC

SEQ ID NO: 188983 - protein, 123 aa, Unknown
  Bacterial polypetide isolated from the Sargasso Sea
MPNIKLPDGNSLNFDKKVTGFQIAEKISKSLSKQALIISVDGNLKDLNYEINHDCSVKIYTAKDKEGLETIRHDTAHILAMAVQEIFPKTQVTIGPVIDNGFYYDFARKDPFTEEDLRKIEKK

SEQ ID NO: 188984 - protein, 168 aa, Unknown
  Bacterial polypetide isolated from the Sargasso Sea
MSGKITITFPDGNKKEVDKGISGLDLASQISKSLAKESVAIKINDEIKDISLPINSEASVAILKKDSEEALELIRHDCAHVMAEAVQELFPGTQVTIGPAIENGFYYDFARNEPFTLSDLPKIEKKMHEIIQRNESFVREVWSKDEAIKYFKDKGENYKVELINDLSD

SEQ ID NO: 188985 - protein, 310 aa, Unknown
  Bacterial polypetide isolated from the Sargasso Sea
KEINTPEILDRSLWEKSGHWDKFGEHMYTSTTPDEKVFAIKPMNCPGCVQVFNQGLKSYRDLPLKMSEFGKVHRYEPSGALHGLMRVRAFTQDDAHIFCTNEQITEESLSVTNLILDIYKDLGFKNVILKYSDRPEVRVGDDNVWDKSEAALLDAVKATKLEYTINKGEGAFYGPKIEFVLRDAIGRDWQCGTLQVDLNLPERLGASFVDKDGTKKVPVMLHRALFGSLERFIGILIENYAGKLPFWISPLQIVVIPVSDEFDKYSIDVANKLRNEGLNCEVDLKNHNLNYKIREHSLTKVPVLLICEKR

SEQ ID NO: 188986 - protein, 263 aa, Unknown
  Bacterial polypetide isolated from the Sargasso Sea
IKFDKPVTGSEVAEKISKSLAKQALIMSVNGELKDLYHIIKEDSDVKIFTAKDPEGLEVIRHDTAHIMAMAVQELYPGTQVTIGPVIENGFYYDFARKEPFTSDDLKKIEKRMSEIIDKDVKTRREVWERDKAISHFKKIGENYKAEIIDSIPEKEELTIYHHGDTWHDLCRGPHLESSGKIGKAFKLTKVSGAYWRGDSKNEMLQRIYGTGWSSQKDLDIYLNRIEEAERRDHRKLGKEMDLFHFREESPGSVFWHEKGWSL

SEQ ID NO: 188987 - protein, 234 aa, Unknown
  Bacterial polypetide isolated from the Sargasso Sea
NYMRKRQDKAGYVETNTPDMMDKSLWETSGHWDKFSDMMFRTEAKDDKIYAIKPMNCPGAVEIFKQGLKSYRDLPFLLSEFGKVHRYEPSGALHGLMRVRAFTQDDAHIFCTEDQITQESKTVCDLILSIYKDFGFDNVRIKFSDRPEKRVGDDTIWDKAEAALMQAMEATGLEYTLNPGEGAFYGPKLEFVLRDAIGRDWQCGTLQVDLNLPGRLGATYIGEDGNKKIPVMLH

SEQ ID NO: 188988 - protein, 273 aa, Unknown
  Bacterial polypetide isolated from the Sargasso Sea
EPSGAIHGLLRVRAFTQDDAHIFCSEDQITSECLNVTNLILDIYRDLGFENVILKYADRPKIRVGNDEVWDKAEASLLEAVKASKLEYSINKGEGAFYGPKIEFVLRDAIGRDWQCGTLQVDFNLPGRLNASYVDKDGTKKVPVMLHRALFGSLERFIGILIEHYAGKFPFWISPLQTVVIPISEDFNNYAIEVSKKIKQSGISSVVDLKKHNLNYKIRDHSLAKIPLLLICGKKEVDSNSVTIRKLDSNKQENMDLNLFLKTFSALNKASSN

SEQ ID NO: 188989 - protein, 296 aa, Unknown
  Bacterial polypetide isolated from the Sargasso Sea
NRTYAIKPMNCPCHIQVFNQGLKSYKDLPIRLAEFGSCHRNEPSGALHGLMRVRNFTQDDAHIFCTEEQIQEEVSTFIDLVFEVYKTFGFDQIIIKLSTRPEKRVGSEDIWDKSEEALTKALDNKNLKWELQPGEGAFYGPKIEFSLKDCLNRVWQCGTIQVDFSMPIRLDATYVDIDNEKRNPVMLHRAILGSFERFIGILIEQYEAKFPIWLAPYQIILLSITDRNIEKCLKFNELINNNGYRSKVDIRNEKIGYKIREATLGRVPLIAVIGDKEEEIDSVALRALNGTNLGIF

SEQ ID NO: 188990 - protein, 283 aa, Unknown
  Bacterial polypetide isolated from the Sargasso Sea
SSVYRQGKFVDLCRGPHVESTAKLKWFKLTNTSQAFWRADSSRETLVRIYGMCYSSKEDLQARETMLREAAKRDHRKLGKDLQLFHVDEMVGQGLILWTPRGTIVRNELQQFISEHLNRQGYQQIHTPHIGKLDLYRTSGHFPYYQDSQYPPIVKRDTLRRLSDEGCSCGDLSNLISDGEIEGYMLKPMNCPHHIQIYASQPRSYRDLPLRLAEFGTVYRWEQSGEISGMTRVRGFTQDDAHLFITEDQIEQELLGCIELVKVIFGTLGMKDYRVRIGLRDSN

SEQ ID NO: 188991 - protein, 177 aa, Unknown
  Bacterial polypetide isolated from the Sargasso Sea
KIDFSLKDSIGRVWQLGTIQLDFSMPERLSATYVNEEGNKVAPVMIHRAILGSLERFVGILIEEYSGNFPLWLSPQQIQIINITSAQDDYCIKLRDKLRSLNFRVDTDLRNEKINLKIRENAMLRIPYLLVVGDNELKNNTVSIRTRDGDNLGEMGVEKLIKMLETLVDTKSRKLTT

SEQ ID NO: 188992 - protein, 291 aa, Unknown
  Bacterial polypetide isolated from the Sargasso Sea
MFTTNVDESNVLSLKPMNCPGHVQIFKQGLKSFRDLPLRLSEFGSCHRNEPSGALHGIMRVRAFTQDDAHIFCTEDQINDESINFCDLLKSIYKDFGFESIKIKFSDRPEIRAGDDETWDQAETALVNATKAAGIKTVLNPGEGAFYGPKLEFVLRDAIGRDWQCGTLQVDFVLPQRLDAEYVTSDGSKKRPVMLHRAILGSMERWIGILIEQYAGKWPIWLSPVQIVVATITQDADQYCEKVFIKAEELGLRISHDKRNEKIGYKIREHLEKKIPIILIVGKKEAEMGTV

SEQ ID NO: 188993 - protein, 286 aa, Unknown
  Bacterial polypetide isolated from the Sargasso Sea
DDLILIEKKMKEIINARDMVKTEVWSRQKAIDYYKKNNEPFKVELIESIPGDEPIRMYWHGHWQDLCRGPHLQHTGQVPADGFKLMHVAGAYWRGDSNREQLQRIYGCAFLNKEQLKVHLNMLEEAAKRDHRKLGREMKLFHMQEEAPGQIFWHPNGWKIYTTLQDYMRRKQEQDGYVEVNTPQLVDRKLWEASGHWEKYQENMFIVEVDEEHAREKAVNALKPMNCPCHVQVYNQGLKSYRDLPLRMAEFGSCNRYEPSGALHGVMRVRGFTQDDAHIFCRRGSN

SEQ ID NO: 188994 - protein, 283 aa, Unknown
  Bacterial polypetide isolated from the Sargasso Sea
MSEFGKVHRYEPSGALHGLLRVRAFTQDDAHIFCTEEQITEECLSVTNLILEIYKDLGFENVILKYSDRPDIRVGDDSVWDKSETALLKAIKASKLEYTINKAEGAFYGPKIEFVLRDAIGRDWQCGTLQVDLNLPGRLGATYVAKDGTKKVPVMLHRALFGSLERFIGILIENYAGKLPFWIAPLQTVVIPISNDFDDYAKNVYKKIKRAGISSEVDLKNHNLNYKIRDHSLTKVPLLLICGKKEVDTNSVTIRRLDSNKQENMELKEFLNKYSAFNKAPSI

SEQ ID NO: 188995 - protein, 233 aa, Unknown
  Bacterial polypetide isolated from the Sargasso Sea
VCIKNLGFTDFKIKLSTRPEKRIGTDASWDKAEKALQDAIEKLKLEYSIDEGDGAFYGPKLDFVLTDAIGRKWQCGTLQVDFNLPGRFDSTFIGEDGAKHTPVLLHRAALGSFERFIGILLENYGGKLPVWLAPTQTVIAAITDEANEYAVSINEKLLENGIRSELDIRNEQISYKVREHSLQKIPFIIAVGKKEVESKSVSVRRIGSDKTESILMDDFIKFVVQEAKTPLDK

SEQ ID NO: 188996 - protein, 281 aa, Unknown
  Bacterial polypetide isolated from the Sargasso Sea
KSYRDLPLKLSEFGKVHRYEPSGALHGLLRVRAFTQDDAHIFCTEDQITDECLNVTNLILEIYRDLGFKNVLLQFSDRPQKRVGDDNIWDKAETALLKAIKQTKLKYEINKGEGAFYGPKIDFILRDTIGRDWQCGTLQVDLNLPSRLGASYVSSDGTKKVPVMLHRALFGSLERFIGILIEHYAGRLPLWLSPLQAVILPISLEFNNYAKKIFEQFVKAGINTEMDLKNQKISYKIREHSLSKVPLLLICGEKELKKKSVTIRKLGSEKQETLTLDKAIK

SEQ ID NO: 188997 - protein, 265 aa, Unknown
  Bacterial polypetide isolated from the Sargasso Sea
MYTSTTPDEKFFAIKPMNCPGCVQVFNQGLKSYRDLPLKMSEFGKVHRYEPSGALHGLLRVRAFTQDDAHIFCTEEQITEECLSVTNLILEIYKDLGFEDVILKYSDRPDLRVGDDKVWDKSEAALLEAIKATKLEYSINKGEGAFYGPKIEFVLRDAIGRDWQCGTLQVDLNLPGRLGASFVDKDGTKKVPVMLHRALFGSLERFIGILIENYAGKLPFWISPLQAVVIPISSDFDEYAKSVAKELKRVGLIVEVDLKNHNLNY

SEQ ID NO: 188998 - protein, 301 aa, Unknown
  Bacterial polypetide isolated from the Sargasso Sea
FPGTQVTIGPVIDDGFYYDFARKEPFTEEDLRKIEKKMLEIVERDEPTHKEIWKREKAIEHFKKAGEVYKAEIIKDIPKEEEVSVYFHGKWHDLCRGPHLMSTGKIGKYFKLMKVSGAYWRGDSNNEMLQRIYGTSWSTQKQLDDYLVRIEEAEKRDHRKIGKEMDLFHFREESPGAVFWHEKGWILFLKLIDYMRSKQKLAGYQEINTPEILDRSLWEKSGHWEKFGEHMYTSTTPDEKIFAIKPMNCPGCVEVFKQGLKSYRDLPLKMSEFGKVHRYEPSGALHGLLRVRAFTQDDAHI

SEQ ID NO: 188999 - protein, 294 aa, Unknown
  Bacterial polypetide isolated from the Sargasso Sea
GPISKLINYMRDRQNAAGYKEVNTPEVLDRQLWEKSGHWEKYGENMYTSETPDEKVFAIKPMNCPGHIQVFNQGLKSYRDLPLRITEFGKVHRYEPSGALHGLLRVRAFTQDDAHIFCSEDQITNECLKVTNLILDIYKDLGFNNIILKYADRPEVRVGEDKVWDKAEASLLEAVKASKLDYSINKGEGAFYGPKIEFVLRDAIGRDWQCGTLQVDLNLPGRLDASYIDKDGTKKVPVMLHRALFGSLERFIGILIEHYAGKFPFWISPLQTVVIPISEDFEDYANKVSKKIKQ

SEQ ID NO: 189000 - protein, 246 aa, Unknown
  Bacterial polypetide isolated from the Sargasso Sea
QITGESLSVTNLILNIYKDLGFENVILKYSDRPDLRVGEDEVWDKAEKALLEAVKATKLEYSINKGEGAFYGPKIEFVLRDAIGRDWQCGTLQVDLNLPGRLGASFVDKDGSKKVPVMLHRALFGSLERFIGILIENYSGKLPFWISPSQIMVIPVSEDFNDYSVEVNKKLIASGLNSEVDLKNHNLNYKIREHSLSKVPILLICGKKEVDSNSVTIRQLDSTKQENMELKKFINHYQALNKAPSL

SEQ ID NO: 189001 - protein, 252 aa, Unknown
  Bacterial polypetide isolated from the Sargasso Sea
IFCTEEQITEESISVTKLILDIYKNLGFKKVFLKYSDRPEKRVGDDTIWDKSEKALLAAIKKTKLEYSVNKGEGAFYGPKIEFVLRDAIGRDWQCGTLQVDLNLPERLGATFVDKDGTKKPPVMLHRALFGSLERFIGILIENYAGKLPFWLSPSQVVVLPIAEEHNEYAKKIFEELFKEGIKCEVDLRNQKINYKIREHSLAKVPLLLICGKKEISSKSITIRKLGSEKQETLKFIKALQNIKLLNKLPIK

SEQ ID NO: 189002 - protein, 341 aa, Unknown
  Bacterial polypetide isolated from the Sargasso Sea
LLDATIPINKDSKVVIITSKDKEGIEIIRHSFAHLIGHAVKQIYSDIKMAIGPVIEDGFYYDIFSEYRFTPEDLIKIENRINKLIKTNYDVEILQVSKEEAIKTFKERDETFKLRIIEEIPEEGLINLYKHEEYIDMCRGPHVPNTRHLRHFKLLKLSGSYWRGNSENESLQRIYGTAWAKEKELNDYLTRIEEAEKRDHRKLGKKHSLFHIQEESPGMIFWHPNGWTIYQVLEKYIREILKKNDYLEIKTPQAVDKSLWEKSGHWEKFRDDMFTTASENRTYAIKPMNCPCHIQVFNQGLKSYKDLPIRLAEFGFCHRNEPSGALHGFMRVRNFTQDDAH

SEQ ID NO: 189003 - protein, 322 aa, Unknown
  Bacterial polypetide isolated from the Sargasso Sea
MSEIIDRDVKTKREVWDRAKAIAHFKKIGEKYKAEIIESIPKNEELSIYHHGDTWHDLCRGPHLVSSGKIGKAFKLTKVSGAYWRGDSNNEMLQRIYGTCWSSKKELDEYLHRLEEAEKRDHRKLGKEMDLFHFREESPGSVFWHEKGWNLFQRLVEYMRLKQRNAGYKEISTPELLDKSLWEKSGHWEKFGHHMFTSETPDEKVFAVKPMNCPGCVQVFNQGLKSYRDLPLKLSEFGKVHRYEPSGALHGLLRVRAFTQDDAHIFCTEEQITDECISVTKLILDIYKDLGFEKVFLKYSDRPEKRVGDDKVWDKSEKALLK

SEQ ID NO: 189004 - protein, 286 aa, Unknown
  Bacterial polypetide isolated from the Sargasso Sea
RHDTAHILAMAVQELFPGTQVTIGPVIENGFYYDFSRKEPFTEDDLKKIEEKMKQIVDRDEKTKREVWDRNKAIKHFQKKGETYKAELIANIPKDEEVSIYFHGKWHDLCRGPHLSSTGKIGKFFKLTKVSGAYWRGDSKNEMLQRIYGTSWASQKDLDSYLKKIEEAEKRDHRKLGKEMDLFHFREESPGSVFWHVKGWALFQKLINYIRVKQDNAGYKEVNTPEVLDRLLWEKSGHWEKYAENMYTSQTPDEKIFAIKPMNCPGHIQVFNQGLKSYRDLPLRIT

SEQ ID NO: 189005 - protein, 128 aa, Unknown
  Bacterial polypetide isolated from the Sargasso Sea
ENGGYNFVFSPHIAKSVLWETSGHLDFYADGMYPPMEMDGVTYYPKPMNCPFHVMVYKSSQRSYRDLPTRYFELGTVYRYELSGAVHGLLRSRGFTQDDSHIFCTREQVPAELSSLLAFCLSLLRDFG

SEQ ID NO: 189006 - protein, 317 aa, Unknown
  Bacterial polypetide isolated from the Sargasso Sea
AAICRLYDNIKLDIGPPTEDGFYYDFDMNERLSTDDFEKIEKIMEQIIQEDHPFTCEEVSRDKAIEMLKGQKYKLERLNDIPDGEPITFYTCGEFTDLCRGPHIASTGEVKAFQLVNVAGSYYRGKETNPMLQRLYGTSFKTPKDLRLHLKQLDEAKKRDHRKLAKELDLFSISENVGPGLVNWHPKGSRIRSLIESFWQNEHYRNGYEMLYTPHVGKSSLWETSGHLDFYREGMYASMDVDGQEYYAKPMNCPFHIEIYKSNLRSYRELPLRWAELGTVYRYEKAGTLHGLFRVRGFTPDDAHIFCTAEQIEDEIK

SEQ ID NO: 189007 - protein, 285 aa, Unknown
  Bacterial polypetide isolated from the Sargasso Sea
VYHHGDTWHDLCRGPHLLSSGKIGKAFKLTKVAGAYWRGDSKNEMLQRIYGTGWASQKDLDDYLKRIQEAEKRDHRKLGREMDLFHFREESPGSVFWHEKGWALFQKLINYMKMKQDAAGYKEINTPEVLDRSLWEKSGHWEKFGANMYTSTTPDEKVFAIKPMNCPGCVEVFNQGLKSYKDLPLKMSEFGKVHRYEPSGALHGLLRVRAFTQDDAHIFCTEDQITKECLTVTNLILEIYKDLGFENVILKYSDRPELRVGDDSVWDKAEAALLDAVKATKLEYE

SEQ ID NO: 189008 - protein, 275 aa, Unknown
  Bacterial polypetide isolated from the Sargasso Sea
DKKVFAIKPMNCPGCVQVFNQGLKSYRDLPIKYSEFGKVHRYEPSGALHGLLRVRAFTQDDAHIFCTEEQITQECLSVTNLILEIYKDLGFENVLLKYSDRPETRVGDDKIWDKSESALLEAIKKSKLKYEINKGEGAFYGPKIEFVLRDAIGRDWQCGTLQVDLNLPARLGASYVSSDGSKKIPVMLHRALFGSLERFIGILIEHYAGKLPFWLSPIKAVVLPIASEYDSYAKKIFEQCIKAGINTEVDLKNQKINYKIREHSLSKIPLLLICG

SEQ ID NO: 189009 - protein, 177 aa, Unknown
  Bacterial polypetide isolated from the Sargasso Sea
MPTITLPDGNNINFSKKVTGVEVAEKISKSLAKQAMVISVDGELKDLDYLIDKDCSVKIFTSKNPEGLETIRHDTAHILAMAVQELFPGTQVTIGPVIENGFYYDFARKESFTEDDLVKIENKMKEIVDRDEITKREVWERNKAIDHFKKKGEIYKSELIKAIPEKEDVSIYFHGDG

SEQ ID NO: 189010 - protein, 217 aa, Unknown
  Bacterial polypetide isolated from the Sargasso Sea
MPQIQLLDGKKIDFEKFITGFELTKKISKSLEKIALIMEVDGDLKDLSHKITKDAKVRIITPKDKEGLEVIRHDAAHIMAMAVQELFPGTQVTIGPVIENGFYYDFARKEPFTSDDLNKIEKKMSEIIDRDVKTKREVWKRKEAIKHFKKIGEKYKAEIIESIPENEELSVYHHGDTWHDLCRGPHLASSGKIGKAFKLTKVSGAYWRGDSNNEMLQ

SEQ ID NO: 189011 - protein, 298 aa, Unknown
  Bacterial polypetide isolated from the Sargasso Sea
TQVTIVPVIENGFYYDFARKEPFTSDDLKKIEKKMSEIIDRDVKTKREVWERKKAIEHFEKIGEKYKAEIIESIPKNEELSIYHHGDTWHDLCRGPHLSSSGKIGKAFKLTKVSGAYWRGDSNNEMLQRIYGTCWSNKKDLDDYLHRLEEAEKRDHRKLGKEMDLFHFREESPGSVFWHERGWNLFQRLIDYMRAKQRIAGYKEINTPELLDKSLWEKSGHWEKFGEHMYTSETPDKKVFAVKPMNCPGCVQIFNQGLKSYRDLPLKLSEFGKVHRYEPSGALHGLLRVRAFTQDDAH

SEQ ID NO: 189012 - protein, 284 aa, Unknown
  Bacterial polypetide isolated from the Sargasso Sea
TYKAEIIESIPESEELSVYHHGDTWYDLCRGPHLSSSSKIGKAFKLTKVSGAYWRGDSKNEMLQRIYGTCWSSKKDLDEYLNRLEEAEKRDHRKLGKEMDLFHFREESPGSVFWHQKGWNLFQKLISYMRAKQDKAGYNEINTPEILDRSLWEKSGHWDKFGDNMYTSTTPDEKVFAIKPMNCPGCVQVFNQGLKSYRDLPLKMSEFGKVHRYEPSGSLHGLLRVRAFTQDDAHIFCTDNQITQECLSVTNLILEIYKDLGFENIILKYSDRPDVRVGEDPCLG

SEQ ID NO: 189013 - protein, 266 aa, Unknown
  Bacterial polypetide isolated from the Sargasso Sea
GKHFKLTKVAGAYWCGDSNNVMLQRIYGTSWSSKKELDNYLKMIEEAEKRDHRKIGKEMDLFHFREESPGSVFWHDRGWRLFQKLIDYMREKQNTAGYKEINTPEILDRSLWEKSGHWDKFGEHMYTTQTPDEKVFAIKPMNCPGCVQIFNQGLKSYRDLPLKLSEFGKVHRYEPSGALHGLMRVRAFTQDDAHIFCTEDQITQETLSVTNLILNIYKDLGFEKVILKYSDRPEARVGDDKIWDKAEAALLQAIKSSKLEYSVNKG

SEQ ID NO: 189014 - protein, 271 aa, Unknown
  Bacterial polypetide isolated from the Sargasso Sea
EGFKLIKLAGAYWRGDSRNDMLQRVYGTAWRDKKELEAYLLQLDEAEKRDHRRLGRELDLFHFQEEAPGAVFWHHKGWTLFRLLIDYMRKRQEDAGYSEISTPGVMDRSLWETSGHWETFREHMYTTQTEDNRVFALKPMNCPGGIQVFRQGITSYKDLPKRIAEFGKVNRYEPSGALHGLMRVREFTQDDAHIFCTEEQIDEECRIVVELILDIYRDFGFEDVAIKFSDRPENRIGSDAIWDRLEAALKGALDDMDRPYTLNPGEGAFYG

SEQ ID NO: 189015 - protein, 296 aa, Unknown
  Bacterial polypetide isolated from the Sargasso Sea
FYYDFARKESFTSDDLKKIEKKMSEIIDRDVKTKREVWKRDKAIEHFKKIGEKYKAEIIESIPQNEELSVYHHGDTWHDLCRGPHLASSGKIGKAFKLTKVSGAYWRGDSNNEMLQRIYGTCWSSKKELDDYLHRLEEAEKRDHRKLGKEMDLFHFREESPGSVFWHEKGWLLFQRLVEYMRMKQRLAGYKEINTPELLDKTLWEKSGHWEKFGEHMFTSETPDEKTFAVKPMNCPGCVQVFNQGLKSYRDLPLKLSEFGKVHRYEPSGALHGLLRVRAFTQDDAHIFCTEDQITE

SEQ ID NO: 189016 - protein, 302 aa, Unknown
  Bacterial polypetide isolated from the Sargasso Sea
NGFYYDFARKEPFTEDDLKKIEKKMSEIIDRDVKTRREVWERSKAIAHFKKIGEKYKAEIIESIPENEELSVYHHGDTWRDLCRGPHLSSSSKIGKAFKLTKVSGAYWRGDSKNEMLQRIYGTCWSSKKELDDYLNKLEEAEKRDHRKLGKEMDLFHFREESPGSVFWHEKGWNLFQRLVEYMRFKQRNAGYREINTPELLDKSLWEKSGHWDKFGDLMFTSETPDEKTFAIKPMNCPGCIQVFNQGLKSYRDLPLKLSEFGKVHRYEPSGALHGLLRVRAFTQDDAHIFCTEEQITEECII

SEQ ID NO: 189017 - protein, 234 aa, Unknown
  Bacterial polypetide isolated from the Sargasso Sea
IAIDRPFTPEDMAAIEKRMAELIDKDYDVIKKMTPRADVIELFKSRGEEYKLRLIDDMPDETAMGLYFHEEYVDMCRGPHVPNTRFLKAFKLTRISGAYWRGDSKNEQLQRVYGTAWADKKQLAAYIQRIEEAEKRDHRRIGKQLDLFHLQEEAPGMVFWHANGWTVYQVLEQYMRQVQRENGYQEIKTPQVVDRILWERSGHWSNYAENMFTTASGNRDYAVKPMNCPCHVQV

SEQ ID NO: 189018 - protein, 229 aa, Unknown
  Bacterial polypetide isolated from the Sargasso Sea
EIQLLDGKKISFVKPISGFELVKKISKSLEKDALIMEVDGILKDLSHEIKKDSKVRIITQKDKEGLEVIRHDAAHIMAMAVQELYPGTQVTIGPVIENGFYYDFARKEPFTNEDLSKIEAKMSEIIDRDVKTKREVWKRDKAISHFKKIGEKYKAEIIESIPENEDLSVYHHGDTWYDLCRGPHLASSSKIGKAFKLTKVSGAYWRGDSNNEMLQRIYGTCWSSKKELD

SEQ ID NO: 189019 - protein, 233 aa, Unknown
  Bacterial polypetide isolated from the Sargasso Sea
MDIYKDLGFEKVFLKYSDRPEKRVGDDKIWDKSETALLAAIKKTKLEYTINKGEGAFYGPKIEFVLRDAIGRDWQCGTLQVDLNLPGRLGATFVDKDGTKKVPVMLHRALFGSLERFIGIIIENYAGKLPFWLSPSQVVVLPIAEEHNDYAKKIFKELFKEGIKCEVDLRNQKINYKIREHSLSKVPILLICGGKEIKNKSVSIRKLGSEKQEVKKFDIALKEFKSSNNLPIK

SEQ ID NO: 189020 - protein, 232 aa, Unknown
  Bacterial polypetide isolated from the Sargasso Sea
MPQIQLLDGKKISFAKSISGFELSKKISKSLEKSALIMEVDGKLKDLSHEITKDSNVRIITSKDKEGLEVIRHDAAHIMAMAVQELFPGTQVTIGPVIENGFYYDFARKEPFTSDDLTNIEKKMSEIIDRDVKTRREVWNRDKAINHFKKIGEKYKAEIIESIPKNEELSVYHHGDTWYDLCRGPHLSSSSKIGKAFKLTKVSGAYWRGDSNNEMLQRIYGTCWSSKKELDD

SEQ ID NO: 189021 - protein, 197 aa, Unknown
  Bacterial polypetide isolated from the Sargasso Sea
MPNITLPDGKQLSFSESVTGFQLAEKISKSLSKQALIISVDGQLKDLDFKIEKDSKVKIFTSKDKEGLETIRHDTAHILAMAVQELFPGTQVTIGPVIEDGFYYDFARKEPFTQEDLEKIENKMKDIVDRNEKTYREVWKRNDAIKHFKNNGEHYKAEIINSIPEGEEVSIYFHGKWHDLCRGPHLSSTGKIGKYFK

SEQ ID NO: 189022 - protein, 312 aa, Unknown
  Bacterial polypetide isolated from the Sargasso Sea
YDFAMDPITESDLKPIQKKMQELARKNFTVERIELSDEELQQHFADNPYKLEIINDKIEDGGGSTIYKQGEWYDLCLGPHVPNTSRLMFCKLTSVSSAYWRGDQDREQLVRIYGIVEPTKDALKSTLHRMEEAKKRDHRKLGKDLQLFHIDEEVGQGLILWTPRGSIIRQELQDFISSHLRRQGYSQVFTPHIGKLDLYRTSGHFPYYQDSQYPPLVEKDLMKKLSDDGCSCSELSNMMKSGDIDGYMLKPMNCPHHVKIYASQARSYRDLPLRLAEFGTVYRWEQSGEISGMTRVRGFTQDDAHLFVTEDQ

SEQ ID NO: 189023 - protein, 279 aa, Unknown
  Bacterial polypetide isolated from the Sargasso Sea
GTVYRYERAGTLHGLMRIRGFTQDDAHIFTTEEGLADEIAQLLEFVISVLEAFGFEDFSFNLSTRDYEKSVGDDQIWDLATAALEKALDTHGLPFETKEGDAAFYGPKIDIDVSDAIGRSWQLSTIQLDFNLPERFNLRYINSSGERKRPVMIHRALMGSIERFFGVLLEHYAGAFPAWLAPIQIAVLPVANEHGDYASSILTQLEEVGFRCEFHRADNPLGKRIRDVKTQKIPYVLVAGSDDVANGTVGVNPRGSEVERDVPISEFIERLQGEVENRL

SEQ ID NO: 189024 - protein, 312 aa, Unknown
  Bacterial polypetide isolated from the Sargasso Sea
TADPSEGVEGDNISIYKNDNFEDLCRGPHVPSTSQIIHFKLTKLAGAYWRGIETNPQLQRIYGTAWFSKEDLDNYLARQKEAEKRDHRKLGNELDLFVNTDEIGPGQFLWKPKGSILRQNIEDYSKKAHADNGYEYAYTPHIGRSVLWETSGHLDYYKEGMYPPLKNEGNEDDEYYLKPMNCPFHILIYKSDIRSYKELPLRFFELGSVYRYEKTGVLHGLLRARGFTQDDAHIFCTSDQIEEEILNLLTFSIKLLNAFGFDSIEADLSTRPEKSIGNEDDWVKATNSLASALDNQNISYVNAHGEGAFYGP

SEQ ID NO: 189025 - protein, 143 aa, Unknown
  Bacterial polypetide isolated from the Sargasso Sea
MSEKITIAFPDGNKKEVEKGISGLELATQISLSLAKESVAIKINNEIKDISLPINADASVSILKRDSEEALELIRHDCAHVMAEAVQELFPGTQVTIGPAIENGFYYDFARDEPFTVADLPKIEKKMHDIIQRNKNFIRESMV

SEQ ID NO: 189026 - protein, 322 aa, Unknown
  Bacterial polypetide isolated from the Sargasso Sea
HSFAHPIGHAVKQIYSDIKMAIGPVIEDGFYYDIFSEYRFTPEDLTKIENRINKLIKTNYDVEILQVSKEEAIKTFKERDETFKLRIIEEIREEGLINLYKHEEYIDMCRGPHVPNTRHLRHFKLLKLSGSYWRGNSENESLQRIYGTAWAKEKELNDYLIRIEEAEKRDHRKLGKKHSLFHIQEESPGMIFWHPNGWTIYQVLEKYIREILKKNDYLEIKTPQAVDKSLWEKSGHWEKFRDDMFTTASENRTYAIKPMNCPCHIQVFNQGLKSYKDLPIRLAEFGSCHRNEPSGALHGLMRVRNFTQDDAHIFWHRRANQE

SEQ ID NO: 189027 - protein, 213 aa, Unknown
  Bacterial polypetide isolated from the Sargasso Sea
ELRVGDNSVWDKAEAALLEAVKATKLEYTINKGEGAFYGPKIEFVLRDAIGRDWQCGTLQVDFNLPGRLGASYVDKDGTKKVPVMLHRALFGSLERFIGILIENYAGKFPFWISPLQTVIIPISEDFEDYAKKVSNKIKEVGISCIVDLKNHNLNYKIREHSLAKVPILLICGKKEVDSNSVTIRRLDSDKQENMQLNKFLKTFSALNKVSSN

SEQ ID NO: 189028 - protein, 315 aa, Unknown
  Bacterial polypetide isolated from the Sargasso Sea
RDHRKLGKEMDLFHFREESPGSVFWHEKGWNLFQKLISYMRTKQDHAGYKEINTPEILDRSLWEKSGHWEKFGANMYTSTTPDEKVFAIKPMNCPGCVQVFNQGLKSYRDLPLKMSEFGKVHRYEPSGALHGLLRVRAFTQDDAHIFCTEEQITQECLSVTNLILEIYKDLGFENVILKYSDRPDLRVGDDAVWDKSEAALLEAIKETKLEYTINKGEGAFYGPKIEFVLRDAIGRDWQCGTLQVDLNLPGRLGASYVEKDGSKKIPVMLHRALFGSLERFIGILIENYSGKLPFWLTPLQVVVIPISSDFDDYS

SEQ ID NO: 189029 - protein, 208 aa, Unknown
  Bacterial polypetide isolated from the Sargasso Sea
MPIITLPDGKNLNFPKKVTGLEIAEKISKSLAKQALILSVDGELKDLYFSIEKDSSVKIFTSKDPEGLEVIRHDTAHIMAMAVQELYPGTQVTIGPVIENGFYYDFARKEPFTEDDLIKIEKRMSQIIDKDVKTRREVWEREKAINHFKKIGEKYKAEIIESIPENEELSVYHHGDTWYDLCRGPHLLSSGKIGKAFKLQKVQALIGG

SEQ ID NO: 189030 - protein, 226 aa, Unknown
  Bacterial polypetide isolated from the Sargasso Sea
MIEITLPDNSKKQFNNSVSAIEVAKSIGSGLAKATVAAKVNGKLIDATDLIENDCSLEIIRAQDQEGLEIIRHSCAHLFGHALKQLFPKAKMAIGPVIKNGFYYDVDLENSLTQEDLEKIEARMRKLALTSYSVRKEVVPKKVAEEVFKKRKESYKLEILKDIDDKETVGLYHHEEYIDMCRGPHVDSMRHIKAFKLSHVAGAYWRGDSKNKMLQRVYGTLWNSDK

SEQ ID NO: 189031 - protein, 307 aa, Unknown
  Bacterial polypetide isolated from the Sargasso Sea
MKVAGVYWRGDSSNTMLTRIYGTAWATEKELEQHLLQIEEAEKRDHRKLGREMDLFHFQEEAPGAVFWHPKGWTLFQSLINYMRNRQEKAGYVETNTPDMMDKSLWETSGHWDKFSDMMFRTEAKDDKIYAIKPMNCPGAVEIFKQGLKSYRDLPFLLSEFGKVHRYEPSGALHGLMRVRAFTQDDAHIFCTEDQITQESKTVCDLILSIYKDFGFDNVRIKFSDRPEKRVGDDVIWDKAEAALMQAMEATGLEYTLNPGEGAFYGPKLEFVLRDAIGRDWQCGTLQVDLNLPGRLGATYMEKMVIK

SEQ ID NO: 189032 - protein, 287 aa, Unknown
  Bacterial polypetide isolated from the Sargasso Sea
MPIITLPDGNNIEFPNEVTGLDIAEKISKSLMKQALIMSVDGELKDLYFPIKKDCSVKIFTSKDPEGLEVIRHDTAHIMAMAVQELYPGTQVTIGPVIENGFYYDFARKEPFTEDDLEKIEKKMSEIIDKDVKTKREVWKRDKAINHFKKIGEKYKAEIIESIPENEELTIYHHGDTWHDLCRGPHLVSSGKIGKAFKLTKVAGAYWRGDSKNEMLQRIYGTGWASQKDLDDYLKRIDEAEKRDHRKLGKEMDLFHFREESPGSVFWHEKGWALFQKLINYMPGSPR

SEQ ID NO: 189033 - protein, 240 aa, Unknown
  Bacterial polypetide isolated from the Sargasso Sea
MIKITLPDKSIKEFESNIDGKQIAESISNSLAKSAVCMDVNGELKDLSYVIKEDSKCKIYTKQDQYALDTLRHSTAHVLAQAVLNLFPGTEFAVGPPIEDGFYYDFLFKENIKESDLSSIENEMRRINKANQLFIREEISINDAKNKFLKQQFKQELISSADPSEGVEGDNISIYKNDNFVDLCRGPHVSSTSQINHFKLTKLAGAYWRGIETNPQLQRIYGTAWFSKEDLDNYLARQKE

SEQ ID NO: 189034 - protein, 242 aa, Unknown
  Bacterial polypetide isolated from the Sargasso Sea
ECLSVTNLILEIYKDLGFKDVILKYSDRPNLRVGADEIWDKAEDALLQAINSSKLEYTINKGEGAFYGPKIEYVLRDAIGRDWQCGTLQVDLNLPGRLGASYVDKDGSKKIPVMLHRALFGSLERFIGILIEHYSGKLPFWISPLQTVVIPVSNDFDDYAMKVHNKIIKSGITSQVDLKNHNLNYKIREHSLSKIPLLLICGKKEVDSNTVTIRRLDSNKQENMELKEFLKKFSAFSKAPSI

SEQ ID NO: 189035 - protein, 271 aa, Unknown
  Bacterial polypetide isolated from the Sargasso Sea
KISKSLAKQALIMSVNGELKDLYFTIDKDSSVKIYTAKDPEGLEVIRHDTAHIMAMAVQELYPGTQVTIGPVIENGFYYDFARKEPFTKDDLKNIEKRMSEIIDKDVKTRREVWEREKAISHFKKIGEKYKAEIIESIPQNEKLTVYHHGNTWHDLCRGPHLESSGKIGKAFKLTKVSGAYWRGDSKNEMLQRIYGTGWASQKDLDVYLKRIEEAEKRDHRKLGKEMDLFHFREESPGSVFWHQKGWNLFQKLVSYMRMKQDHAGYEEINT

SEQ ID NO: 189036 - protein, 283 aa, Unknown
  Bacterial polypetide isolated from the Sargasso Sea
MPNIKLPDGKKIPFSKSINGFELAKKISKSLAKDACVMSVDGKLKDLDFSIDKDVQVKIITQKDKEGLEVIRHDAAHILAMSVQELFPGTQVIIGPVIENGFYYDFSRKESFTEEDLKKIENKMKEIVDRDEPTRREVWKRDVAIKHFKKIGEHYKAKIIEDIPENEEISIYHHGKWHDLCRGPHLPSTGKIGKAFKLTKVSGAYWRGDSKNEMLQRIYGTCWRSKKELDEYLLRLEEAEKRDHRKLGKEMDLFHFREESPGAVFWHDKGWTLFRSLVDYMRK

SEQ ID NO: 189037 - protein, 107 aa, Unknown
  Bacterial polypetide isolated from the Sargasso Sea
MLNITLPDGKKLTFEKKVSGTKIAEKISKSLAKEALVMSVDGILKDLSFEIDKDCSVKILTSKDKDGLDIIRHDTAHILAMAVQELFPGTQVTIGPTIENGFYYDFS

SEQ ID NO: 189038 - protein, 199 aa, Unknown
  Bacterial polypetide isolated from the Sargasso Sea
MTPLEEIRHSAAHVLATAVLRLYPDTQLDIGPPTDSGFYYDFDSEIPFTPEVIEAIEDEMKKIIKENQRFEKIEVSREEAIEIIKEMGQETYKLGRLEDIPEGEEISFYRNGEFSDLCAGTHVSYTKKIKAFKLLQVAGSYHRGNSENKQLQRIYGTAFASKDELKDYLERLEEAKKEIIETSVVNSGSSTSTICLAKV

SEQ ID NO: 189039 - protein, 192 aa, Unknown
  Bacterial polypetide isolated from the Sargasso Sea
KASKLEYSINKGEGAFYGPKIEFVLRDAIGRDWQCGTLQVDLNLPERLGASYIDKDGTKKIPVMLHRALFGSLERFIGILIENYSGKFPFWISPLQTMVIPISEEFNNYALEISKKIKNVGISSSVDLKNQNLNYKIRDHSLAKIPLLLICGKKEVDSNSVTIRRLDSNKQENMDIDAFLKTFSALNKASSN

SEQ ID NO: 189040 - protein, 285 aa, Unknown
  Bacterial polypetide isolated from the Sargasso Sea
KDLHFLVKKDCSVKIFTAKDPEGLKVIRHDAAHIMAMAVQELYPGTQVTIGPVIENGFYYDFARKEPFTENDLKKIEKRMSEIIDKDVKTRREVWKRDKAISHFKKIGEKYKAEIIESIPEGEELTVYHHGDTWHDLCRGPHLVSSGKIGKAFKLTKVAGAYWRGDSNNEMLQRIYGTGWASQKDLDDYLKRIEEAEKRDHRKLGKEMDLFHFREESPGSVFWHEKGWALFQKLINYMRARQDAAGYKEVNTPEVLDRLLWEKSGHWEKYGENMYTSETPDEKVF

SEQ ID NO: 189041 - protein, 276 aa, Unknown
  Bacterial polypetide isolated from the Sargasso Sea
EGLINLYKHEEYIDMCRGPHVPNTRHLRHFKLLKLSGSYWRGNSENESLQRIYGTAWAKEKELKDYLTRIEEAEKRDHRKLGKKHSLFHIQEESPGMIFWHPNGWKIYQVLENYIREILNQNDYLEIKTPQAVDKSLWEKSGHWEKFRDDMFTTASENRTYAIKPMNCPCHIQVFNQGLKSYKDLPIRLAEFGSCHRNEPSGALHGLMRVRNFTQDDAHIFCTEEQIQEEVSTFIDLVFEVYKTFGFDEIIIKLSTRPEKRVGSEDIWDKSEEALT

SEQ ID NO: 189042 - protein, 267 aa, Unknown
  Bacterial polypetide isolated from the Sargasso Sea
SGHWEKYAQAMFTTQSENREYAIKPMNCPGHVQIFNQGLKSYRDLPLRMAEFGSCHRNEPSGSLHGLMRVRGFTQDDAHIFCTEEQIMEEVSACIRMVYDVYGTFGFENIVVKLSTRPEQRIGSDEAWDRAEAALAEALELNGLKYDLQPGEGAFYGPKIEFTLHDCLDRAWQCGTVQLDFALPGRLGATYVGEDNERHIPVMIHRAILGSLERFIGILTEEYAGLFPTWLAPTQAVVMNITDNQADYAVKVAKALNDAGLRAKADL

SEQ ID NO: 189043 - protein, 263 aa, Unknown
  Bacterial polypetide isolated from the Sargasso Sea
MSQLNNNLDTLRHSTSHVLAQAVLKLFPSAKLGIGPAISDGFYYDFDLETTITEDDLPKLESIMHDIINEGQSFAHFTLNKETSLKKLQESNQTYKCELIQDLQLDTYSFYENGPFTDLCKGPHIENTNQIKAFKLLKVSGAYWKGSEENKMLQRIYGTAFFNTKDLKVYLHQLAEAKKRDHRKLGKELDLFSIKNEIGGGLILWHPKGSIMRNLIETYWKNQHIKQGYDLVYTPHIGKADLWKTSGHLDFYEENMYDKMSIG

SEQ ID NO: 189044 - protein, 246 aa, Unknown
  Bacterial polypetide isolated from the Sargasso Sea
MPVITLPDGSKRSFDNPVSVLDVANDIGPGLAKATVAGKVNGELVDAVDIIEHDADLQILTVKDEEGLEIVRHSCAHLLGHAIKQLYPDVKMAIGPVIDNGFYYDVDMEHSLTQEDIQQLEKRMLELAKTNYDVVKKTVSWQEARDAFVERHEPYKIEILDENISQDDKPGLYHHEEYVDMCRGPHVPNMKFCHHFKLMKVAGAYWRGKSDNKMLQRVYGTAWADKKQLKAYLTRLEEAEKRDHRK

SEQ ID NO: 189045 - protein, 129 aa, Unknown
  Bacterial polypetide isolated from the Sargasso Sea
MLEITLPDQSKRKFDKPISIEDLASDIGPGLAKATVAGRINGVLVDASELITIDAKVEIITSKDDEGIEVVRHSCAHLLAHALKQLYPQVKLAIGPVIDNGFYYDIQLDKALNDDDLQAIEDRMHKLAK

SEQ ID NO: 189046 - protein, 213 aa, Unknown
  Bacterial polypetide isolated from the Sargasso Sea
MPDIKLSDGKKISFSKKIDGFEIANKISKSLAKEACIMSVDGVLKDLSYIINKDVTVKIITSKDKEGLEVIRHDAAHVLAMAVQELFPGTQVTIGPVIQDGFYYDFSRKTPFTNEDLEKIEDKMKEIVDRNELTKREVWKRKDAITHFKKIGEHYKAQIIEDIPESEEISVYHHGKWHDLCKGPHLPSTKKIGKAFKLTKVSGAYWRGDSKNE

SEQ ID NO: 189047 - protein, 187 aa, Unknown
  Bacterial polypetide isolated from the Sargasso Sea
EYSINKGEGAFYGPKIEFVLRDAIGRDWQCGTLQVDLNLPGRLGASYVDKDGSKKIPVMLHRALFGSLERFIGILIEHYSGKLPFWISPLQTMIIPVSNEFDNYARDVNEKIKKAGISSEVDLKNHNLNYKIREHSLNKVPILLILGKKEVDSNGVTIRRLDSDKQENMDLNSFLKKFSPQSQSPKK

SEQ ID NO: 189048 - protein, 198 aa, Unknown
  Bacterial polypetide isolated from the Sargasso Sea
MSEKIIITFPDGNKKEVEKGISGLELATQISKSLAKESVAIKINNEIKDISLPINADASVSILKRDSEEALELIRHDCAHVMAEAVQELFPGTQVTIGPAIENGFYYDFARDEPFTVADLPKIEKKMHDIIQRNKNFIREVWSKDESIKHFKDKGENYKVELINDLPDNEEISIYKQGDWLDLCRGPHMVSTKQIGKA

SEQ ID NO: 189049 - protein, 318 aa, Unknown
  Bacterial polypetide isolated from the Sargasso Sea
NPEGLETIRHDTAHILAMAVQELFPGTQVTIGPVIDNGFYYDFARKEPFTEDDLVKIENKMKEIVDRNETTKREVWDRNKAISHFKKKGEIYKAELIEAIPENEDVSIYFHGEWHDLCRGPHLSSTGKIGKYFKLTKVSGAYWRGDSNNEMLQRIYGTSWATQKDLDEYLKRIEEAEKRDHRKLGREMDLFHFREESPGSVFWHERGWGLFQKLINYMRSKQDAAGYKEVNTPEVLDRQLWEKSGHWEKYGENMYTSETPDEKVFAIKPMNCPGHIQVFNQGLKSYRDLPLRFAEFGKVHRYEPSGALHGLLRVRALL

SEQ ID NO: 189050 - protein, 295 aa, Unknown
  Bacterial polypetide isolated from the Sargasso Sea
EKYKAEIIESIPGNEELSVYHHGETWHDLCRGPHLVSSGKIGKAFKLMKVSGAYWRGDSNNEMLQRIYGTSWANQKELDGYLKRIEEAEKRDHRKLGKEMNLFHFREESPGSVFWHEKGWALFQKLINYMRNRQDAAGYKEVNTPEILDRQLWEKSGHWEKYGENMYTSETPDEKVFAIKPMNCPGHIQVFNQGLKSYRDLPLRIAEFGKVHRYEPSGALHGLLRVRAFTQDDAHIFCSEDQITSECLEVTNLILDIYKDLGFENVILKYADRPEVRVGDDKIWDKARGFLAEAV

SEQ ID NO: 189051 - protein, 283 aa, Unknown
  Bacterial polypetide isolated from the Sargasso Sea
KSYKDLPLKYAEFGLCHRYEPSGTMHGLMRVRAFTQDDGHIFCTENQIESETGLFIEFLSSIYADLGFKNFDIKLSTRPEMRVGSDETWDKAEQALEAAIKNLGYSYRIDEGDGAFYGPKLDFVLTDAIGREWQCGTFQLDFNLAERLDASYVGEDGKKHIPVMIHRAVLGSFERFIGILIENYAGKLPFWLSPQQVVVASIISDVNDYSLGIVESLKKEGILAEADLRNEKISYKIREHSVRKVPIILAIGNNEKKDKTVSIRRIGSTDTEVVDLKDAIKEI

SEQ ID NO: 189052 - protein, 277 aa, Unknown
  Bacterial polypetide isolated from the Sargasso Sea
KDGFYYDIKLDKNLSDEDLEAIENRMKKLAKTKYDVRREVVSQKKAIKTFKERNEPYKVNLAEEIPDDEVIALYHHEEYIDMCRGPHVTNMRHLQAFKLTKVSGAYWRGDSKNEMLQRIYGTAWPNSKDLEKYILQQEEAEKRDHRKLGRQLDLFHFQEEAPGMVFWHPKGWSIYSALKDFIKIKQDEYDYQEINTPQIVDRKLWEASGHWDKYRENMFITEIDEDHANEKRTNALKPMNCPCHVQIFNQGLRSYKDLPIRFSEFGSCHRYEASGTL

SEQ ID NO: 189053 - protein, 216 aa, Unknown
  Bacterial polypetide isolated from the Sargasso Sea
NDAIEHFKKKGEIYKAEIIESIPEGEDVSLYFHGDWHDLCRGPHLSSTGKIGKYFKLTKVSGAYWRGDSNNEMLQRVYGTSWSTQKELDDYLNRIEEAEKRDHRKIGKEMDLFHFREESPGSVFWHQKGWSLFQKLISYMRMKQETAGYQEINTPEILDRSLWEKSGHWEKFGANMYTSTTPDEKVFAIKPMNCPGCVQVFNQGLKSYRDLPLKMS

SEQ ID NO: 189054 - protein, 271 aa, Unknown
  Bacterial polypetide isolated from the Sargasso Sea
SIYEQKETGFIDLCRGPHLPSLEYIGEFKLTKISGAYWKGNSENEMLTRIYGTAWRTKKELDSYIEKIQKAEEVDHRKLGKEMDLFHFQEEAPGMVFWHPKGWSIYTQLQYYVRKMQKNAGYSEVNTPEVVDRKLWEKSGHWEQYRENMFITEIDEEHANEKRTNALKPMNCPNHVQIYNQDIRSYRDLPFRLCEFGKCHRYEPSGTMHGLMRVRGFAQDDAHIFCTENQIESETANFIALLSKMYSDLGFNEFKIKLSTRPEKRVGSDAS

SEQ ID NO: 189055 - protein, 305 aa, Unknown
  Bacterial polypetide isolated from the Sargasso Sea
VDLDDSLTQDDLQKIELRMKELASSAYPVKKEVVPKKVAEEVFKKRKESYKLEILKDIDDEETVGLYHHEEYVDMCRGPHVDSMRHVKAFKLSHVAGAYWRGDSKNKMLQRVYGTLWNSDKELRKHLSNLEEASKRDHRKLGQKFDLFHFQEEAPGMVFWHPKGWTIFRILEDFIREKQLRAGYEEIRTPQVIDRKLWEKSGHWEKYRQNMYITEIDEEQANEKRVNALKPMSCPGHVQIYNQGIKSYRDLPVRLAEFGCCHRHEASGTLHGLMRVRQLTQDDGHIFCTDEPIESETKEFIKILF

SEQ ID NO: 189056 - protein, 192 aa, Unknown
  Bacterial polypetide isolated from the Sargasso Sea
KEMDLFHFREESPGSVFWHEKGWALFQKLIDYMRMKQDIAGYKEINTPEVLDRTLWEKSGHWEKFGANMYTSTTPDEKVFAIKPMNCPGCIEVFNQGIKSYKDLPLKMSEFGKVHRYEPSGALHGLLRVRAFTQDDAHIFCTEDQITKECLIVTNLILEIYKDLGFENVILKYSDRPNLRKGDDSVWDKAES

SEQ ID NO: 189057 - protein, 298 aa, Unknown
  Bacterial polypetide isolated from the Sargasso Sea
GHGEKFGENMFTANTQDDKTLALKPMNCPGHVQIYRQGVKSYRDLPLRMAEFGSCHRNEPSGALHGIMRVRAFTQDDAHIFCTEEQINSESVAFCNLLKEIYKDFGFTDIRVKFSDRPKVRAGDDATWDKAEQALSAATEAAGIETSLNQGEGAFYGPKLEFVLTDAIGRDWQCGTLQADFILPERLGAEYVDEDGQRKRPVMLHRAILGSLERWIGILIEQYSGKMPAWLSPVQVVIAPITETANDYANTVYQMLNNAGIRVQTDLRNEKIGYKIREHSTAKVPYILAVGAREAEAK

SEQ ID NO: 189058 - protein, 294 aa, Unknown
  Bacterial polypetide isolated from the Sargasso Sea
ESQDGLEIMRHTLAAQVLARALKNLYPDSKLAIGPTIDNGFYYDVECPKTISIDDLEKIEKEMHNIVKSKSSITKKLLSKSDALNVFKSLGESYKQEIINDSEQENDFQLYYQDNDEFVDLCRGPHLPNLSFIGAFKLTKVSGAYWKGDSNNKMLTRIYGTAWNTEKELNKYLNELEEAEKRDHRKIGKEMDLFHFQDEAPGMVFWHSDGWTIYRNLRNFVRSRLQESGYIEVNTPQVIDRKLWEASGHWDKYRENMFITEIDEEHANEKRVNALKPMNCPGHVQIYNPRDKII

SEQ ID NO: 189059 - protein, 263 aa, Unknown
  Bacterial polypetide isolated from the Sargasso Sea
GPHLPSTGRISKAFKLMKVAGAYWRGDSANEMLQRIYGTAWRTEKELRAHLHMLEEAEKRDHRRLGREMKLFHFQEEAPGAVFWHPHGWTLFSKLIDYMRMRQERAGYVEISTPTVMDRSLWERSGHWEKFGENMFLTQTEDDRMFALKPMNCPGGIQVFKQGTTSYRDLPRRIAEFGKVNRYEPSGALHGLMRVREFTQDDAHIFCVPEKMEEECRIVVELILDIYKDFGFEDVRIKFSDRPEKRIGSDAVWDQLEAALKGA

SEQ ID NO: 189060 - protein, 202 aa, Unknown
  Bacterial polypetide isolated from the Sargasso Sea
KSEAALLEAVKATKLEYSINKGEGAFYGPKIEFVLRDAIGRDWQCGTLQVDLNLPERLGASYVDKDGSKKVPVMLHRALFGSLERFIGILIENYAGKLPFWISPLQVVVIPVSDDFDDYAKKVSNEINDKGINCIVDLKNHNLNYKIREHSLSKIPVLLICGKKEVDSNSVTIRKLDNNKQENMKLDKFLELYTALSQAPSN

SEQ ID NO: 189061 - protein, 113 aa, Unknown
  Bacterial polypetide isolated from the Sargasso Sea
MPQIQLLDGKKILFNKSITGFELTKKISKSLEKSALIMEVNGELKDLSFEIKKDSKVKIITGKDKEGLDVIRHDAAHIMAMSVQELFPDTQVTIGPVIENGFYYDFARKEPFT

SEQ ID NO: 189062 - protein, 210 aa, Unknown
  Bacterial polypetide isolated from the Sargasso Sea
MPNITLPDGKKLAFKEKVSGLKVAEKISKSLAKEALVISVDGKLKDLSYEIENDCEVKVLTSKDKDGLDTIRHDTAHILAMAVQELFPGTQVTIGPTIEDGFYYDFSRKEPFTEADLKKIEIKMSEIVDRDEPTYREVWDRDKAISHFKKIGENYKSEIIQDIPQTEEISIYFHGKWHDLCRGPHLSSTGKIGKNFKLTKVAGAYWRGNS

SEQ ID NO: 189063 - protein, 120 aa, Unknown
  Bacterial polypetide isolated from the Sargasso Sea
EVDEREYQLKPMNCPFHVLTYASKLRSYRELPIRWAELGTVYRYERPGVMHGLMRVRGFTQDDAHVFCLPEQISDEILRILDLTERILSTFDFNNYEINLSTRPEKSIGDVAVWDLATKG

SEQ ID NO: 189064 - protein, 151 aa, Unknown
  Bacterial polypetide isolated from the Sargasso Sea
LILNIYKDLGFENVILKYYDRPDLRVGEDEVWDKAEKALLEAVKATKLEYSINKGEGAFYGPKIEFVLRDAIGRDWQCGTIQVDLNLPGRLGASFVDKDGSKKVPVMLHRALFGSLERFIGILIENYSGKLPFWISPSQIMVIPVSEDFYD

SEQ ID NO: 189065 - protein, 186 aa, Unknown
  Bacterial polypetide isolated from the Sargasso Sea
ILDRQLWEKSGHWEKYGENMYTSETPDEKVFAIKPMNCPGHIQVFNQGLKSYRDLPLRITEFGKVHRYEPSGALHGLLRVRAFTQDDAHIFCAEDQITSECLNVTNLILDIYKDLGFENVILKYADRPEVRVGDDEVWDKAEASLLEAVKASKLEYSINKGEGAFYGPKIEFVLRDAIGRDWQSVN

SEQ ID NO: 189066 - protein, 137 aa, Unknown
  Bacterial polypetide isolated from the Sargasso Sea
MPIITLPDGNNIDFPNKVTGFEVAEKISKSLAKQAMVISVDGELKDLDFLIENDCSVKIFTSKNPEGLETIRHDTAHILAMAVQELFPGTQVTIGPVIENGFYYDFARKEPFTEDDLLKIESKMKEIVDRKKKQKEK

SEQ ID NO: 189067 - protein, 181 aa, Unknown
  Bacterial polypetide isolated from the Sargasso Sea
KGEGAFYGPKIEFVLRDAIGRDWQCGTLQVDLNLPDRLGATFVDKDGTKKVPVMIHRALFGSLERFIGILIEHYEGKLPFWISPLQAVIIPISDEFDDYAKKIFKLASQSGINCEIDLKNHNLNYKIREHSLSKVPLLLICGKKEVDSDTITIRQLDSKKQETMKTKDFLKNYSSLNKAPL

SEQ ID NO: 189068 - protein, 226 aa, Unknown
  Bacterial polypetide isolated from the Sargasso Sea
VDGFELTKKISSSLEKTALVMEVNGILKDLSFKITTDSKVRIITAKDKEGLEVIRHDAAHIMAMAVQELYPGTQVTIGPVIENGFFYDFSRKEPFTSDDLKKIEKKMSEIIDRNVKTRREVWKRKEAINHFKKIGEKYKAEIIEGIPENEELSVYHHGDSWLDLCRGPHLASSGKIGKAFKLTKVSGAYWRGNSNNEMLQRIYGTCWSNKKDLDDYLHRLEEAEKR

SEQ ID NO: 189069 - protein, 298 aa, Unknown
  Bacterial polypetide isolated from the Sargasso Sea
VAGAYCEGDSNNPMLQRIYGTAWETQEDLENYLNLLEEAEKRDHRKLGKELDLFHFQEEAPGSVFWHAKGWTLFRTLIDYMRQRQEEAGYEEINTPDIMDKSLWERSGHLEKFGDNMFTTEAREERVYALKPMNCPGCVQVYKQGLKSYRDLPLRVAEFGKVHRYEPSGALHGLMRVRAFTQDDAHIFCTEDQITEESKKVCDLVLSIYKDFGFENVSIKFSDRPEKRVGNDDVWDKSEAALREAMEATGLKYTLNPGEGAFYGPKLEFILKDAIGREWQCGTLQVDLNLPERLGGHY

SEQ ID NO: 189070 - protein, 302 aa, Unknown
  Bacterial polypetide isolated from the Sargasso Sea
NALKPMNCPGHVQVYNQGIRSYKELPLRLCEFGSCHRYEASGTMHGLMRVRGFTQDDGHIFLTEDQIESETEIFIDLLSKVYADLGFNEFEIKLSTRPEKRVGSDEIWDKAELSLKNAIEKLGLKYRIDEGDGAFYGPKLDFVLTDAIGRKWQCGTLQLDFNLADRLDAQYVAEDGNKYNPVMFHRAILGSFERFIGILIENYSGNLPLWLAPTQVTICSITDEADDYVKEITEILRSKNIRCNSDLRNEKISYKVREHSVSKVPIIVAVGKKEISERTVSVRKLGKDHTYEYSLDGWNLQC

SEQ ID NO: 189071 - protein, 253 aa, Unknown
  Bacterial polypetide isolated from the Sargasso Sea
EQDCDVVIVTRKDAVALDLIRHDCAHVMAEAVTELYPETQVTIGPAIENGFYYDFYREKPFTEGDLETIETKMHEIVDRGDPFEREVWARDEAMSHYEKIKEPFKVELIQGIPDDEQISFYRQGNFLDLCRGPHAPSTKHVGHAFKLMSVAGAYWRGDSSNPMLQRIYGTAWPDEKKLKAYLNMLEEAEKRDHRRLGRELDLFHMQEEAVGSIFWHPRGWSLYREIEAHVRRRLEEGDYNEVKTPQLIDRSLW

SEQ ID NO: 189072 - protein, 43 aa, Unknown
  Bacterial polypetide isolated from the Sargasso Sea
EFGSGHRNEPSGALHGLMRVRNFVQEDAHIFCTEDQIERETVN

SEQ ID NO: 189073 - protein, 157 aa, Unknown
  Bacterial polypetide isolated from the Sargasso Sea
GTLQVDLNLPKRLGATYISNDGSKKIPVMLHRALFGSLERFIGILIEHYAGKLPLWLSPLQAIVLPISSEFDNYAKKIFEEFEKAGINTEMDLKNQKISFKIREHSLSKVPILLICGEKEKNKKSVTIRRLGSEKQETLSLKKAIEKISKESKLLIN

SEQ ID NO: 189074 - protein, 333 aa, Unknown
  Bacterial polypetide isolated from the Sargasso Sea
FPGTEFAVGPPIEDGFYYDFLFKENIKESDLSSIENEMKRINKANQLFIREEITINDAKNKFLKQQFKQELITTADPSEGVQGDNISIYKNDNFEDLCRGPHVSSTSQINHFKLTKLAGAYWRGIETNPQLQRIYGTAWFSKEELDNYLARQKEAEKRDHRKLGNELDLFVNTDEIGPGQFLWKPKGSILRQNIEDYSKKAHADNGYEYAYTPHIGRSVLWETSGHLDYYKEGMYPSLKSEDNKDDEYYLKPMNCPFHILIYKSDIRSYKELPLRFFELGSVYRYEKAGVLHGLLRARGFTQDDAHIFCTNDQIEEEILNLLTFFIKLLNAFG

SEQ ID NO: 189075 - protein, 214 aa, Unknown
  Bacterial polypetide isolated from the Sargasso Sea
MVSITLPDNRMLSFSGPVSGADVASAIGAGLAKAAIAARVNDEVWDLERPIEHDARVALITLRDDDDTVYDLLRHDCAHVLAEAVQELYPETQVTIGPNVEDGFYYDFSRDEPFTPEDLVKIEARMMEIVARDEPVKREIWGRSEAVQFFQDKGEHYKAEIIHGLPKEETVTLYRQGEFVDLCRGPHLPSTGKLGTSFKLMKVAGAYWRGDSSQ

SEQ ID NO: 189076 - protein, 305 aa, Unknown
  Bacterial polypetide isolated from the Sargasso Sea
KKINFEKSISGFEVAEKISKSLSKQALLISVDGELKDLNHSIYKDSSIKIFTSKDKEGLETIRHDTAHILAMAVQELFPGTQVTIGPVIEDGFYYDFARKEPFTTEDLEKIENKMKEIVDRDEKTYREVWKRNDAIEHFKKKGEIYKAEIIESIPEDEDVSLYFHGDWHDLCRGPHLSSTGKIGKYFKLTKVSGAYWRGDSNNEMLQRVYGTSWSTQKELDDYLNRIEEAEKRDHRKIGKEMDLFHFREESPGSVFWHQKGWSLFQKLISYMRMKQETAGYQEINTPRNIRSLTLGKVGSLEKFG

SEQ ID NO: 189077 - protein, 247 aa, Unknown
  Bacterial polypetide isolated from the Sargasso Sea
SGHWEKYGENMYTSETPDEKVFAIKPMNCPGHIQVFNQGLKSYRDLPLRITEFGKVHRYEPSGALHGLLRVRAFTQDDAHIFCSEDQITSECLNVTNLILDIYKDLGFENVILKYADRPEVRVGDDKVWDRAEASLLEAVKASKLEYSINKGEGAFYGPKVEFVLRDAIGRDWQCGTLQVDFNLPGRLEATYVDKDGTKKVPVMLHRALFGSLERFIGILIEHYAGKFPFWISPLQTVVIPISEDFN

SEQ ID NO: 189078 - protein, 254 aa, Unknown
  Bacterial polypetide isolated from the Sargasso Sea
LFCRPSQIEEEITKVLDLIVFVLQSFGFHEYKIYLSTRPEKYVGSDSGWESATKALETALKNKNLEFEVDPGEGVFYGPKIDIKIKDSLNRYWQVSTVQVDFNLPEKFDISYIEEDGQRRQPIMLHRALMGSLERFFGCLIEHYAGAFPLWLAPVQIILLPITDNHTEYTDKIAEELEESGIRVEKDLRNEKIGFKIREAQLQKIPYMIVLGDKEVETSTLSVRRRRSKETRTLDLKTFLNEVNEAVRNRTIDT

SEQ ID NO: 189079 - protein, 138 aa, Unknown
  Bacterial polypetide isolated from the Sargasso Sea
MPIITLPDGNNIDFPNKVTGLEVAEKISKSLAKQAMVISVDGVLKDLDFLIENDCSVKIFTSKNPEGLETIRHDTAHILAMAVQELFPGTQVTIGPVIENGFYYDFARKEPFTEDDLNKIENKMKEIVDRNEVTKREV

SEQ ID NO: 189080 - protein, 297 aa, Unknown
  Bacterial polypetide isolated from the Sargasso Sea
NGVALWRVVEDYMRDSNNRYGCEEIKTPLIMDESLWQQSGHKSKYSDEMFDTVVEKRNYVIRPMNCPGGMQVFNQHLHSYRDLPIRMAEFGIVHRNEPSGSLHGLMRARSFTQDDGHIFCTESQVQEEVIQMINQSFEVYRDFGFKEIAVKLATRPENRIGDDAVWDKSEQSLEDALKAHGVDFEFLPGEGAFYGPKIEFHIKDAIGRSWQCGTIQVDFSMPERLGAEYIDENSKKQHPVMLHRAIVGSLERFIAVVIEHYAGSLPLWLAPVQLVVLGVSQKHDDYVKKIVADLKRK

SEQ ID NO: 189081 - protein, 252 aa, Unknown
  Bacterial polypetide isolated from the Sargasso Sea
MPAITLPDGNKINFKKNISGLEVAEKISKSLLKAALIMSVNGELKDMNYVITKDSSVKIFTSKDQEGLDAIRHDTTHIMAMAVQELFPETKIAIGPAIKDGFYYDFFRKEPFTPQDLEKIEKKMKEIVEKDEPTRREVWEREKAKNHYKKINEKYKVELVDSIPKEQEVSIYYHGKWYDLCRGPHLNSTGKIGKYFKLTKVSGAYWRGDSKNEMLQRIYGTAWPSQKELDEYLIRLEEAEKRDHRKLGKEMD

SEQ ID NO: 189082 - protein, 300 aa, Unknown
  Bacterial polypetide isolated from the Sargasso Sea
SKEDAIAYFTKKNDPYKLELINDLNDGEITFYSQGNFTDLCRGPHIPHTGFIKAVKLLNIAGAYWRGDENNKQLTRIYGVTFQKQKELNLHLEQIEEAKKRDHRKLGKELELFTFSERVGMGLPLWLPKGAELRERLMDFLKKAQVNAGYLSVSTPHIGHKDLYICSGHYDKYGEDSFQPIKTPHEGEEFLMKPMNCPHHCEVFKASPKSYKDLPVRYAEFGTVYRYEQSGELHGLTRVRGFTQDDAHIFCRPDQLEDEFKKVIDLVLYVFKALNFKDFVVQVSLRDPEKPEKYIGKEEN

SEQ ID NO: 189083 - protein, 320 aa, Unknown
  Bacterial polypetide isolated from the Sargasso Sea
DFARKETFTKDDLIKIEDKMKEIIDRDEITKREVWDRNKAISHFKKKGEIYKAELIESIPENEEVSIYFHGDWHDLCRGPHLSSTGKIGKYFKLTKVSGAYWRGDSKNEMLQRIYGTSWASQKDLDQYLKRIEEAEKRDHRKLGREMDLFHFREESPGSVFWHEKGWALFQKLINYMRSRQDAAGYKEVNTPELLDRQLWEKSGHWEKYGENMYTSETPDEKVFAIKPMNCPGHIQVFNQGLKSYRDLPLRITEFGKVHRYEPSGALHGLLRVRAFTQDDAHIFCSEDQITSECLEVTNLILDIYKDLGFENVILKYADR

SEQ ID NO: 189084 - protein, 269 aa, Unknown
  Bacterial polypetide isolated from the Sargasso Sea
MPTITLPDGNNINFSKKVTGAEVAEKISKSLAKQAMVISVDGELKDLDYLIDKDCSVKIFTSKNPEGLETIRHDTAHILAMAVQELFPGTQVTIGPVIENGFYYDFARKEPFTEDDLVKIENKMKEIVDRDEITKREVWERNKAIDHFKKKGEIYKSELIKAIPEKEDVSIYFHGDWHDLCRGPHLSSTGKIGKYFKLTKVSGAYWRGDSKNEMLQRIYGTSWATQKDLDEHLKRIEEAEKRDHRKLGREMDLFHFREESPGSVFWHER

SEQ ID NO: 189085 - protein, 287 aa, Unknown
  Bacterial polypetide isolated from the Sargasso Sea
KKIGEKYKAEIMKSIPESEELSVYHHGDTWHDLCRGPHLVSSGKIGKAFKLTKVAGAYWRGDSKNEMLQRIYGTGWASQKDLDNYLKRIQEAEKRDHRKLGKEMDLFHFREESPGSVFWHEKGWALFQKLINYMKMKQDAAGYKEINTPEVLDRSLWEKSGHWEKFGANMYTSTTPDDKVFAIKPMNCPGCVEVFNQGLKSYKDLPLKMSEFGKVHRYEPSGALHGLLRVRAFTQDDAHIFCTEDQITQECLIVTSLILEIYKDLGFENVILKYSDRPELRVGNDNV

SEQ ID NO: 189086 - protein, 175 aa, Unknown
  Bacterial polypetide isolated from the Sargasso Sea
ISKSLSKQALVISVDGNLRDLNYEIDKDCTVKIHTAKDKEGLETIRHDTAHVLAMAVQELFPGTQVTIGPVIDNGFYYDFARKKPFTEEDLRKIEKKMLEIVERDEPTHREVWKRDKAVEHFKKAGELYKAEIIKDIPKEEEVSVYFHGKWHDLCRGPHLMSTGKIGKYFKLMKV

SEQ ID NO: 189087 - protein, 293 aa, Unknown
  Bacterial polypetide isolated from the Sargasso Sea
KMKKEMRKIIAEDEAFERVEVDREKAIEIVRDLDQPLKVEHIETGLVDHPSLSFYRQGEFVDLCRGPHVPSPGCIGGFKLTSLAGAYWKGDANNAQLQRLYGTAWFTQQDLDRHLEALEEARKRDHRVLGKQLDLFTINPLVGSGLVLWMPKGAMLRSVLEGFVREELTARGYEQVYTPHIGKVDLYKISGHYPYYAESQFKPIEMHEDEQYLLRPMNCPHHVMIYKARPRSYRELPLRLAEFGTVYRYEQSGELGGLTRGRGFTQDDAHIFCTPDQVEQEVAGCIDFTQKAP

SEQ ID NO: 189088 - protein, 195 aa, Unknown
  Bacterial polypetide isolated from the Sargasso Sea
MPNITLPDGKKLSFKNNVTGLQVAEKISKSLSKQALIISVDGELKDLNFSINKDSSVKIITNKDKEGLDVIRHDAAHIMAMAVQELFPGTQVTIGPVIENGFYYDFARKEPFTSEDLKKIEKKMTEIIDKDVKTRREVWERKKAIEHFKKIGEKYKAEIIEGIPEKEELSIYHHGDTWHDLYRGPHLTSSSKIGK

SEQ ID NO: 189089 - protein, 308 aa, Unknown
  Bacterial polypetide isolated from the Sargasso Sea
DLAHIMARAVQEIWPDVKVTIGPVIENGWYYDFDRHDPFTPEDLGTIEKKMKDIINSRDPVRTEVWDRSAAIAHYKKSNEPYKVELIEAIPGDEPLRMYWHGDWQDLCRGPHLQNTGQVPGDSWKLMSVAGAYWRGDSERPMLQRIYGVAFKNKEDLRAHLNFLEEAAKRDHRKLGREMNLFHFEEVAPGSVFWHPSGWHLFQTLINYMRRRQEKAGYVEVNTPDIMDRALWETSGHWFNYMENMFLAQTHDDRDYALKPMNCPGHMMIYNENLRSYRDLPMKISEFGKVHRYEPSGALHGLLRVRSF

SEQ ID NO: 189090 - protein, 298 aa, Unknown
  Bacterial polypetide isolated from the Sargasso Sea
LYIRANIRSYKELPLRYFELGSVYRYEKSGVLHGLLRARGFTQDDAHIFCTTDQIEDEILNLLTFSIKLLKSFGFDSIEADLSTRPEKSIGNNDDWEKATNSLKSALENQNISYVTAHGEGAFYGPKIDLHVKDAIGRRWQLSTIQVDFAQPDNFDLQFVDSNNKRVKPVMIHRALLGSIERFTGILIENYAGEFPGWLSPVQIKVLTIGDVSNYLNKIFKSLKGFRYEVDDRNLRLGEKLHDASKDKIPITLIVGEKDELSNTLAINIRSQENQQNVKYEDAIKQIKANLKTPIFKI

SEQ ID NO: 189091 - protein, 224 aa, Unknown
  Bacterial polypetide isolated from the Sargasso Sea
ENVLLKYSDRPKIRVGDDKVGDKSESALLEAIKKSKLKYEINKGEGAFYGPKIEFVLTDAIGRDWQCGTLQVDLNLPSRLGAAYVASDGSKKVPVMLHRALFGSLERFIGILIEHYAGKLPLWLAPIKAVVLPIALEFDNYAKKIFEQCMKAGINTEVDLKNQKINYKIREHSLSKVPLLLICGEKEVKDNTVTIRKLGSEKQETLSLEQAIRNISQKNKFPIN

SEQ ID NO: 189092 - protein, 63 aa, Unknown
  Bacterial polypetide isolated from the Sargasso Sea
LLRVRAFTQDDAHIFCTEDQITQESLTVTNLILEIYKALGFENVILKYSDRPEKRVGDDNIWD

SEQ ID NO: 189093 - protein, 105 aa, Unknown
  Bacterial polypetide isolated from the Sargasso Sea
MPAITLSDGKKISFSKKIDGFEITNKISKSLSKEACIMTVDGELKDLNFSINKDAKVKIITAKDKEGLEVMRHDAAHVLAMAVQELFPGTQVTIGPVIEDGFYYD

SEQ ID NO: 189094 - protein, 247 aa, Unknown
  Bacterial polypetide isolated from the Sargasso Sea
IKPMNCPGCVQVFNQGLKSYRDLPLKLSEFGKVHRYEPSGALHGLLRVRAFTQDDAHIFCTEDQITEETLEVTNLILEIYKALGFEDVILKYSDRPEKRVGDDSVWDKSEAALLSAIKKSKLEYSINKGEGAFYGPKIEFVLRDAIGRDWQCGTLQVDLNLPNRLGATFVDKDGTKKVPVMLHRALFGSLERFIGILIENYAGKLPFWLSPAQAVVCPIAEENNDYVKKKFEDLFKDRYKMRSGLRN

SEQ ID NO: 189095 - protein, 238 aa, Unknown
  Bacterial polypetide isolated from the Sargasso Sea
RKLGKEMDLFHFREESPGSVFWHEKGWALFQKLIDYMRMKQDIAGYKEINTPEVLDRTLWEKSGHWEKFGSNMYTSITPDEKVFAIKPMNCPGCIEVFNQGLKSYKDLPLKMSEFGKVHRYEPSGALHGLLRVRAFTQDDAHIFCTEDQITKECLIVTNLILEIYKDLGFENVILKYSDRPKLRVGDDSVWDKAENALLEAVKATKLEYTINTGEGAFYGPKIEFVLRDAIGRDWQCG

SEQ ID NO: 189096 - protein, 225 aa, Unknown
  Bacterial polypetide isolated from the Sargasso Sea
HIFCMESQIEEETKLFIDLLSSVYRDFGFEDFAVKFADRPEVRAGEDAVWDRAEKALMDATKAAGIEMDMNLGEGAFYGPKLEFVLRDAIGREWQCGTLQADFVLPERLDASYVGEDGERHRPVMLHRAILGSFERFLGVLLEHFAGRLPLWLSPVQTTIATITSDADDYAQDVLDACLKAGVRAEADLRNEKINYKIREHSVAKVPTILVVGKREAEERTVALR

SEQ ID NO: 189097 - protein, 293 aa, Unknown
  Bacterial polypetide isolated from the Sargasso Sea
TMLQRIYGTAFFDKKDLKKHLHRLEEAKKRDHRRLGRELGLFAVSEKGDLYHDEASGRSFFEEIGQGLVLWLPRGARVRSLLEDFWRSTHRRAGYEPVYSPHIAHADLWRISGHLGFYNESMYKPIAVDDEEYLLKPMNCPFHVMIYKNQAHSYRDLPVRLAELGTVYRYELAGALHGMMRVRGFTQDDAHIICAEESLEAELSKVLKLALGYLRAFGFEAFDVMLSTRPEKFVGEPGLWSRAEDALRHSIEANGLEFGVDEGGGAFYGPKIDVKIKDAIGRTWQCSTIQLDS

SEQ ID NO: 189098 - protein, 288 aa, Unknown
  Bacterial polypetide isolated from the Sargasso Sea
REILKKNDYLEIKTPQAVDKSLWEKSGHWEKFRDDMFTTASENRTYAIKPMNCPCHIQVFNQGLKSYKDLPIRLAEFGSCHRNEPSGALHGLMRVRNFTQDDAHIFCTEEQIQEEVSTFIDLVFEVYKTFGFDEIIIKLSTRPEKRVGSEEIWDKSEEALTKALDNKNLKWELQPGEGAFYGPKIEFSLKDCLNRVWQCGTIQVDFSMPIRLDATYIDIDNEKRNPVMLHRAILGSFERFIGILIEQYEAKFPIWLAPYQIILLSITDRNIEKCLKFNELINKNGLSI

SEQ ID NO: 189099 - protein, 280 aa, Unknown
  Bacterial polypetide isolated from the Sargasso Sea
IYGTSWATQKDLDEYLKRIEEAEKRDHRKLGREMDLFHFREESPGSVFWHERGWGLFQKLINYMRSRQDAAGYKEVNTPEVLDRQLWEKSGHWEKYGENMYTSETPDEKVFAIKPMNCPGHIQVFNQGLKSYRDLPLRFAEFGKVHRYEPSGALHGLLRVRAFTQDDAHIFCTEDQITSECLIVTNLILDIYKELGFENVILKYADRPEVRVGDDSVWDKAEASLLEAVKASKLEYTINKGEGAFYGPKIEFVLRDAIGRDWQCGTLQVDLNLPGRLDAS

SEQ ID NO: 189100 - protein, 275 aa, Unknown
  Bacterial polypetide isolated from the Sargasso Sea
GELKDLNFSITKDADVKIITSKDKEGLEVIRHDAAHVLAMAVQELFPGTQVTIGPVIQDGFYYDFARKEPFTNEDLQKIENKMKEIVDRNDLTKREIWERDKAIKHFEEIGEHYKSKIIQDIPKGEKISIYHHGKWHDLCRGPHLPSTGKIGKSFKLIKVSGAYWRGDSKNEMLQRIYGTCWRSKKELDDYLLRLEEAEKRDHRKLGKEMDLFHFREESPGAVFWHHKGWALFQTLISYMRQKQKNAGYKEINTPEILDKTLWEQSGHWEKLERI

SEQ ID NO: 189101 - protein, 263 aa, Unknown
  Bacterial polypetide isolated from the Sargasso Sea
AHIFCTTDQVDSEFKNTIDLVLYVFKSLGFSDFYAQVSLRDPDNPEKYIGSNENWEIAEQAILNSAKEKDLNYKVEYGEAAFYGPKLDFMVKDALGRSWQLGTIQVDYNLPERFDLTYKGKNNEDLRPVMLHRAPFGSMERFVAILLEHTGGLFPLWLASTQVEILIVSENFKNYAQKVLNILENHEIRAHLDDRNETVGKKIRESEINKVPFMIVVGENEVKNETISIRRHHGEDLGEMKVEKFIDIISKEISDCIPKFNIN

SEQ ID NO: 189102 - protein, 239 aa, Unknown
  Bacterial polypetide isolated from the Sargasso Sea
MLQRIYGTSWASQKELDDYLKRIEEAEKRDHRKLGKEMDLFHFREESPGAVFWHDKGWALFQKLVSYMRVKQENAEYKEINTPEILDRSLWEKSGHWEKFGENMYTSTTPDEKVFAIKPMNCPGCVQVYNQGLKSYRDLPLKMSEFGKVHRYEPSGALHGLLRVRAFTQDDAHIFCTEDQITEECLSVTNLILEIYKDLGFENVILKYSDRPEVRVGEDSVWDKSETALLKAIKESKLE

SEQ ID NO: 189103 - protein, 289 aa, Unknown
  Bacterial polypetide isolated from the Sargasso Sea
SIYSTLKSYMSDMQKKADYKEINTPLVIDRKLWEKSGHWDKYRENMFITEIDEEHANEKRVNALKPMNCPGHVQVYNQGVRSYKELPFRLCEFGSCHRYEASGTMHGLMRVRGFTQDDGHIFLTEDQIESETAIFIDLLSKVYADLGFNEFEIKLSTRPEQRVGSDEIWDKAELSLKNAIEKLGLEYRIDEGDGAFYGPKLDFVLTDAIGRKWQCGTLQLDFNLADRLDAQYVAEDGNKYNPVMFHRAILGSFERFIGILIENYSGNLPLWLAPTQVTVCSLQMRLMIM

SEQ ID NO: 189104 - protein, 246 aa, Unknown
  Bacterial polypetide isolated from the Sargasso Sea
FDNAVSVLDVANDIGPVLAKATIAGKVNGELVDAVDMIDADAQLQIITAKDDEGLEILRHSCAHLLGHAIKQLWPNTKMAIGPVIDNGFYYDVDMEESLTQEDLAKLEKRMLELAKTNYNVVKNKVSWQEARDAFEARGESYKMEILDENISKDDRPALYHHEEYTDMCRGPHVPNMKFCHHFKLMKVAGAYWRGDSDNKMLQRIYGTAWADKKQLKSYLQRLEEAEKRDHRKIGKALNLFHWQER

SEQ ID NO: 189105 - protein, 193 aa, Unknown
  Bacterial polypetide isolated from the Sargasso Sea
MPKVTLPDGSSRDYSEAISIFDVASDIGPGLAKAALAGKVDGELVDTSFIIKKDAELAIVTSKNDEALELIRHDAAHVMAQAVQELFPGTQVTIGPAIEDGFYYDFARQEPFSLEDLEKIEGRMEDIVSRNLLIEREVWERDEAKRVFAEIGEKYKVEIIEDIIPEGEEVSVYRQGDWFDVCRGPHLPSTGNL

SEQ ID NO: 189106 - protein, 272 aa, Unknown
  Bacterial polypetide isolated from the Sargasso Sea
GALHGLMRVRNFTQDDAHIFCTEEQIQEEVSNFIDLVFEVYKTFGFDEIIIKLSTRPEKRVGSEEIWDKSEEALSQALDNKNLKWELQPGEGAFYGPKIEFSLKDCLNRVWQCGTIQVDFSMPIRLDATYIDINNEKRNPVMLHRAILGSFERFIGILIEQYEAKFPIWLAPHQIILLSITDRNIEKCLKFNELLNNNGYRSKVDIRNEKIGYKIREATLGRVPLIAVIGDKEEEIDSVALRALDGRNLGIFNLPNLYKLINELVEKKGRTE

SEQ ID NO: 189107 - protein, 242 aa, Unknown
  Bacterial polypetide isolated from the Sargasso Sea
SGISVTKLILDIYKDLGFKKVFLKYSDRPEKRVGEDSVWDKSEKALLAAIKKTKLEYTINKGEGAFYGPKIEFVLRDAIGRDWQCGTLQVDLNLPGRLGATFVDKDGSKKTPVMLHRALFGSLERFIGILIENYAGKFPLWLSPLQAVVLPIAEEHNDYAKKIFEELFKEGINCEVDLRNQKINYKIREHSLSKIPLLLICGKKEISDKSITIRKLGSEKQETLKFTEALKSIKTLNKLPIK

SEQ ID NO: 189108 - protein, 309 aa, Unknown
  Bacterial polypetide isolated from the Sargasso Sea
FHFREESPGAVFWHEKGWALFQKLVSYMRYKQDQAGYKEINTPEILDRSLWEKSGHWEKFGANMYTSETPDQKIFAIKPMNCPGCVQVFNQGLKSYRDLPFKMSEFGKVHRYEPSGALHGLLRVRAFTQDDAHIFCTEDQITEECLSVTNLILEIYKDLGFKDVILKYSDRPDLRVGDDAVWDKSEAALIKAVEESKLEYSINKGEGAFYGPKIEFVLRDAIGRDWQCGTLQVDLNLPGRLGASYVDKDGSKKIPVMLHRALFGSLERFIGILIENYAGKLPFWISPLQTVVIPISEDFNEYALSVHKK

SEQ ID NO: 189109 - protein, 211 aa, Unknown
  Bacterial polypetide isolated from the Sargasso Sea
RVGDDSIWDKSEAALLSAIKKSKLEYTINKGEGAFYGPKIEFVLRDAIGRDWQCGTLQVDLNLPNRLGATFVDKDGTKKVPVMLHRALFGSLERFIGILIENYAGKLPFWLSPSQAVVCTIAEENNEYVKKLFEDLFKEGIKCEVDLRNEKINYKIREHSLAKVPVIIVCGKEEVAGNTVTIRRLGSEKQEKMKREDLIKNMLKENKLPLN

SEQ ID NO: 189110 - protein, 111 aa, Unknown
  Bacterial polypetide isolated from the Sargasso Sea
ASPPWLSPKQVSILNITDSQAEYCTEIAEKLKAAGFRADADLRNEKIGFKIREHTLHKVPFQLVVGDKEKETNTVAVRTRKGEDLGTMSVDEFIAILEKAIAERGRFGMEN

SEQ ID NO: 189111 - protein, 280 aa, Unknown
  Bacterial polypetide isolated from the Sargasso Sea
NFKGKVNGLQVAEKISKSLSKQALVIAVDGNLKDLNYEIDKDCSVKIYTSKDKEGLETIRHDTAHILAMAVQELFPGTQVTIGPVIEDGFYYDFARKEPFTEEDLRKIEKKMLEIVERDEPTHREVWKRDKAVEHFKKAGEIYKAEIIQDIPKEEDVSVYFHGKWHDLCRGPHLTSTGKIGKYFKLMKVSGAYWRGDSNNEMLQRIYGTSWSTQKELDDYLLRIEEAERRDHRKLGKEMDLFHFREESPGSVFWHEKGWLLFQKLIEYMRSKQKLSGYKE

SEQ ID NO: 189112 - protein, 213 aa, Unknown
  Bacterial polypetide isolated from the Sargasso Sea
MKIWEKAENAIISAAKDKGLNTVVEYGEAAFYGPKLDFMVKDALGRSWQLGTIQVDYNLPERFDLTYKGADDKLHRPVMIHRAPFGSMERFIAILLEHTAGNFPLWLMPEQAIILSLSEKYENYAKKVLELLENHEIRALIDNRNETIGKKIRDAEMQKLPFMLIVGEEEEKNGTISVRRHGQEGKGNITVSIEEFVSIANEEISNTLKTFEV

SEQ ID NO: 189113 - protein, 125 aa, Unknown
  Bacterial polypetide isolated from the Sargasso Sea
MPQIQLLDGKKISFTKSINGFDLTKKISKSLEKAALIMEVDGQLKDLSHEITKNSKVRIITSKDKEGLEVIRHDAAHIMAMAVQELFPGTQVTIGPVIENGFYYDFARKEPFTSDDLEKVEKKMS

SEQ ID NO: 189114 - protein, 219 aa, Unknown
  Bacterial polypetide isolated from the Sargasso Sea
KYSDRPDLRVGDDAVWDKSEAALLKAVEASKLEYSINKGEGAFYGPKIEFVLRDAIGRDWQCGTLQVDLNLPGRLGASYIDKDGTKKIPVMLHRALFGSLERFIGILIENYAGKLPFWISPLQTVVIPISEDFNDYALSVHRKIKNAGISCDVDLKNHNLNYKIREHSNSKVPMLLICGKKEVDSNAVTIRRLDSNKQENMLIDEFIKKYTDLNKASSI

SEQ ID NO: 189115 - protein, 251 aa, Unknown
  Bacterial polypetide isolated from the Sargasso Sea
TEDDLKKIEKRMSEIIDKDVKTRREVWERDKAINHFRKIGEKYKAEIIESIPENEELSVYHHGDTWHDLCRGPHLISSGKIGKAFKLTKVAGAYWRGDSKNEMLQRIYGTGWASKKDLDEYLKRIEEAEKRDHRKLGKEMDLFHFREESPGSVFWHEKGWALFQKLINYMRTRQNAAGYREVNTPEVLDRLLWEKSGHWEKYGENMYTSETPDEKVFAIKPMNCPGHIQVFNQGLKSYRDLPLRITEFGKV

SEQ ID NO: 189116 - protein, 278 aa, Unknown
  Bacterial polypetide isolated from the Sargasso Sea
IKYQLVKDIPENEQISMYWHGHWQDLCRGPHLANTGQVPGDCFKLMNIAGAYWKGDSNNKMLQRIYGVAFRNKEELKKHLIFLEEAKKRDHRNIAKEMELFHMQEEAPGMVFWHPNGWRIYQILQSYMQRELERGGYSEVKTPQVVGRKLWEDSGHWDKFQEHMFIVEVEEEGVKEKKINALKPMNCPCHIQIYNQGIKSYRDLPLRMAEFGSCHRYEPSGAMHGIMRVRGFVQDDAHIFCTEEQIENETKKFIELLSKIYQDLGFKEYKIKFSDRPE

SEQ ID NO: 189117 - protein, 279 aa, Unknown
  Bacterial polypetide isolated from the Sargasso Sea
KELDEYLKRIEESEKRDHRKLGKEMDLFHFREESPGAVFWHHKGWALFQKLVGYMRQKQKNAGYKEINTPEILDKSLWEQSGHWEKFGENMFTSETPDEKTFAIKPMNCPGCIQVFNQGLKSYRDLPLKLSEFGKVHRYEPSGALHGLLRVRAFTQDDAHIFCTEDQITEECLSVTNLILEIYKDLGFENVLLQFSDRPQKRVGDDKIWDKAESALLKAIKQSKLEYEINKGEGAFYGPKIDFVLRDTIGRDWQCGTLQVDLNLPSRLGASYVASDGSK

SEQ ID NO: 189118 - protein, 238 aa, Unknown
  Bacterial polypetide isolated from the Sargasso Sea
AKQAMVISVNGELKDLDYLIENDCSVKIFTSKNPEGLEIIRHDTAHILAMAVQELFPGTQVTIGPVIENGFYYDFARKEPFTEDDLIKIENKMKEIVDRNEITKREVWDRNKAISHFKKKGETYKAELIKAIPENEDVSIYFHGEWHDLCRGPHLSSTGKIGKNFKLTKVSGAYWRGDSNNEMLQRIYGTSWATQKDLDEYLKRIEEAEKRDHRKLGKEMDLFHFREESPGSVFGTKR

SEQ ID NO: 189119 - protein, 274 aa, Unknown
  Bacterial polypetide isolated from the Sargasso Sea
ESPGSVFWHEKGWNLFQKLISYMRTKQDHAGYKEINTPEILDRSLWEKSGHWEKFGANMYTSTTPDEKVFAIKPMNCPGCVQVFNQGLKSYRHLPLKMSEFGKVHRYEPSGALHGLLRVRAFTQDDAHIFCTEEQITQECLSVTNLILEIYKDLGFENVILKYSDRPDLRVGDDAVWDKSEAALLEAIKETKLEYTINKGEGAFYGPKIEFVLRDAIGRDWQCGTLQVDLNLPGRLGATYVEKDGSKKIPVMLHRALFGSLERFIGILIENYSG

SEQ ID NO: 189120 - protein, 225 aa, Unknown
  Bacterial polypetide isolated from the Sargasso Sea
YNKFGFDDLKIELSTRPEKRVGSDEIWDKAESSLIEALEANNIKYLENPGDGAFYGPKIDFSLKDSLSRVWQLGTIQLDFSMPGRLDASYVDKEGNKDVPVMIHRAILGSLERFVGILIEHYSGNLPFWLSPVQVMTLNITDKHRSYAEEVNSKLLDYGIRSECDYSNEKISYKIRNHAITRVPYMVIVGDKELENQMISVRDRSGNDLGSLQLEEFVDLLKKNI

SEQ ID NO: 189121 - protein, 302 aa, Unknown
  Bacterial polypetide isolated from the Sargasso Sea
DDLRKIELKMKDIVDRNEITKREVWERDKAISHFKKKGEIYKSQLIESIPDDEEISIYFHGKWHDLCRGPHLSSTGKIGKYFKLTKVAGAYWRGNSNNEMLQRIYGTSWSSKKQLDEYLKRIEEAEKRDHRKIGKEMDLFHFREESPGSVFWHQKGWSLFQKLIYYMREKQNLAGYNEINTPEILDRSLWEKSGHWEKFGANMYTTTTPDEKVFAIKPMNCPGCVQVFNQGLKSYRDLPLKMSEFGKVHRYEPSGSLHGLLRVRAFTQDDAHIFCTEEQITQECLAVTNLILSIYKDLGLKI

SEQ ID NO: 189122 - protein, 121 aa, Unknown
  Bacterial polypetide isolated from the Sargasso Sea
MPDITLPDGSLRSYDGPVTPATIAADIGPGLAKAALLAVVDDVEWDLTRPIEDDARLSLVTAKDERALALLRHDCAHVMAEAVLELFPETQVTIGPAIENGFYYDFHREKTFSEDDLAAIE

SEQ ID NO: 189123 - protein, 314 aa, Unknown
  Bacterial polypetide isolated from the Sargasso Sea
MPIITLPDGNNIDFPNKVTGLEVAEKISKSLAKQAMIMSVDGELKDLDFQIEHDCSVKIFTSKNSEGLETIRHDTAHILAMAVQELFPGTQVTIGPVIENGFYYDFARKEPFTEDDLIKIENKMKEIVDRNEITKREVWDRKKAISHFKEKGEIYKAELIESIPENEDVSIYFHGEWNDLCRGPHLSSTGKIGKYFKLTKVSGAYWRGDSNNEMLQRIYGTSWATQKDLDEYLKRIQEAEKRDHRKLGREMDLFHFREESPGSVFWHERGWGLFQKLINYMRSRTDAAGYKEVNTPEVLDRQLWGKSGHWEKYG

SEQ ID NO: 189124 - protein, 220 aa, Unknown
  Bacterial polypetide isolated from the Sargasso Sea
MPNIKLPDGNSINFEKNVTGLQVAEKISKSLSKQALVISVDGNLKDLNYEIDKDCSIKIHTAKDKEGLETIRHDTAHILAMAVQEIFPGTQVTIGPVIDDGFYYDFARKEPFTEEDLRKIEKKMLEIVERDEPTHREVWKRDKAIEHFKKVGEIYKSEIIKDIPKDEEVSVYFHGKWHDLCRGPHLMSTGKAGKYFKLMKVSGAYWRGDSNNEMLQRIYG

SEQ ID NO: 189125 - protein, 253 aa, Unknown
  Bacterial polypetide isolated from the Sargasso Sea
EEAEKRDHRKIGKEMDLFHFREESPGSVFWHQKGWSLFQKLISYMRMKQEIAGYQEINTPEILDRSLWEKSGHWEKFGANMYTSTTPDEKVFAIKPMNCPGCVQVFNQGLKSYRDLPLKMSEFGKVHRYEPSGALHGLLRVRAFTQDDAHIFCTEEQITEECLTVTNLILEIYKDLGFEEVILKYSDRPELRVGDDQVWDKSEAALLEAIKATKLEYSINKGEGAFYGPKIEFVLRDAIGRDWQCGTLQVDLK

SEQ ID NO: 189126 - protein, 191 aa, Unknown
  Bacterial polypetide isolated from the Sargasso Sea
ESKLEYSINKGEGAFYGPKIEFVLRDAIGRDWQCGTLQVDLNLPERLGASYVDKDGSKKIPVMLHRALFGSLERFIGILIENYAGKFPFWISPLQVVVIPVSDDFDEYSNEVANKVNNSGINCQVDLKNHNLNYKIREHSLAKVPILLICGKKEVDTNSVTIRKLDSNDQENMKLDKFLEKYTALNKAVSN

SEQ ID NO: 189127 - protein, 270 aa, Unknown
  Bacterial polypetide isolated from the Sargasso Sea
GALHGLLRVRAFTQDDAHIFCTEEQITDECISVTKLILDIYKDLGFEKVFLKYSDRPEKRVGDDKVWDKSEKALLEAIKKTKLEYTVNKGEGAFYGPKIEFVLRDAIGRDWQCGTLQVDLNLPGRLGATFVDKDGTKKIPVMLHRALFGSLERFIGIIIENYAGKLPFWLSPSQIVVLPIAEEHNDYAKKIFKDMFKEGIKCEVDLRNQKINYKIRDHSLSKVPFLLICGSKEIKDKSVTIRKLGSEKQETKKINNAIKEFKQLNNPPIN

SEQ ID NO: 189128 - protein, 298 aa, Unknown
  Bacterial polypetide isolated from the Sargasso Sea
MHEKGWSLFQKLVSYMRHKQDQAGYKEINTPEILDRSLWEKSGHWEKFGANMYTSETPDQKIFAIKPMNCPGCVQVFNQGLKSYRDLPFKMSEFGKVHRYEPSGALHGLLRVRAFTQDDAHIFCTEDQITEECLSVTNLILEIYKDLGFENIILKYSDRPDLRVGDDAVWDKSEAALIKAVEASKLEYSINKGEGAFYGPKIEFVLRDAIGRDWQCGTLQVDLNLPGRLGASYVDRDGSKKIPVMLHRALFGSLERFIGILIENYAGKLPFWISPLQTVVIPISEDFNDYAISVHNKI

SEQ ID NO: 189129 - protein, 236 aa, Unknown
  Bacterial polypetide isolated from the Sargasso Sea
TYKIFNQGLKSYRDLPLRITEFGKVHRYEPSGALHGLLRVRAFTQDDAHIFCSEDQITSECLNVTNLILDIYKDLGFNNVILKYADRPEVRVGEDKVWDKAEASLLEAVKASKLEYSINKGEGAFYGPKIEFVLRDAIGRDWQCGTLQVDLNLPGRLDASYVDKDGTKKVPVMLHRALFGSLERFIGILIEHYAGKFPFWISPLQTVVIPISEDFEDYANKVSKKIKLAGMSSYVD

SEQ ID NO: 189130 - protein, 272 aa, Unknown
  Bacterial polypetide isolated from the Sargasso Sea
KDKEGLETIRHDTAHILAMAVQELFPGTQVTIGPVIEDGFYYDFARKEPFTEDDLNKIEYKMKEIVERDEKTKREVWPRKKAIDHFKKIGEIYKAEIIKSIPEGEEVSIYFHGKWHDLCRGPHLTSTGKIGKYFKLTKVSGAYWRGDSNNEMLQRVYGTSWATQQDLDNYLKRIEEAEKRDHRKLGKLMDLFHFREESPGAVFWHEKGWALFQKLVSYMRHKQNQAGYKEINTPEILDRSLWEKSGHWEKFGANMYTSETPDQKIFAIKPMN

SEQ ID NO: 189131 - protein, 233 aa, Unknown
  Bacterial polypetide isolated from the Sargasso Sea
LDIYKDLGFKKVFLKYSDRPEKRVGDDAVWDKSEKALLEAIKKTKLEYTINKGEGAFYGPKIEFVLRDAIGRDWQCGTLQVDLNLPKRLGATFVDKDGTKKTPVMLHRALFGSLERFIGILIENYAGKLPFWLSPLQAVVLPIAEEHNDYAKKIFEDLFKEGIKCEVDLRNQKINYKIREHSLAKTPLILICGKKEISEKSVTMRKLGSEKQEKIKFTKAVEKLKMLNNLPIK

SEQ ID NO: 189132 - protein, 175 aa, Unknown
  Bacterial polypetide isolated from the Sargasso Sea
MPNIKLPDGNSLNFDKKITGFQIAEKISKSLSKQALVISVDGNLKDLNFEIDHDCSVKIYTAKDKEGLETIRHDTAHVLAMAVQEIFPQTQVTIGPVIENGFYYDFARKDPFTEEDLRKIEKKMLEIVERDEPTRREVWKRNKAIEHFKKAGEIYKAEIIKDIPKEEEVSVYFHG

SEQ ID NO: 189133 - protein, 205 aa, Unknown
  Bacterial polypetide isolated from the Sargasso Sea
DKSEDALTKALDNKNLKWELQPGEGAFYGPKIEFSLKDCLNRVWQCGTIQVDFSMPIRLDATYVDIDNEKRNPVMLHRAILGSFERFIGILIEQYEAKFPIWLSPCQIILLSITDRNIEKCVKFNELINNNGYRSKVDIRNEKIGYKIREATLGRVPLIAVIGDKEEEIDSVALRALNGRNLGIFNLPNLYKLMDELIEKKGRTE

SEQ ID NO: 189134 - protein, 247 aa, Unknown
  Bacterial polypetide isolated from the Sargasso Sea
MPIITLPDGKNIEFPKEVTGLDIAEKISKSLSKQALIMSVNGELKDLYFSIKKDCSVKIFTAKDPEGLEVIRHDTAHIMAMAVQELYPGTQVTIGPVIENGFYYDFARKEPFTENDLEKIEKKMSEIIDKDVKTKREVWERDKAISHFKKIGEKYKAEIIESIPEGEELTVYHHGNTWHDLCRGPHLVSSGKIGKAFKLTKVAGAYWRGDSNNEMLQRIYGTGWASQKDLDDYLKRIEEAEKRDHRK

SEQ ID NO: 189135 - protein, 263 aa, Unknown
  Bacterial polypetide isolated from the Sargasso Sea
RVRAFTQDDAHIFCSEDQITSECLNVTNLILDIYKDLGFEKVVLKYADRPEVRVGEDKVWDKAEASLLEAVKATKLEYSINKGEGAFYGPKIEFVLRDAIGRDWQCGTVQVDLNLPGRLDATYVDKDGTKKVPVMLHRALFGSLERFIGILIENYAGKFPFWISPLQTVVIPISEDFEEYASKVSKKIKEAGMSSIVDLKNHNLNYKIREHSLAKVPILLICGKKEVDSNSVTIRRLDSNKQENMELNKFLKTFSALNKASSI

SEQ ID NO: 189136 - protein, 218 aa, Unknown
  Bacterial polypetide isolated from the Sargasso Sea
MPNITLSDGKKLNFKNNVTGYEVAEKISKSLSKQALIVSVDGELKDLSFSIQKDSSVKIITSKDKEGLDVIRHDAAHIMAMAVQELFPGTQVTIGPVIENGFFYDFARKEPFTKDDLKKIERKMSEIVDRDVKTKREVWERGEAIEHFKKIGENYKAEIIESIPENEELSIYHHGDTWHDLCRGPHLVSSGKIGKAFKLTKVSGAYWRGDSNNEMLQR

SEQ ID NO: 189137 - protein, 253 aa, Unknown
  Bacterial polypetide isolated from the Sargasso Sea
RSKQDSAGYKEINTPEVLDRSLWEKSGHWEKFGENMYTSKTPDEKVFAIKPMNCPGCVQVFNQGLKSYRDLPLKMSEFGKVHRYEPSGALHGLLRVRAFTQDDAHIFCTENQITEECVSVTNLILEIYKDLGFENVILKYSDRPEVRVGEDKIWDKSEAALLKAIEATNLEYTINKGEGAFYGPKIEFVLRDAIGRDWQCGTLQVDLNLPGRLGASYVDKDGTKKVPVMLHRALFGSLERFIGILIEHYSGKL

SEQ ID NO: 189138 - protein, 266 aa, Unknown
  Bacterial polypetide isolated from the Sargasso Sea
VFNQGLKSYRDLPYKMSEFGKVHRYEPSGALHGLLRVRAFTQDDAHIFCTEDQITEESLSVTNLILNIYKDLGFENVILKYSDRPDLRVGEDEVWDKAEKALLDAVKATKLEYSINKGEGAFYGPKIEFVLRDAIGRDWQCGTLQVDLNLPGRLGASFIDKDGSKKVPVMLHRALFGSLERFIGILIENYSGKLPFWISPSQIMIIPVSEDFNDYSVEVNKKLIASGLNSEVDLKNHNLNYKIREHSLSKVPILLICGKKEVTATV

SEQ ID NO: 189139 - protein, 255 aa, Unknown
  Bacterial polypetide isolated from the Sargasso Sea
MPIITLPDGKNLNFSKDVTGLEIAEKISKSLLKQALIMSVNGELKDLYYSINKDSSVKIFTAKDPEGLEVIRHDTAHIMAMAVQELYPGTQVTIGPVIENGFYYDFARKEPFTESDLKQIEKRMSAIIDKDVKTKREVWGREKAIDHFKKIGEKYKAEIIQSIPENEELSIYHHGDTWHDLCRGPHLVSSGKIGKAFKLTKVAGAYWRGDSKNEMLQRIYGTGWASQKDLDNYLKRIEEAEKRDHRKLGKEMDLF

SEQ ID NO: 189140 - protein, 280 aa, Unknown
  Bacterial polypetide isolated from the Sargasso Sea
RLEEAEKRDHRKLGKEMDLFHFREESPGAVFWHQRGWTLFQKLIDYMRKKQNEAGYKEINTPEVLDRSLWEKSGHWEKFGAHMYTSETPDEKIFAIKPMNCPGCVQVFNQGLKSYRDLPYKMSEFGKVHRYEPSGALHGLLRVRAFTQDDAHIFCTEDQITEESLSVTNLILNIYKDLGFENVILKYSDRPDLRVGEDEVWDKAEKALLEAVKATKLEYSINKGEGAFYGPKIEFVLRDAIGRDWQCGTLQVDLNLPGRLGASFVDKDGSKKVPVMLHRA

SEQ ID NO: 189141 - protein, 96 aa, Unknown
  Bacterial polypetide isolated from the Sargasso Sea
WTLRVRAFTQDDAHIFCTEEQITDECISVTKLILDIYKDLGFEKVFLKYSDRPEKRVGDDKVWDKSEKALLEAIKKTKLEYTVNKGEGAFYGPKNR

SEQ ID NO: 189142 - protein, 146 aa, Unknown
  Bacterial polypetide isolated from the Sargasso Sea
EDQITSECLIVTNLILDIYKDLGFENVILKYADRPKVRVGDDEVWDKAEASLLEAVKASKLEYSINKGEGAFYGPQIEFVLRDAIGRDWQCGTLQVDLNLPERLGASYVDKDGTKKIPVMLHRALFGSLERFLGILIENYAAKFPF

SEQ ID NO: 189143 - protein, 276 aa, Unknown
  Bacterial polypetide isolated from the Sargasso Sea
IGKAFKLTKVSGAYWRGDSNNEMLQRIYGTCWTSKKELDDYLHRLEEAEKRDHRKLGKEMDLFHFREESPGAVFWHEKGWLLFQRLVEYMRAKQRLAGYKEINTPELLDKTLWEKSGHWDKFGEHMFTSETPDEKTFAVKPMNCPGCVQVFNQGLKSYRDLPLKLSEFGKVHRYEPSGALHGLLRVRAFTQDDAHIFCTEDQITEESLSVTNLILEIYKDLGFENVILKYSDRPEKRVGDDSVWDKSEAALLAAIKQSKLEYTINKGEGAFYGPKM

SEQ ID NO: 189144 - protein, 259 aa, Unknown
  Bacterial polypetide isolated from the Sargasso Sea
IFAIKPMNCPGCVQVFNQGLKSYRDLPLKMSEFGKVHRYEPSGALHGLMRVRAFTQDDAHIFCTEDQITQESLSVTNLILDIYKDLGFKDVILKYSDRPEVRVGDDKVWDKSEAALLKAVKESKLEYSINKGEGAFYGPKIEFVLRDAIGRDWQCGTLQVDLNLPERLGASYVDKDGSKKIPVMLHRALFGSLERFIGILIENYAGKFPFWISPLQVVVIPVSDDFDKYSKEVANKVSNSGINCQVDLKNHNLNYKIRE

SEQ ID NO: 189145 - protein, 134 aa, Unknown
  Bacterial polypetide isolated from the Sargasso Sea
KKVPVMLHRALFGSLERFTGILIEHYAGHLPLWLSPSQIVVATITSESDNYAFDVKDQLSKNGLRAETDIRNEKIGYKIREHSNAKIPIILAVGKKEAEEKTVSVRRLGSQETLVVKIDELISDLKKESLSPIN

SEQ ID NO: 189146 - protein, 125 aa, Unknown
  Bacterial polypetide isolated from the Sargasso Sea
MPEIQLLDGKKISFIKPISGFELTKKISKSLEKSALIMEVDGELKDLSHEIKKDSKVRLITSKDKEGLEVIRHDAAHIMAMAVQELYPGTQVTIGPVIDNGFYYDFARKEPFTSDDLKKIEKRMS

SEQ ID NO: 189147 - protein, 96 aa, Unknown
  Bacterial polypetide isolated from the Sargasso Sea
METIRHDTAHILAMAVQELFPGTQVTIGPVITDGFYYDFARKEPFTAQDLNKIENKMKEILDRDEKTYREVWKRNDAIEHFKKKGEIYKAEIIESI

SEQ ID NO: 189148 - protein, 282 aa, Unknown
  Bacterial polypetide isolated from the Sargasso Sea
MNLIRHDCAHVMAEAVQELFPGTQVTIGPAIENGFYYDFARDEPFTVSDLPKIEKKMHDIIQRNKNFIREVWSKEESIKYFKDKGEDYKVELINDLPDNEEISIYKQGDWLDLCRGPHMVSTKQIGKAFKLMKVAGAYWRGDSSNTMLTRIYGTAWATEKDLEQHLLQIEEAEKRDHRKIGREMNLFHFQEEAPGAVFWHPKGWALFQSLINYMRNRQDKAGYVETNTPDMMDKSLWETSGHWDKFSDMMFRTETKDDKIYAIKPMNCPGAVEIFKQRIKKL

SEQ ID NO: 189149 - protein, 196 aa, Unknown
  Bacterial polypetide isolated from the Sargasso Sea
DKYKDNMYRTIIDDRELMIKPMNCPGHVQIYNQGIKSYKDLPLRMAEFGSCHRNEPSGALHGLMRVRNFVQDDAHIFCTEDQIESETVNFCKLLQEVYNELGFNEVSIMYADRPEQRVGSDEIWDKAENALLNASKATGIPFDKNSGDGAFYGPKLDFYLHDAIGRKWQCGTLQVDFNMPGRLGASYVGEDNEKHT

SEQ ID NO: 189150 - protein, 229 aa, Unknown
  Bacterial polypetide isolated from the Sargasso Sea
MPIITLPDGNNLNFPKKVTGLEVAEKISKSLAKQAMVISVDGELKDLDFLIEKNCSIKIFTSKNNEGLETIRHDTAHILAMAVQELFPGTQVTIGPVIENGFYYDFARKEPFTEEDLKKIEEKMKEIVDRNEKTKREVWDRDKAIKHFKKKGEIYKAELIESIPKGEEVSIYFHGDWHDLCRGPHLSSTGKIGKFFKLTKVSGAYWRGDSNNEMLQRIYGTSWASQKDL

SEQ ID NO: 189151 - protein, 312 aa, Unknown
  Bacterial polypetide isolated from the Sargasso Sea
WEKYEENMYTSETPDEKVFAIKPMNCPGHIQVFNQGLKSYRDLPIRIAEFGKVHRYEPSGALHGLLRVRAFTQDDAHIFCSEDQITSECLEVTNLILDIYKDLGFENVILKYADRPEVRVGDDEIWDKAEASLLEAVKASKLEYSINKGEGAFYGPKIEFVLRDAIGRDWQCGTLQVDLNLPGRLDASYVDKDGTKKVPVMLHRALFGSLERFIGILIENYAGKFPFWISPLQTMVIPISEEFNDYAVEVSKKIKKAGISSAVDLKNNNLNYKIRDHSLAKIPVLLICGKKEVDSNSVTIRRLDSNKQENRT

SEQ ID NO: 189152 - protein, 270 aa, Unknown
  Bacterial polypetide isolated from the Sargasso Sea
MFTTEIDDEHANEKRVNALKPMNCPGHVQIYNQGIKSYKDLPLRYAEFGLCHRYEPSGTMHGLMRVRAFTQDDGHIFCTEDQIESETGLFINFLSDIYADLGFKNFDIKLSTRPEMRVGSDETWDKAEHSLETAIKNLGHPYRIDEGDGAFYGPKLDFVLTDAIGREWQCGTFQLDFNLADRLEAKYIGEDGKKYTPVMIHRAVLGSFERFIGILIENYAGKLPFWLAPQQVVIASIISDVNDYSLEIMELLKKEGISVDVDLRNEKISL

SEQ ID NO: 189153 - protein, 273 aa, Unknown
  Bacterial polypetide isolated from the Sargasso Sea
IKPMNCPGCVQVFNQGLKSYRDLPLRMSEFGKVHRYEPSGALHGLLRVRAFTQDDAHIFCTEKQITEESLSVTKLILDIYKDLGFENVILKYSDRPDLRVGEDHIWDKAEEALLKAIKASKLEYSVNKGEGAFYGPKIEFVLRDAIGRDWQCGTLQVDLNLPERLGASYVDKDGSKKVPVMLHRALFGSLERFIGILIENYSGKLPFWISPLQTTVIPVSNDFDEYAKEVTNKIKKNGISCEADLRNHNLNYKIREHSLKKIPILLICGKKES

SEQ ID NO: 189154 - protein, 281 aa, Unknown
  Bacterial polypetide isolated from the Sargasso Sea
NGFYYDFARDEPFTLSDLPKIEKKMMEIINKGEKFTREVWSREEAIKYFKEKGENYKVELIEDLDPNEEISIYRQGDWLDLCRGPHMLNTKQIGKGFKLMKVAGAYWRGDSKNTMLTRIYGTAWRNAKELENYIQQIEEAEKRDHRKLGKEMDLFHFQEEAPGAVFWHPKGWQLFQSLINYMRLRQDKANYVETSTPELLDKSLWEASGHWEKFGDNMFTTDPKEEKVFAIKPMNCPGAVEIYKQGLKSYRDLPLRMSEFGKVHRYEPSGALHGLMRVRAF

SEQ ID NO: 189155 - protein, 316 aa, Unknown
  Bacterial polypetide isolated from the Sargasso Sea
KQIYPNAQMAIGPVIKDGFYYDIKLDKNLSYEDLEVIEKRMKQLAKTKYDVVREVVSRKQAIDTFKSRNEPYKVNLAEEISEEEVIALYHHEEYIDMCRGPHVTNMRHLKAFKLTKISGAYWKGDSKNEMLQRIYGTAWPDSKDLDNYLLQQEEAEKRDHRKLGRQLDLFHFQEEAPGMVFWHPKGWSIYSALKNFIKEKQDEYDYQEINTPQIVDRKLWEASGHWDKYRENMFITEIDEEHANEKRTNALKPMNCPCHVQVFNQGLRSYKDLPIRFSEFGSCHRYEASGTLHGLMRVRGFTQDDGHIFCTEDQIK

SEQ ID NO: 189156 - protein, 305 aa, Unknown
  Bacterial polypetide isolated from the Sargasso Sea
HWDKFGSNMYTSITPDEKVFAIKPMNCPGCVQVFNQGLKSYRDLPLKMSEFGKVHRYEPSGSLHGLLRVRAFTQDDAHIFCTEDQITEECLSVTNLILEIYKDLGFENVILKYSDRPDLRVGEDHVWDKSENALLMAIKETGLEYSINKGEGAFYGPKIEFVLRDAIERDWQCGTLQVDLNLPGRLGASYVDKDGSKKIPVMLHRALFGSLERFIGILIENYSGKLPFWLSPLQSMVIPISGDFDDYAKKVNNELKKSGINSEVDLKNHNLNYKIREHSLKKIPILLICGKKEVDSNTVTIRKLG

SEQ ID NO: 189157 - protein, 281 aa, Unknown
  Bacterial polypetide isolated from the Sargasso Sea
KISKTLEKSALIMKVDGELKDLSYQIEKNSEVKIITSKDDEGLDAMRHDTTHIMAMAVQELFPGTKIAIGPAIKDGFYYDFSRKDPFTPQDLEKIEKKMKEIVDKDEPTKREVWERKKAKDHYKKIGENYKAELVDSIPQNEDVSVYYHGKWYDLCRGPHLTSTGKIGKYFKLTKVSGAYWRGDSNNEMLQRIYGTSWPSQKELDEYLKRLEEAEKRDHRKLGKEMDLFHFREESPGSVFWHEKGWRLFQSLISYMREKQNRAGYKEINTPEILDKSLWEK

SEQ ID NO: 189158 - protein, 217 aa, Unknown
  Bacterial polypetide isolated from the Sargasso Sea
ADRPEVRVGDDSVWNKAEASLLEAVKASKLEYTINKGEGAFYGPKIEFVLRDAIGRDWQCGTLQVDLNLPGRLDASYVDKDGTKKVPVMLHRALFGSLERFIGILIENYAGKFPFWISPLQTMVIPISEEFNDYAVEVSNKIKNSGISSAVDLKNHNLNYKIRDHSLAKIPLLLICGKKEVDSNSVTIRRLDSNKQENMGIDQFLKTFSALNKASSN

SEQ ID NO: 189159 - protein, 314 aa, Unknown
  Bacterial polypetide isolated from the Sargasso Sea
KSGHWEKFRDDMFTTASENRTYAIKPMNCPCHIQVFNQGLKSYKDLPIRLAEFGSCHRNEPSGALHGLMRVRNFTQDDAHIFCTEEQIQEEVSTFIDLVFEVYKTFGFNEIIIKLSTRPEKRVGSEDIWDKSEEALTKALDNKNLKWELQPGEGAFYGPKIEFSLKDCLNRVWQCGTIQVDFSMPIRLDATYVDIDNEKRNPVMLHRAILGSFERFIGILIEQYEAKFPIWLAPYQIILLSITDRNIEKCLKFNELINNNGYRSKVDIRNEKIGYKIREATLGRVPLIAVIGGKEEEIDSVALRALDGRNLGIF

SEQ ID NO: 189160 - protein, 126 aa, Unknown
  Bacterial polypetide isolated from the Sargasso Sea
MPQIQLLDGKKISFVKSINGFELSKKISKSLDKLALIMEVDGELKDLSHQIIKDSKVRIITHKDKEGLEVIRHDAAHIMAMAVQELFPGTQVTIGPVIENGFYYDFARKEPFTSDDLKKMKKKCLK

SEQ ID NO: 189161 - protein, 237 aa, Unknown
  Bacterial polypetide isolated from the Sargasso Sea
MPIITLPDGKNIDFPNKVTGMEVAEKISKSLAKQATVISVDGELKDLNYLIENDCSIKIFTSKNPEGLETIRHDTAHILAMAVQELFPGTQVTIGPVIENGFYYDFARKEPFTEDDLVKIENKMKEIVDRNEITKREVWDRNKAISHFKNKGEIYKAELIEAIPENEDVSIYFHGEWHDLCRGPHLSSTGKIGKYFKLTKVSGAYWRGDSNNEMLQRIYGTSWASQKDLDEHLNRIE

SEQ ID NO: 189162 - protein, 325 aa, Unknown
  Bacterial polypetide isolated from the Sargasso Sea
KSGHWDKFGANMYTSITPDEKVFAIKPMNCPGCVQVFNQGLKSYRDLPLKMSEFGKVHRYEPSGALHGLLRVRAFTQDDAHIFCTEEQITEECLTVTNLILEIYRELGFDKVILKYSDRPDQRVGDDSVWDKSEKALLEAIKASKLEYSINKGEGAFYGPKIEFVLRDAIGRDWQCGTLQVDLNLPGRLGASYVASDGTKKIPVMLHRALFGSLERFIGILIEHYAGKLPFWISPLQAVIIPVSNEFDTYAKNLKKKIKKSGISCEVDLKNHNLNYKIREHSLTKVPLLLICGKKEVDSNSVTIRKIGVNKQESMEVKKFLEKYS

SEQ ID NO: 189163 - protein, 205 aa, Unknown
  Bacterial polypetide isolated from the Sargasso Sea
VWDKSEAALLEAIKATKLEYSINKGEGAFYGPKIEFVLRDAIGRDWQCGTLQVDLNLPGRLGASFVDKDGTKKVPVMLHRALFGSLERFIGILIENYAGKLPFWISPLQAVVIPISSDFDEYAKSVAKELKRSGLIVEVDLKNHNLNYKIRDHSLTKVPMLLICGKKEVDSNSVTIRRLDSNKQENMALKEFIKKYLDLNKAPSI

SEQ ID NO: 189164 - protein, 309 aa, Unknown
  Bacterial polypetide isolated from the Sargasso Sea
SLNFKDKVTGFKIAEKISKSLSKEALIISVDGNFKDLNYEIDKDCLVKIYTSKDKEGLETIRHDTAHILAMAVQELFPGTQVTIGPVIDNGFYYDFARKEPFTEEDLRKIEKRMLEIVERDEPTHREVWKRDKAVEHFKKAGEIYKAEIIKDIPEEEEVSVYFHGKWHDLCRGPHLTSTGKIGKYFKLMKVSGAYWRGDSNNEMLQRIYGTSWPSKKELDDYLNRIEEAEKRDHRKLGKEMDLFHFREESPGSVFWHEKGWNLFQKLISYMRAKQDEAGYKEINTPEVLDRTLWEKSGHWEKLELICIH

SEQ ID NO: 189165 - protein, 283 aa, Unknown
  Bacterial polypetide isolated from the Sargasso Sea
FLIENDCSVKIFTSKNPEGLETIRHDTAHILAMAVQELFPGTQVTIGPVIENGFYYDFARKEPFTEDDLVKIENKMKEIVDRNEITKREVWDRNKAISHFKKKGEIYKAELIEAIPENEDVSIYFHGEWHDLCRGPHLSSTGKIGKYFKLTKVSGAYWRGDSNNEMLQRIYGTSWATQKDLDEYLKRIEEAEKRDHRKLGREMDLFHFREESPGSVFWHERGWGLFQKLINYMRSRQDAAGYKEVNTPEVLDRQLWEKSGHWEKYGENMYTSETPDEKVFAIK

SEQ ID NO: 189166 - protein, 292 aa, Unknown
  Bacterial polypetide isolated from the Sargasso Sea
DLIKIENRINKLIKTNYDVEILQVSKEEAIKTFKERDETFKLRIIEEIPEEGLINLYKHEEYIDMCRGPHVPNTRHLRHFKLLKLSGSYWRGNSENESLQRIYGTAWAKEKELNDYLTRIEEAEKRDHRKLGKKHSLFHIQEESPGMIFWHPNGWTIYQVLEKYIREILKKNDYLEIKTPQAVDKSLWEKSGHWEKFRDDMFTTASENRTYAIKPMNCPCHIQVFNQGLKSYKDLPIRLAEFGSCHRNEPSGALHGLMRVRNFTQDDAHIFCTEEQIQEEESIFIDLVFEGI

SEQ ID NO: 189167 - protein, 184 aa, Unknown
  Bacterial polypetide isolated from the Sargasso Sea
MFEIQLLDGKKIPFKKSINGFELSKKISKSLEKIALIMEVDGELKDLSHEITKNSKVRIITPKDKEGLEVIRHDAAHIMAMAVQELFPGTQVTIGPVIENGFYYDFARKEPFTSEDLKKIEKKMSEIIDRDVKTKREVWERNKAIAHFKKIGEKYKAEIIESIPKNEELSVYHHGDSWHDLCRG

SEQ ID NO: 189168 - protein, 272 aa, Unknown
  Bacterial polypetide isolated from the Sargasso Sea
KLNLFHLQEEAVGSVFWHPKGWSIFLEIENYIRRKLKNNNYLEVKTPQIIDRKLWEKSGHWDKFKENMFMATGDDDRFLALKPMNCPGHVQIYKQGIKSYKDLPLRMSEFGSCHRNEPSGALHGIMRVRQFTQDDAHIFCTESQITDEALIFCDLLKEVYKDFGFSDIKVKFSDRPVIRAGDDSVWDRSEKALLHAVKKANLNFELNPGEGAFYGPKLEFVLTDSIGRDWQCGTLQMDFVLPERLQATYIDEAGIKKHPVMLHRAIIGSFER

SEQ ID NO: 189169 - protein, 274 aa, Unknown
  Bacterial polypetide isolated from the Sargasso Sea
MLQRIYGTAWRNPKELRLYLNKIEEAEKRDHRILGKNMNLFHFQAEAPGAVFWHNKGWILFQNLINFMRKKQNDAGYIEINTPDIMDISLWEASGHKEKFGDNMFTTEAKEDRVYALKPMNCPGHVQVFKQGLKSYRDLPLKFSEFGKVHRYEPSGALHGLMRVRAFTQDDAHIFCTEDQITDECLEVCSLVLDIYKDFGFEDVHIKFSDRPKKRVGNDDIWEKSEKALQTAIDATGLPYKLNSGEGAFYGPKLEFVLRDAIGRDWQCGTLQVD

SEQ ID NO: 189170 - protein, 116 aa, Unknown
  Bacterial polypetide isolated from the Sargasso Sea
EEAKKRDHRKLGKELNLFSITDEIGPGLILWHPNGAIIRRIIEDYWRKEHDESGYSLIFTPHIAKADLWETSGHTEFYSENMFSQMDIDSNKYQTKPMNCPFHIMIYKSELRSYKD

SEQ ID NO: 189171 - protein, 162 aa, Unknown
  Bacterial polypetide isolated from the Sargasso Sea
MPKIQLLDGKKIDFKKTISGFELIKKISKSLEKNALIMEVDGDLKDLSHQITKDAKVRIITPKDKEGLEVIRHDAAHIMAMAVQELFPGTQVTIGPVIENGFYYDFARKDPFTEEDLKKIEKKMSEIIDRDVKTKREVWERSEAIKHFKKIGEKYKAEIIES

SEQ ID NO: 189172 - protein, 288 aa, Unknown
  Bacterial polypetide isolated from the Sargasso Sea
MRHSAAHVLAEAVLEMFPEAKYAIGPPIDTGFYYDFDLPRTLTPDDLKILQKRMKKSVKKNLAITGEQISKKDAKKIFANQPYKLELIEDIEEETVGHFTHGDFEDLCRGGHAASTGQIGAFELTHVAGAYWKGDENNPMLQRVYGALFATDDELQAYLKAREEAAERDHRRLGRELDLFFLDPLSPGSPFFLPGGTFVVNELTNYLRELYIKYGYDEVITPQLFSSELWKTSGHYENFQGDMFLVPIDDQEMGIKPMNCPGHCVLYNNTRHSYRELPMRIAEFTRLH

SEQ ID NO: 189173 - protein, 284 aa, Unknown
  Bacterial polypetide isolated from the Sargasso Sea
MPTITLPNGNRLNFPNKVTGIEVAEKISKSLAKQALIMSVDEELKDLYFSINKDCSVKIFTAKDPEGLEVIRHDTAHIMAMAVQELYPGTQVTIGPVIENGFFYDFARKETFTEDDLKKIEKRMSEIIDKDIKTRREVWEREKAIDHFKKIGEKYKAEIIESIPKNEELSVYHHGDTWYDLCRGPHLTSSSKIGKAFKLTKVSGAYWRGDSNNEMLQRIYGTSWASQKDLDEYLKRIEEAEKRDHRKLGKEMDLFHFREESPGSVFWHEKGWALFQKLIDYMRM

SEQ ID NO: 189174 - protein, 238 aa, Unknown
  Bacterial polypetide isolated from the Sargasso Sea
VTNLILEIYKDLGFEEVILKYSDRPELRVGDDQVWDKSEAALLEAIKATKLEYSINKGEGAFYGPKIEFVLRDAIGRDWQCGTLQVDLNLPGRLGASFVDSDGNKKVPVMLHRALFGSLERFIGILIENYSGKLPFWLCPVQTIVIPISSDFDDYAKEVNSQLKNAGISSEVDLKNHNLNYKIREHSLTKVPMLLICGKKEVDSNTVTIRRLDSKKQETMDLKEFLKKYSALNKAPSI

SEQ ID NO: 189175 - protein, 299 aa, Unknown
  Bacterial polypetide isolated from the Sargasso Sea
EVFNQGLKSYKDLPLKMSEFGKVHRYEPSGALHGLLRVRAFTQDDAHIFCTEDQITEECLTVTNLILEIYKDLGFENVILKYSDRPDLRVGDDSVWDKAEAALLKAVKATKLEYTINKGEGAFYGPKIEFVLRDAIGRDWQCGTLQVDFNLPGRLGASYVDKDGSKKVPVMLHRALFGSLERFIGILIENYAGKFPFWISPLQTMVIPISEEFNEYATKVSNKIKNVGISSAVDLKNNNLNYKIRDHSLAKIPLLLICGKKEVDSNSVTIRRLDSSKQENMDLDSFLKKFSALNKVSSN

SEQ ID NO: 189176 - protein, 289 aa, Unknown
  Bacterial polypetide isolated from the Sargasso Sea
KEMDLFHFREESPGSVFWHQKGWSLFQKLISYMRMKQETAGYQEINTPEILDRSLWEKSGHWEKFGANMYTSTTPDEKVFAIKPMNCPGCVQVFNQGLKSYRDLPLKMSEFGKVHRYEPSGALHGLLRVRAFTQDDAHIFCTEEQITEECLTVTNLILEIYKDLGFEEVILKYSDRPELRVGDDQVWDKSEAALLEAIKATKLEYSINRGEGAFYGPKIEFVLRDAIGRDWQCGTLQVDLNLPGRLGASFVDSDGNKKVPVMLHRALFGSLERFIGILIENYSGKLPFW

SEQ ID NO: 189177 - protein, 270 aa, Unknown
  Bacterial polypetide isolated from the Sargasso Sea
MPNIKLPDGNSLKFDTKVTGFQIAEKISKSLSKQALIISVDGNLKDLNYEIDNDCSVKIYTAKDKEGLETIRHDTAHVLAMAVQELFPKTQVTIGPVIDNGFYYDFARKDPFTEEDLRKIEKKMLEIVERDEPTHREVWKRDKAIEHFKKAGEIYKAEIIKDIPKEEEVSVYFHGKWHDLCRGPHLSSTGKIGKFFKLTKVSGAYWRGDSNNEMLQRIYGTSWTSQKELDEYLKRIEEAEKRDHRKLGKEMNLFHFREESPGSVFWHERG

SEQ ID NO: 189178 - protein, 283 aa, Unknown
  Bacterial polypetide isolated from the Sargasso Sea
KQALLISVDGELKDLNHSIYKDSSIKIFTSKDKEGLETIRHDTAHILAMAVQELFPGTQVTIGPVIEDGFYYDFARKEPFTTEDLEKIENKMKEIVDRDEKTYREVWKRNDAIEHFKKKGETYKAEIIESIPEDEDVSLYFHGDWHDLCRGPHLSSTGKIGKYFKLTKVSGAYWRGDSNNEMLQRVYGTSWSTQKELDDYLNRIEEAEKRDHRKIGKEMDLFHFREESPGSVFWHQKGWSLFQKLISYMRMKQETAGYQEINTPEILDRSLWEKSGHWKNSVL

SEQ ID NO: 189179 - protein, 233 aa, Unknown
  Bacterial polypetide isolated from the Sargasso Sea
MEIYKDLGFEDVILKYSDRPDIRVGDDNVWDKSEAALLEAIKVSKLEYTINKGEGAFYGPKIEFVLRDAIGRDWQCGTLQVDLNLPERLGATYVAKDGTKKIPVMLHRALFGSLERFIGILIENYAGKLPFWLTPLQTVVIPISSDFDDYAKDVYKQIKKIGISSEVDLKNHNLNYKIRDHSLTKVPLLLICGKKEVDTNSVTIRRLDSNKQENMELKEFLKKYSALNKAPSI

SEQ ID NO: 189180 - protein, 236 aa, Unknown
  Bacterial polypetide isolated from the Sargasso Sea
NIILEIYKDLGFKNVILKYSDRPEKRVGEDKIWDKSEAALLSAIKKSKLEYTINKGEGAFYGPKIEFVLRDAIGRDWQCGTLQVDLNLPDRLGASFVDKDGSKKVPVMLHRALFGSLERFIGILIEHYAGKLPLWLSPSQVMVLPISEDNNTYAKKVFEELFKEGIKCEVDLKNQKINYKIREHSLAKVPILLICGKKESTNNTVTIRRLGSDKQENMKTSKFLKEILNANKLPLK

SEQ ID NO: 189181 - protein, 265 aa, Unknown
  Bacterial polypetide isolated from the Sargasso Sea
ENEDVSIYFHGEWHDLCRGPHLSSTGKIGKYFKLTKVSGAYWRGDSNNEMLQRIYGTSWATQKDLDEYLKRIEEAEKRDHRKLGREMDLFHFREESPGSVFWHERGWGLFQKLINYMRSRQDAAGYREVNTPEVLDRQLWEKSGHWEKYGENMYTSETPDEKVFAIKPMNCPGHIQVFNQGLKSYRDLPLRFAEFGKVHRYEPSGALHGLLRVRAFTQDDAHIFCTEDQITSECLIVTNLILDIYKDLGFENVILKYADRPEIRV

SEQ ID NO: 189182 - protein, 255 aa, Unknown
  Bacterial polypetide isolated from the Sargasso Sea
SEFGKVHRYEPSGALHGLLRVRAFTQDDAHIFCSEEQITEECLNVTNLILEIYKDLGFENIILKYSDRPDVRVGDDNVWDKSEKALLEAIKASKLEYSINKGEGAFYGPKIEFVLRDAIGRDWQCGTLQVDLNLPERLGASFVDKDGSKKVPVMLHRALFGSLERFIGILIENYSGKLPFWISPLQTMIIPVSSEFDNYAKEVNKKIKKEGITSEVDLKNHNLKYKIREHSLSKIPILLICGKKEVDSNTVTIRR

SEQ ID NO: 189183 - protein, 296 aa, Unknown
  Bacterial polypetide isolated from the Sargasso Sea
KLLITKVSGAYWRGDSNNEMLQRIYGTCWSSKKELDQYLNRLEEAEKRDHRKLGKEMDLFHFREESPGSVFWHEKGWNLFQRLIEYMRLKQRIAGYREINTPELLDKSLWEKSGHWDKFGDLMFTSETPDEKVFAIKPMNCPGCVQIFNQGLKSYRDLPLKLSEFGKVHRYEPSGALHGLLRVRAFTQDDAHIFCTEEQITEECINVTKLILDIYKDLGFKKVFLKYSDRPEKRVGNDSVWDKSENALLAAIKKTKLDYSINKGEGAFYGPKIEFVLRDAIGRDWQCGTLQVDLNL

SEQ ID NO: 189184 - protein, 232 aa, Unknown
  Bacterial polypetide isolated from the Sargasso Sea
MPIITLPDGNNIDFPNKVTGLEVAEKISKSLAKQAMVISVDGELKDLEHLIDKDCSIKIFTSKNPEGLETIRHDTAHILAMAVQELFPGTQVTIGPVIENGFYYDFARKDPFTEEDLTTIENKMKEIVDRDEITKREVWDRNKAIDHFKKKGEIYKAELIEAIPKNEDVSIYFHGDWHDLCRGPHLSSTGKIGKYFKLMKVSGAYWRGDSNNEMLQRIYGTSWASQKDLDEY

SEQ ID NO: 189185 - protein, 219 aa, Unknown
  Bacterial polypetide isolated from the Sargasso Sea
MTNIILPDGKTIKFDKPVTGLEVAEKISKSLAKQALIMSVNGELKDLYHKIEDDSSIKIFTANDPEGLEVIRHDAAHIMAMAVQELYPGTQVTIGPVIENGFYYDFARKEPFTSEDLNKIENRMSEIVDKNVKTRREVWEREKAINHFKKIGEKYKAEIIESIPKNEELTIYHHGDTWYDLCRGPHLVSSGKIGKAFKLTKVSGAYWRGDSKNEMFKEF

SEQ ID NO: 189186 - protein, 245 aa, Unknown
  Bacterial polypetide isolated from the Sargasso Sea
KVTGLEVAEKISKSLAKQAMIIGVDGELKDLDFIIDKDCSVKIFTSKNEEGLETIRHDTAHIMAMAVQELFPGTQVTIGPVIENGFYYDFARKEPFTEDDLNKIEVKMKEIVDRDEITKREVWERDKAIEHFKKKGEIYKAELIKNIPQGEEVSIYFHGKWHDLCRGPHLSSTGKIGKFFKLTKVSGAYWRGDSNNEMLQRIYGTSWASQKDLDIYLKRIEEAEKRDHRKLGKEMDLFHFREESP

SEQ ID NO: 189187 - protein, 272 aa, Unknown
  Bacterial polypetide isolated from the Sargasso Sea
TGKIGKAFKLTKVAGAYWRGDSKNEMLQRIYGTCWRNKKELDEYILKLEEAEKRDHRRLGKEMDLFHFREESPGAVFWHHKGWILFQTLISYMRQKQKKAGYKEINTPEILDKSLWEQSGHWEKFGENMFTSETPDKKIFAIKPMNCPGGIQVFNQGLKSYRDLPLKLSEFGKVHRYEPSGALHGLLRVRAFTQDDAHIFCTEDQITDECLNVTNLILEIYKDLGFKNVLLQFSDRPQKRVGDDKIWDKSESALLKAIKQTKLKYEINKGEG

SEQ ID NO: 189188 - protein, 263 aa, Unknown
  Bacterial polypetide isolated from the Sargasso Sea
MRVRAFTQDDGHIFCTEDQIESETGLFIEFLSSIYADLGFKNFDIKLSTRPEMRVGSDETWDKAEAALEAAIKNLGYLYRIDEGDGAFYGPKLDFVLTDAIGREWQCGTFQLDFNLAERLDASYVGEDGKKHIPVMIHRAVLGSFERFIGILIENYSGKLPFWLSPQQVVVASIVSDVNDYSLEIVELLKKQGILAEADLRNEKISYKIREHSNRKVPIILAIGNNEKKDGTVSVRRIGSTETKVLELKEAIKQITKENLILN

SEQ ID NO: 189189 - protein, 245 aa, Unknown
  Bacterial polypetide isolated from the Sargasso Sea
MPVITLPDGSQRAFDNAVSVLDVANDIGPGLAKATIAGKVNGELVDAVDMIDADAQLQIITAKDDEGLEILRHSCAHLLGHAIKQLWPNTKMAIGPVIDNGFYYDVDMEESLTQEDLAKLEKRMLELAKTNYDVVKNKVSWQEARDAFEARGESYKMEILDENISKDDRPALYHHEEYTDMCRGPHVPNMKFCHHFKLMKVAGAYWRGDSDNKMLQRIYGTAWADKKQLKSYLQRLEEAEKRDHR

SEQ ID NO: 189190 - protein, 268 aa, Unknown
  Bacterial polypetide isolated from the Sargasso Sea
GLDVIRHDAAHIMAMSVQELFPGTQVTIGPVIENGFYYDFSRKEPFTTDDLKKIEKRMSEIIDRDVKTKREVWERNKAIGHFKKIGEKYKAEIIKSIPEKEELSIYHHGDTWHDLCRGPHLASSKKIGKAFKLTKVSGAYWRGDSNNEMLQRIYGTCWSSKKELDAYLHRLDEAEKRDHRKLGKEMDLFHFREESPGSVFWHEKGWNLFQRLIEYMRLKQRNAGYREINTPELLDKSLWEKSGHWDKFGDLMFTSETPDEKTFAIKPI

SEQ ID NO: 189191 - protein, 248 aa, Unknown
  Bacterial polypetide isolated from the Sargasso Sea
MEDLEKLRFNIRHSAAHIMAEAVMKLFPGTMIGIGPPTSDGFYYDFDCPHQITKEDFKKIESEMKKIIKSKRKFSGTVTTRAEASKLFSSQPYKLEIINNIPKDEEVTIWSHESWEDICRGEHVEHTGNIKAFKLLDVAGAYWRGDEKNKMLQRVYGTAWESKEEQKKHLDKLELASKRDHRKLGTSLDLFYFDEFSPAMPFFLPKGTFIMNQLTTYMRDKYNKYGYQEVITPQIFSSKLWDLSGHSS

SEQ ID NO: 189192 - protein, 252 aa, Unknown
  Bacterial polypetide isolated from the Sargasso Sea
VTIGPVIENGFYYDFARKEPFTSDDLKKIEIRMSEIIDKDVKTRREVWEREKAISHFKKIGEKYKAEIIESIPENEELSVYHHGDTWYDLCRGPHLVSSGKIGKAFKLMKVSGAYWRGDSNNEMLQRIYGTGWATQKELNLYLERIEEAEKRDHRKIGKEMDLFHFREESPGTVFWHEKGWALFQKLISYMRKRQDEAGYKEVNTPEVLDRLLWEKSGHWEKYREHMYTSQTPDEKIFAIKPMNCPGHIEVF

SEQ ID NO: 189193 - protein, 277 aa, Unknown
  Bacterial polypetide isolated from the Sargasso Sea
MKITLADGKIKDFDEAVTAKAVAVSISTVLAKSAVAVRVNGNLCDLSTNLCDGDQVVFVKAGDPEALEVLRHSAAHLMADAILRLYPKAQLTIGPVVEDGFYYDIYLPEGKITPEDFPKIEKQMKHLSKKSLAFKRFCSSYDQADEHYQRYQQIDGGNNKFKQEIVAQIKEKQEQLSFYQHGDFIDLCRGPHVPHSGWLKYSKLLRVSGSYWRADAEREPLTRVYGTAFFNKEDLDEYLNFLQESKKRDHRILGEKLDLFSFSEDAPGFPFSFPREL

SEQ ID NO: 189194 - protein, 284 aa, Unknown
  Bacterial polypetide isolated from the Sargasso Sea
MKVSGAYWRGDSKNEMLQRIYGTSWSTQKELDNYLNMIEEAEKRDHRKLGKEMDLFHFREESPGSVFWHEKGWNLFQKLIAYMRSKQDDAGYKEINTPEILDRSLWEKSGHWEKFGANMYTSTTPDEKVFAIKPMNCPGCVQVFNQGLKSYRDLPLKMSEFGKVHRYEPSGALHGLLRVRAFTQDDAHIFCSEDQITQECLKVTNLILEIYKDLGFENVILKYSDRPETRVGDDKVWDKSEKALLEAIKASKLEYSVNKGEGAFYGPKIEFVLRDAIGRDWQCG

SEQ ID NO: 189195 - protein, 312 aa, Unknown
  Bacterial polypetide isolated from the Sargasso Sea
PHLSSTGKIGKYFKLTKVSGAYWRGDSNNEMLQRVYGTSWSTQKELDDYLERIEEAEKRDHRKIGKEMDLFHFREESPGSVFWHQKGWSLFQKLISYMRMKQEIAGYQEINTPEILDRSLWEKSGHWEKFGANMYTSTTPDEKVFAIKPMNCPGCVQVFNQGLKSYRDLPLKMSEFGKVHRYEPSGALHGLLRVRAFTQDDAHIFCTEEQITEECLTVTNLILEIYKDLGFEDVILKYSDRPELRVGDDQVWDKSEAALLEAIKATKLEYSINKGEGAFYGPKIEFVLRDAIGRDWQCGTLQVDLNLPGRLG

SEQ ID NO: 189196 - protein, 259 aa, Unknown
  Bacterial polypetide isolated from the Sargasso Sea
EKVFAIKPMNCPGCVQVFNQGLKSYRDLPLKMSEFGKVHRYEPSGALHGLLRVRAFTQDDAHIFCTEEQITEECLTVTNLILEIYKDLGFEDVILKYSDRPELRVGDDQVWDKSEAALLEAIKATKLEYSINKGEGAFYGPKIEFVLRDAIGRDWQCGTLQVDLNLPGRLGASFVDSDGNKKVPVMLHRALFGSLERFIGILIENYSGKLPFWLCPVQTIVIPISSDFDDYAKQVNSQLKKVGLSSEVDLKNHNLNYKI

SEQ ID NO: 189197 - protein, 271 aa, Unknown
  Bacterial polypetide isolated from the Sargasso Sea
ISIYKQGEWLDLCRGPHMNNTKQIGRGFKLMKVAGAYWRGDSKNVMLTRIYGTAWRNEKELESYLKQIEEAEKRDHRKLGKKMNLFHFQEEAPGAVFWHPKGWKLFQSLINYMRLRQDKAGYVETNTPDLLDKSLWETSGHWEKFGDNMFTTDPKEEKIFAIKPMNCPGAVEVYKQGLKSYRDLPLRMSEFGKVHRYEPSGALHGLMRVRAFTQDDAHIFCTEDQITEESKTICDLILSIYKDFGFDDVSIKFSDRPNKRVGEDTVGIRLK

SEQ ID NO: 189198 - protein, 202 aa, Unknown
  Bacterial polypetide isolated from the Sargasso Sea
MEETIENIRYKIRHSTAHVMAEAVTNLFPGTKIGMGPPTENGFYYDFDCPKSLSQEDLKIIEKEMKKIIKKKSKFSGMVVSREEAKKRFIGQDYKLEIINGIPDDEKISIWSHESWEDICRGEHVDSTKNITAFKLLDVAGAYWKGDEKNTMLQRVYGTAWETKDALKEYLKKLELAAKRDHRKLGVSLDLFYFDQLAPSMP

SEQ ID NO: 189199 - protein, 266 aa, Unknown
  Bacterial polypetide isolated from the Sargasso Sea
MKEIVDRNEITKREVWDRNKAISHFKKKGEIYKAELIEAIPENEDVSIYFHGKWHDLCRGPHLSSTGKIGKYFKLTKVSGAYWRGDSNNEMLQRIYGTSWATQKDLDEYLKRIEEAEKRDHRKLGREMDLFHFREESPGSVFWHERGWGLFQKLINYMRSRQDAAGYKEVNTPEVLDRQLWEKSGHWEKYGENMYTSETPDEKVFAIKPMNCPGHIQVFNQGLKSYRDLPLRFAEFGKVHRYEPSGALHGLLRVRAFTQDDAHIFL

SEQ ID NO: 189200 - protein, 184 aa, Unknown
  Bacterial polypetide isolated from the Sargasso Sea
INKGEGAFYGPKIEFVLRDAIGRDWQCGTLQVDLNLPERLGATYVARDGSKKIPVMLHRALFGSLERFIGILIENYAGKLPFWITPLQTVVIPISSDFDDYAKDVNKQIKKAGITSEVDLKNHNLNYKIRDHSLTKVPLLLICGKKEVDTNSVTIRRLDSNKQENMELKEFLKKYSALNKAHSI

SEQ ID NO: 189201 - protein, 187 aa, Unknown
  Bacterial polypetide isolated from the Sargasso Sea
MPTITLPDGSKKVFEKSVTILEIAQSIGSGLAKATIAGKVNDVLLDATLPINKDSKVVIITSKDKEGIEIIRHSFAHLIGHAVKQIYPNIQMAIGPVIEDGFYYDIFSEYRFTPEDLIKIEERINNLIKTNYDVEILQVSKEEAIKTFKERHETFKLRIIKEIPEGGLINLYKHEEYIDMCRGPHVP

SEQ ID NO: 189202 - protein, 307 aa, Unknown
  Bacterial polypetide isolated from the Sargasso Sea
LSYEIIKDSKVRIITSNDQEGLEVIRHDAAHIMAMAVQELFPGTQVTIGPVIENGFYYDFARKDPFTSDDLLKIEKKMSQIIDKDVKTRREVWEREKAIKHFLKIGEKYKAEIIESIPQGEELSIYHHGDTWHDLCRGPHLASSSKIGKAFKLTKVSGAYWRGDSNNEMLQRIYGTCWSSKKDLDDYLHRLEEAEKRDHRKLGKEMDLFHFREESPGSVFWHEKGWLLFQRLIEYMRMKQRLAGYKEINTPELLDKSLWEKSGHWEKFGEHMFTSDTPDEKTFAVKPMNCPGCVQVFNQGLKSYRDL

SEQ ID NO: 189203 - protein, 274 aa, Unknown
  Bacterial polypetide isolated from the Sargasso Sea
HVLAMAVQELFPGTQVTIGPVIENGFYYDFARKETFTEEDLQKIEKKMKEIVERDEQTHREVWERDKAIEHFKKAGEIYKAEIIKSIPKGEEVSIYFHGKWHDLCRGPHLTSTGKIGKYFKLMKVAGAYWRGDSKNEMLQRIYGTAWSSQKELDEYLKRIEEAEKRDHRKLGKEMDLFHFREESPGSVFWHEKGWSLFQKLIDYMRSKQKQAGYKEINTPEILDRSLWEKSGHWEKFGQHMYTSTTPDEKVFAIKPMNCPGCVQVFNQGLKSYR

SEQ ID NO: 189204 - protein, 202 aa, Unknown
  Bacterial polypetide isolated from the Sargasso Sea
DQAEAALESAIKKLDIPYTVEVGEGAFYGPKLDFVLTDAIGREWQCGTFQADFNLPDRLDAEYIGEDGSKYRPVMMHRAILGSFERFIGILIENYSGKLPLWLAPTQLAILTVTEEVNEYAKTLKQKFDDFNLRVDLDLRNEKIGYKIREHSNAKVPFMAVIGKDEVLAQTVSIRNLSENKTITYSINEAVSKLFEESKTPN

SEQ ID NO: 189205 - protein, 324 aa, Unknown
  Bacterial polypetide isolated from the Sargasso Sea
GKIAKAFKLTKVSGAYWRGDSNNEMLQRIYGTCWSSKKELDEYLNRLEEAEKRDHRKLGKEMDLFHFREESPGAVFWHEKGWNLFQRLIEYMRQKQRNAGYKEISTPELLDKSLWEKSGHWEKFGHHMFTSETPDEKVFAVKPMNCPGCVQVFNQGLKSYRDLPLKLSEFGKVHRYEPSGALHGLLRVRAFTQDDAHIFCTEEQITQECISVTNLILEIYKDLGFKKVFLKYSDRPETRVGDDKIWDKSEKALLAAIKKTKLEYKINKGEGAFYGPKIEFVLRDAIGRDWQCGTLQVDLNLPGRLGATFVDKDGSKKVPVMLHR

SEQ ID NO: 189206 - protein, 127 aa, Unknown
  Bacterial polypetide isolated from the Sargasso Sea
MPVITLPDGSKREFDQPVTLMQVAEDIGPGLAKATVCGRINGELVDACELITDDADVTLITGRDEEGLEVIRHSFAHLVGHAVKQLYPTAKMAIGPVIENGFYYDIDYERPFTPEDLEAIEKRVKEL

SEQ ID NO: 189207 - protein, 157 aa, Unknown
  Bacterial polypetide isolated from the Sargasso Sea
MPIITLPDGKNLDFPKKVTGSQVAEKISKSLAKQAMVISVDGELKDLDFIIEKDSSVKIFTSKNEEGLETIRHDTAHILAMAVQELFPGTQVTIGPVIENGFYYDFARKEPFTEDDLLQIEKKMREIVDRDEKTKREIWDSDKAIKHFKKKGEITKQ

SEQ ID NO: 189208 - protein, 261 aa, Unknown
  Bacterial polypetide isolated from the Sargasso Sea
RGDSNNEMLQRIYGTCWSNKKELEEYLNQLEEAEKRDHRKIGKEMDLFHFREESPGAVFWHEKGWTLFQRLIEYMRMKQRLAGYKEINTPELLDKTLWEKSGHWEKFGEHMFTSETPDEKTFAIKPMNCPGCVQVFNQGLKSYRDLPLKLSEFGKVHRYEPSGALHGLLRVRAFTQDDAHIFCTEDQITQESLSVTNLILDIYKDLGFENIILKYSDRPEKRVGDDKTWDKSEAALLSAIKKSKLDYTINKGEGAFYGPKN

SEQ ID NO: 189209 - protein, 280 aa, Unknown
  Bacterial polypetide isolated from the Sargasso Sea
VAGAYWRGDSKNEMLQRIYGTSWSSQKELDTYLEQIEEAEKRDHRKLGKEMDLFHFREESPGSVFWHEKGWKLFQKLVAYMRARQDLAGYKEINTPEVLDRALWEKSGHWEKYGEHMYTSQTPDEKVFAIKPMNCPGHVQVFNQGLKSYRDLPLRISEFGKVHRYEPSGALHGLLRVRAFTQDDAHIFCTEDQITNECLIVTNLILDIYKDLGFENVILKYSDRPDLRVGDDKVWDKAEKALLDAVKASKLKYTINKGEGAFYGPKIEFVLRDAIGRDWQ

SEQ ID NO: 189210 - protein, 298 aa, Unknown
  Bacterial polypetide isolated from the Sargasso Sea
VDGNDYYVKPMNCPHHHKIYDATPKSYRDLPYRIAEYGTCYRYEKSGQLFGLMRVRSMQMNDAHIYCSQSDFNEEFLDVCNMYLEYFKIFGIEKYEMRLSLHDPSKLGEKYIDEPELWIETEKSVKDALTKGGINYKEIPGEAAFYGPKIDVQVWSAIGKEFTLATNQVDFAIPRRFNLTYTDKNGNDQTPLCIHRAPLSTHERFIGFLIEHYGGDFPLWLSPTQVSILPVSEKSHAYAKTIKSKFKNAGIRVNLDDRADKIGAKIRSAELKKVPVMLIIGEKEEENNSATVRRRFVK

SEQ ID NO: 189211 - protein, 138 aa, Unknown
  Bacterial polypetide isolated from the Sargasso Sea
EDGIKKTPVMLHRALFGSLERFTGILIEHYAGHLPLWLSPLQVMVATITSDTDDYAINVKNELIKNGIRADVDLRNEKIGYKIREHSNSKVPIIIAVGKKESQENTTSVRRIGSSETKTFKLDEIVTTLSKETKSPIE

SEQ ID NO: 189212 - protein, 222 aa, Unknown
  Bacterial polypetide isolated from the Sargasso Sea
VILKYSDRPETRVGEDKVWDKAEEALLKAVKASKLEYSVNKGEGAFYGPKVEFVLRDAIGRDWQCGTLQVDLNLPGRLGATYVEKDGSKKVPVMLHRALFGSLERFIGILIENFAGKLPFWITPLQAIIIPISNEFDAYAKNVYKKVNETGINCEIDLKDHNLNYKIREHLMSKIPLLLICGKKEVDSNSITIRQLGSEKQEIMQLNTFLKKFSALNKAPSF

SEQ ID NO: 189213 - protein, 240 aa, Unknown
  Bacterial polypetide isolated from the Sargasso Sea
MPIITLPDGKNIEFPKEVTGLDVAEKISKSLSKQALIMSVDGELKDLYFSIKKDCSVKIFTAKDPEGLEVIRHDTAHIMAMAVQELYPGTQVTIGPVIENGFYYDFARKEPFTEKDLEKIEKKMSEIIDKDVKTRREVWKRDKAISHFKKIGEKYKAEIIESIPESEELTVYHHGDTWHDLCRGPHLVSSGKIGKAFKLTKVAGAYWRGDSKNEMLQRIYGTGWASQKDLDAYLKRIEEA

SEQ ID NO: 189214 - protein, 225 aa, Unknown
  Bacterial polypetide isolated from the Sargasso Sea
SYKLSTRPEKRVGSDDVWDKSEKALSDALDSKGLDWSLLPGEGAFYGPKIEFSLKDCLNRVWQCGTIQVDFSMPERLNSSYIDVDGKKQPPVMLHRAILGSFERFIGILIENYSGNLPIWLCPLQIVVMGITDRNNDACLDTKSKLIKYGFRASVDTRNEKVGFKIREHTMQRIPFLIIIGDKEEENNEISVRTREGKDLGKMTLDKFKLIMDESISKKSLVESK

SEQ ID NO: 189215 - protein, 300 aa, Unknown
  Bacterial polypetide isolated from the Sargasso Sea
GGGLAVWHPKGSRVRKLMEDFSRQRHESGGYEFVYTPHIANAELFRTSGHLDFYSEGMYPPMEMDNGEYYPKPMNCPMHCLIYRAGTRSYRDLPIRLFELGTVYRYERAGTLHGLMRIRGFTQDDAHIFTTEEGLGQEIENLLEFVMSVLRAFGFEEFTFSLSTRNPEKSVGSDEIWEHATAALQEAIERHGLPYSTKVGDAAFYGPKIDIDVADAIGRSWQLSTIQLDFNLPERFNLRYINSSGERKRPVMIHRALMGSIERFFGVLIEHYAGAFPLWLAPTQVSVLPVAEEYEAYAKE

SEQ ID NO: 189216 - protein, 284 aa, Unknown
  Bacterial polypetide isolated from the Sargasso Sea
EIIRHSCAHLFGHALKQLYPEAKMAIGPTIENGFYYDIDLEESLSENDLEKIELRMKELAKTNYDVVREVVTRKKALDTFKNRNEPYKIEIINEIPDDEIIALYHHNEYIDMCRGPHVTSVRHLKAFKLTKIAGAYWRGSSDNKMLQRVYGTAWSSEKELKKHLVLLEEAEKRDHRKLGKELDLFHFQDIAPGMVFWHANGWSIYKELEDYIRRKISKEGYKEIKTPQILDKDLWVESGHWDKYKDNMYKTIIDDRELMIKPMNCPGHVQIYNQGIKSYKDLPL

SEQ ID NO: 189217 - protein, 300 aa, Unknown
  Bacterial polypetide isolated from the Sargasso Sea
FPINEDSEIKILKKDANIALEIIRHDCAHVMAEAVQELFPGTQVTIGPAIDHGFYYDFAFPKPFLSEDLVKIEKKMIEIIDKGLPFEREVWNRDQAIDYFDSQGEDYKSEIIKDLPNDEEITVYRQGEWLDLCRGPHLPTTKHIGKSFKLMKVAGAYWRGDENNEMLTRIYGTCWRNDKELNSYLDMLKEAEKRDHRKIGKEMKLFTFDEEVGPGLPLWLPNGSVVIEELEKLAKETEEKSGYDRVKTPHITKGSLYEKSGHLSHYKDSMFPAMDIDGNEYYLKPMNCPHHHKIYASLPR

SEQ ID NO: 189218 - protein, 242 aa, Unknown
  Bacterial polypetide isolated from the Sargasso Sea
ECLNVTNLILEIYKDLGFENVILKYSDRPDVRVGEDNVWDKSEKALLEAIKASKLEYSTNKGEGAFYGPKIEFVLRDAIGRDWQCGTLQVDLNLPERLGASFVDKDGSKKVPVMLHRALFGSLERFIGILIENYSGKLPFWISPLQTMVIPVSEDFDNYAKEVNQKIKKVGINSEVDLKNHNLNYKIREHSLSKIPILLICGKKEVDSNTVTIRRLDSNKQENMELNLFLKKFSDLSKAPSN

SEQ ID NO: 189219 - protein, 311 aa, Unknown
  Bacterial polypetide isolated from the Sargasso Sea
YGTSWASQKDLDEYLKRIEEAEKRDHRKIGKEMDLFHFREESPGSVFWHEKGWSLFQKLINYMRARQDAAGYKEVNTPEVLDRLLWEKSGHWEKYGENMYTSETPDEKVFAIKPMNCPGHIQVFNQGLKSYRDLPLRITEFGKVHRYEPSGALHGLLRVRAFTQDDAHIFCSEDQITSECLIVTNLILDIYKDLGFKNVVLKYADRPEVRVGDDKVWDKAEASLLEAVKASKLEYSINKGEGAFYGPKIEFVLRDAIGRDWQCGTLQVDFNLPGRLDASYIDKDGTKKVPVMLHRALFGSLERFIGILIEN

SEQ ID NO: 189220 - protein, 270 aa, Unknown
  Bacterial polypetide isolated from the Sargasso Sea
YRQGEWYDLCLGPHVPSTAKLMHSRLLSVSTAYWRGDQSRESLVRIYGTVFPDKHMLKQHLQRMEEAKKRDHRKLGKDLQLFHISEKVGQGLILWTPRGSVVRQELQDFIAQELRRQGYSQVFTPHIGKLDLYRTSGHFPYYQDSQYPPLVERDLMKKLADEGCSCSELSNLMEEGDIDGYLLKPMNCPHHTQIYASQARSYRDLPLRLAEFGTVYRWEQSGEISGMTRVRGFTQDDAHLFVTEEQIAEEVLGCIELVQIIFGTLGMEDY

SEQ ID NO: 189221 - protein, 242 aa, Unknown
  Bacterial polypetide isolated from the Sargasso Sea
MVLVGGSQKDLDEYLKRIEEAEKRDHRKLGKEMDLFHFREESPGSVFWHEKGWALFQKLIDYMRMKQEIAGYKEINTPEVLDRTLWEKSGHWEKFGANMYTSTTPDEKVFAIKPMNCPGCIEVFNQGLKSYKDLPLKMSEFGKVHRYEPSGALHGLLRVRAFTQDDAHIFCTEDQITKECLIVTDLILEIYKDLGFKNVILKYSDRPEKRVGDDSVWDKAESALLEAVKATKLEYSINKGEG

SEQ ID NO: 189222 - protein, 254 aa, Unknown
  Bacterial polypetide isolated from the Sargasso Sea
AHIFCTEEQITDECISVTKLILDIYKDLGFEKVFLKYSDRPEKRVGDDKVWDKSEKALLEAIKKTKLEYTINKGEGAFYGPKIEFVLRDAIGRDWQCGTLQVDLNLPGRLGATFVDKDGAKKIPVMLHRALFGSLERFIGIIIENYAGKLPFWLSPSQIVVLPIAEEHNDYAKKIFKDMFKEGIKCEVDLRNQKINYKIRDHSLSKVPFLLICGSKEIKDKSVTIRKLGSEKQETKKLNNAIKEFKQLNNLPIN

SEQ ID NO: 189223 - protein, 160 aa, Unknown
  Bacterial polypetide isolated from the Sargasso Sea
MPIIKLPDGKDLVFDKKVSGFEISEKISKSLSKQALIMSVNGELKDLSEIIESDSNVKIYTNKDKEGLETIRHDTAHILAMAVQEIFPGTQVTIGPVIEDGFYYDFSRKEPFTEDDLVKIESRMKEIVDRDEITKREVWDRSKAISYYKEKGEIYKAEII

SEQ ID NO: 189224 - protein, 217 aa, Unknown
  Bacterial polypetide isolated from the Sargasso Sea
MIKVGFPDGNEIKYDDGITPYEIAEKISPALAREILSAEYNGKTIELRTQLFKDGNIKFFKWEDREGKMVFWHSTAHLLAQVILNLYPDSKLTIGPAIENGFYYDVDFQNTSFSENDFIKIETKMIEEARKDHSFKMREVSNKEALEYYEKQQNKYKLELIQGLDGEKITFCDHADFTDLCKGGHIPSTKFIKSVKLLNIAGAYWRGDENNKQLTRI

SEQ ID NO: 189225 - protein, 311 aa, Unknown
  Bacterial polypetide isolated from the Sargasso Sea
KIPFSKSISGFELSKKISKSLEKSALIMEVDGHLKDLSHEITKDSKVRIITSKDKEGLEVIRHDAAHIMAMAVQELYPGTQVTIGPVIENGFYYDFARQEPFTSEDLKKIEKKMSEIIDRDVKTRREVWKRPEAIAHFKKIGEKYKAEIIESIPKNEELSVYHHGDTWHDLCRGPHLASSSKIGKAFKLTKVSGAYWRGDSNNEMLQRIYGTCWSTKKELDDYLHRLEEAEKRDHRKLGKEMDLFHFREESPGSVFWHEKGWLLFQRLVEYMRMKQRLAGYKEINTPELLDKTLWEKSGHWEKFGEQYVYL

SEQ ID NO: 189226 - protein, 303 aa, Unknown
  Bacterial polypetide isolated from the Sargasso Sea
MAAFKVFNQGLKSYRDLPLKLSEFGKVHRYEPSGALHGLLRVRAFTQDDAHIFCTEDQITQECLSVTNLILEIYKDLGFNNVILKYSDRPDQRVGEDYIWDKSEAALLAAIKKSKLEYSINKGEGAFYGPKIEFVLRDAIGRDWQCGTLQVDLNLPSRLGASYVSKDGTKKVPVMLHRALFGSLERFIGILIENYAGKLPLWLSPAQAVVCSIAEENNNYAKKLFEDLFKEGIKCEMDLRNEKISYKVREHSLAKIPYIIVCGKKEVADNTVTVRKLGSDKQEIMKKEDLIKHMLDLNKLPLN

SEQ ID NO: 189227 - protein, 244 aa, Unknown
  Bacterial polypetide isolated from the Sargasso Sea
ETGAVCSLLLNIYRDMGFEDIIIKFADRPERRVGADDVWDRAEDALKRAMESLGIDYTYNPGEGAFYGPKIEFVLRDAIGRDWQCGTLQVDLNLPGRLGAAYIGEDGNRHTPVLLHRAIFGSLERFIGIMLEHYAGNLPFWLAPKQVVIATITSDADEYAEEVTQQMENAGLRTEMDLRNEKINYKVREHSLMKTPVLIALGKREVEEGTVSIRRLGQKGQKVVSLAEAIRTLSEESRSHTLST

SEQ ID NO: 189228 - protein, 237 aa, Unknown
  Bacterial polypetide isolated from the Sargasso Sea
MFTSETPDEKIFAVKPMNCPGCIQVFNQGLKSYRDLPLKLSEFGKVHRYEPSGALHGLLRVRAFTQDDAHIFCTEEQITEECINVTKLILDIYRDLGFKKVFLKYSDRPEKRVGNDKIWDKSEKALLAAIKKTKLEYSVNKGEGAFYGPKIEFVLRDAIGRDWQCGTLQVDLNLPERLGATFVDKDGSKKVPVMLHRALFGSLERFIGILIENYAGKLPFWLSPSQAVVLPIAEEHN

SEQ ID NO: 189229 - protein, 147 aa, Unknown
  Bacterial polypetide isolated from the Sargasso Sea
RLDANYVGADGVKHRPVMLHRAILGSFERFIGILIENYAGRLPIWLSPVQVAVVSITDANINYGEKVLEEFNSRGIRTISDFRNEKINYKIREHSAQKIPVIVVVGDKEEKESSVSIRRLGDSRQEIVALTDAIDKLEEQARVPVAC

SEQ ID NO: 189230 - protein, 156 aa, Unknown
  Bacterial polypetide isolated from the Sargasso Sea
MQVDLNMPERLEAHYVGEDGQKYNPVMLHRALFGSLERFTGILIEHYAGALPLWLSPVQAIVTPITSEINEYGEEVYKSLKKAGIRVEKDLRNEKISYKIRENSLKKIPFQLILGKKEIEERSITMRVFGSDKQEKIKFENLNDFFIKKCMMPSQQ

SEQ ID NO: 189231 - protein, 289 aa, Unknown
  Bacterial polypetide isolated from the Sargasso Sea
YKDLPIRFSEFGSCHRYEASGTLHGLMRVRGFTQDDGHIFCTEDQIQDETKSFIGLLSDIYAQLGFEAFEIKLSTRPEVRAGTDEIWDKAELALENAIKNLKLPYEVVEGDGAFYGPKLDFVLIDALGREWQCGTFQADFILPERLDAKFVGPDSERYHPVMIHRAVLGSFERFLGVLIEHYGGALPAWLSPIQAEILNITDKQAEYCQKIADLLKKSGFRAHSDLRKEKITYKIRDHSLQKTPFLLIAGNREMENNTISVRARGGEDLGEMSIDDFIQKLHNVVDEKK

SEQ ID NO: 189232 - protein, 242 aa, Unknown
  Bacterial polypetide isolated from the Sargasso Sea
MPNIKLPDGKTILFSKKVDGLEIAKKISKTLEKNALIMEVDGELKDLSYQIEKDSKVKIITSKNQEGLDAMRHDTTHIMAMAVQELFPGTKIAIGPAIKDGFYYDFSRKEPFTPQDLEKIEKKMKEIVEKDEPTKRVVWERKKAKDHYKKIGENYKVELVDSIPEDQEVSVYYHGKWYDLCKGPHLTSTGKIGKYFKLTKISGAYWRGDSKNEMLQRIYGTSWPSQKELDEYLKRLKKQKKE

SEQ ID NO: 189233 - protein, 417 aa, Unknown
  Bacterial polypetide isolated from the Sargasso Sea
YHHGESWHDLCRGPHLASSGKIGKAFKLTKVSGAYWRGDSNNEMLQRIYGTCWSSKKDLDDYLNRLEEAEKRDHRKLGKEMDLFHFREESPGSVFWHEKGWLLFQRLVEYMRVKQRLAGYKEINTPELLDKTLWEKSGHWEKFGEHMFTSETPDEKTFAVKPMNCPGCVQIFNQGLKSYRDLPLKLSEFGKVHRYEPSGALHGLLRVRAFTQDDAHIFCTEDQITEESLSVTNLILEIYKDLGFKNVVLKYSDRPEKRVGDDSIWDKSEKALLTAIKKSNLEYSINKGEGAFYGPKIEFVLRDAIGRDWQCGTLQVDLNLPARLGASYVSKDGTKKVPVMLHRALFGSLERFIGILIENYAGKLPFWLSPSQAVVCPIAEENNSYVKKLFEDLFKEGIKCEVDLRNEKINYKVREHS

SEQ ID NO: 189234 - protein, 432 aa, Unknown
  Bacterial polypetide isolated from the Sargasso Sea
RGDSNNEMLQRVYGTSWSTQKELDDYLVRIEEAEKRDHRKLGKEMDLFHFREESPGSVFWHQKGWNLFQKLISYMRMKQEAAGYQEINTPEILDRSLWEKSGHWEKFGANMYTSTTPDEKVFAIKPMNCPGCVQVFNQGLKSYRDLPLKMSEFGKVHRYEPSGALHGLLRVRAFTQDDAHIFCTEEQITEECLSVTNLILEIYKDLGFEDVILKYSDRPELRVGDDKVWDKSEAALIEAIKETKLEYSINKGEGAFYGPKIEFVLRDAIGRDWQCGTLQVDLNLPGRLGASFVDKDGNKKIPVMLHRALFGSLERFIGILIENYSGKLPFWITPLQSVVIPVSNDFDDYAKKVCEQLKKSGISSEADLKNHNLNYKIRDHSLSKVPLLLICGKKEVDSNSVTIRRLDSNKQENMELKEFLKQYSALNKAPSI

SEQ ID NO: 189235 - protein, 347 aa, Unknown
  Bacterial polypetide isolated from the Sargasso Sea
MAGPERKLVSSAAATTPAPSASVVLPKTSESSQLLKIRHSMSHVMAMAVQQLFPKARVTIGPWTESGFYYDFDNPDPFTESDLKAIKKGMIKIINKKVPLERVEVTRAEAETKIKAQNEPYKLEILEGLQEPITLYTLGEDWWDLCAGPHVDHTGQLNAKAFELESVAGAYWRGDETKAQLQRIYGTAWETPEQLAEHKRRKEEALRRDHRRIGKDLDLFSIEDEAGAGLVFWHPRGCPHASADRGLLAPGPFRGWLRAALHTPRGRHQPLEDLRPPRLLRREHVRPHGGGRAGVPAQADELPVPRAHLRQQAAQLPGTADPLGRAGNRLPLRAAGRDARLDARARL

SEQ ID NO: 189236 - protein, 377 aa, Unknown
  Bacterial polypetide isolated from the Sargasso Sea
KDKEGLEVMRHDAAHIMAMSVQELFPGTQVTIGPVIENGFYYDFARKEPFTSDDLKKIEEKMLEIIDRDVKTRREVWERDQAIKHFKKIGENYKAEIVQSIPESEELSIYHHGDTWHDLCRGPHLVSSSKIGKAFKLTKVSGAYWRGDSNNEMLQRIYGTCWSSKKELDDYLNRLEEAEKRDHRKLGKEMDLFHFREESPGAVFWHEKGWTLFQRLIEYMRLKQRYAGYREINTPELLDKTLWEKSGHWDKFGDLMFTSETPDEKVFAVKPMNCPGCVQVFNQGLKSYRDLPLKLSEFGKVHRYEPSGALHGLLRVRAFTQDDAHIFCTEDQITDECITVTKLILDIYKDLGFKKVFLKYSDRPEKRVGDDAVWDKS

SEQ ID NO: 189237 - protein, 388 aa, Unknown
  Bacterial polypetide isolated from the Sargasso Sea
MPIITLPDGNNIDFSNKVTGLEVAEKISKSLAKQAMVISVDGELKDLDFLIEKDCSVKIFTSKNPEGLETIRHDTAHILAMAVQELFPGTQVTIGPVIENGFYYDFARKEPFTEDDLLKIENKMKEIVDRNEITKREVWDRNKAISHFKKKGEIYKAELIEAIPENEDVSIYFHGEWHDLCRGPHLSSTGKIGKYFKLTKVSGAYWRGDSNNEMLQRIYGTSWATQKDLDEYLKRIEEAEKRDHRKLGKEMDLFHFREESPGSVFWHERGWSLFQKLINYMRSRQDAAGYKEVNTPEVLDRQLWEKSGHWEKYGENMYTSETPDEKVFAIKPMNCPGHIQVFNQGLKSYRDLPLRFAEFGKVHRYEPSGALHGLLRVRAFTQDDAHIF

SEQ ID NO: 189238 - protein, 336 aa, Unknown
  Bacterial polypetide isolated from the Sargasso Sea
MDGKTLNFQKEVTGLEIADKISKSLSKQALIMSVDGQLKDLYFSIDKDCSVKIFTSKDPEGLEVIRHDTAHIMAMAVQELYPGTQVTIGPVIENGFYYDFARKEPFTEDDLKKIEKRMSEIIDKDIKTRREVWERDKAIGHFKKIGEKYKAEIIESIPENEELSVYHHGETWHDLCRGPHLVSSGKIGKAFKLTKVSGAYWRGDSNNEMLQRIYGTSWANQKDLDDHLNRIEEAEKRDHRKLGKEMDLFHFREESPGSVFWHEKGWALFQKLINYMRARQDAAGYKEVNTPEVLDRMLWEKSGHWEKYKENMYTSETPDEKIFAIKPMNCPGHIQV

SEQ ID NO: 189239 - protein, 322 aa, Unknown
  Bacterial polypetide isolated from the Sargasso Sea
MFTSETPDDKTFAIKPMNCPGCVQVFNQGLKSYRDLPLKLSEFGKVHRYEPSGALHGLLRVRAFTQDDAHIFCTEDQITQESLSVTNLILEIYKDLGFENVILKYSDRPEKRVGDDSVWDKSEAALLAAIKQSKLEYTINKGEGAFYGPKIEFVLRDAIGRDWQCGTLQVDLNLPKRLGASYVAKDGNKKVPVMLHRALFGSLERFIGILIENYAGKLPFWLSPAQAVVCPIAEENNDYVKKLFEDLFKEGIKCEMDLRNEKINYKVREHSLAKIPFIIVCGKKEVKENTVTVRQLGSDKQEIMKREDLIKTMLASNKLPLN

SEQ ID NO: 189240 - protein, 128 aa, Unknown
  Bacterial polypetide isolated from the Sargasso Sea
MPIITLPDGSKKVFEKSVTILEIAESIGSGLAKATIAGKVNDVLLDATIPINRDSKVVIITSKDREGIEIIRHSFAHLIGHAVKQIYPNIKMAIGPVIEDGFYYDIFSEYRFTPEDLIKIENRINKLI

SEQ ID NO: 189241 - protein, 392 aa, Unknown
  Bacterial polypetide isolated from the Sargasso Sea
RVGQGLPLWLPNGTELRDRLQDFLEDAQKRAGYKKVMSSHIGAKELYEISGHYEKYGADSFQPIYTPNDSETFILRPMNCPHHCEIYKAKPQSYKDLPLRLAEFGTVYRYEQSGELHGLSRVRGFTVDDAHIFCTPEQVDSEFNNTIDLVLFVFKSLGFDNYSAQVSLRDPENPEKYIGSDKNWEISEQAILNSAKEKGLEYNVELGEAAFYGPKLDFMVKDALGRKWQLGTIQVDYNLPERFDLTYKGSNNEDLRPVMIHRAPFGSMERFVAILLEHTAGVFPLWLTTTQVEILIVSENFKNYGQKVLNILENHEIRAHLDDRNETVGKKIRESEIKKIPFMIVVGENEVKNNSVSIRRHHGDDLGEMKIEEFVDIIKKEISECIPKFNIN

SEQ ID NO: 189242 - protein, 449 aa, Unknown
  Bacterial polypetide isolated from the Sargasso Sea
MTNITLPDGKTIKFEKPVTGSEVAEKISKSLAKQALIMSVNGELKDLYHIIKEDSSVKIFTAKDPEGLEVIRHDAAHIMAMAVQELYPGTQVTIGPVIENGFYYDFARKEPFTSEDLNKIEKRMSEIVDKDVKTKREVWEREKAINHFKKIGEKYKAEIIESIPKNEELSIYHHGETWHDLCRGPHLESSGKIGKAFKLTKVSGAYWRGDSKNEMLQRIYGTSWANQKDLDTYLKRIEEAEKRDHRKLGKEMNLFHFREESPGSVFWHEKGWSLFQKLVDYMRDRQKKAGYKEINTPEILDRSLWEKSGHWDKFGEHMYTSTTPDEKVFAIKPMNCPGCVQVFNQGLKSYRDLPLKMSEFGKVHRYEPSGALHGLMRVRAFTQDDAHIFCTEEQITEESLSVTNLILDIYKDLGFKNVILKYSDRPEIRVGDDKVWDKSEAALLKAVKA

SEQ ID NO: 189243 - protein, 275 aa, Unknown
  Bacterial polypetide isolated from the Sargasso Sea
MSKFPLSTIRHSAAHILAQAIQSKYENVKLAIGPAIDDGFYYDIDTPTPITEDDLKALEKEMKRIIKEKQKFKQYNMSKQDALQFFEEKKESYKVELINELEVDEVSIYENGPFIDLCKGPHIEHTKQVKAIKLLKVSGAYWRGNEKNKMLQRIYGTAFESKDELATYLEQVEEAKKRDHRRLGKELQLFSIQEDIGGGLVLWHPKGARVRQVIEDLWRAEHEKNNYEMVFSPHIGRQQLWETSGHLDFYEENMFTSIDIDNDPYYLKPMNCPFH

SEQ ID NO: 189244 - protein, 210 aa, Unknown
  Bacterial polypetide isolated from the Sargasso Sea
MPNIKLPDGNSLNFDKKVTGFQIAEKISKSLSKQALLISIDGNLKDLNYEIDYDCSVKIYTAKDKEGLETIRHDTAHVLAMAVQEIFPKTQVTIGPVIDNGFYYDFARKDPFTEEDLRKIEKKMMEIVERDEPTHREVWKRDKAIEHFKKAGEIYKAEIIKDIPKGEEVSVYFHGKWHDLCRGPHLSSTGKIGKYFKLTKVSGAYWRGDS

SEQ ID NO: 189245 - protein, 636 aa, Unknown
  Bacterial polypetide isolated from the Sargasso Sea
MPKIKLPDGSVKEFDKPINFDELASSIGSGLAKATVAGVLNGKLVDASELIESDSDAILITNSDEDGVEIIRHSCAHLFGHALKQLYPKAKMAIGPTIENGFYYDIDLEESLSENDLEKIELRMKELAQTNYAVVREVVTRKKALDTFENRNEPYKVEIINEIPNDEIIALYHHNEYIDMCRGPHVTSVRHLKAFKLTKIAGAYWRGSSDNKMLQRVYGTAWASEKELKKYLILLEEAEKRDHRKIGKELDLFHFQDIAPGMVFWHANGWSIYKELEDYIRRKISKEGYKEIKTPQILDKDLWVESGHWDKYKDNMYKTIIDDRELMIKPMNCPGHVQIYNQGIKSYKDLPLRMAEFGSCHRNEPSGALHGLMRVRNFVQDDAHIFCTEDQIESETISFCKLLQDVYRELGFEEVSIMYADRPEQRVGEDEIWDKAENALLNASKATGIPFDINSGDGAFYGPKLDFYLHDAIGRKWQCGTLQVDFNMPGRLGANYIGEDNEKHTPVMLHRAILGSLERFTGILIEHYEGRFPVWLAPIQVVVATITSKADKYAHKIEEKFIEKGIRVILDSRNEKINYKVREHSVNKIPFIFVVGVNEMNDGTVAIRKLGSDKQEILSIQDSVNLILKETAAPDS

SEQ ID NO: 189246 - protein, 412 aa, Unknown
  Bacterial polypetide isolated from the Sargasso Sea
MPIITLPDGKNIEFPKGVTGLDIAEKISKSLLKQALIMSVDGELKDLYFSIKKDCSVKIFTAKDPEGLEVIRHDTAHIMAMAVQELYPGTQVTIGPVIENGFYYDFARKEPFTEDDLEKIEKRMSEIIDKDVKTKREVWKRDKAISHFKKIGEKYKAEIIESIPDNEELTVYHHGDTWHDLCRGPHLVSSGKIGKAFKLTKVAGAYWRGDSKNEMLQRIYGTGWASQKDLDDYLKRIEEAEKRDHRKLGKEMDLFHFREESPGSVFWHEKGWALFQKLINYMRARQDAAGYKEVNTPEVLDRLLWEKSGHWEKYGENMYTSETPDEKVFAIKPMNCPGHIQVFNQGLKSYRDLPLRITEFGKVHRYEPSGALHGLLRVRAFTQDDAHIFCSEDQITSECLNVTNLILDIYKD

SEQ ID NO: 189247 - protein, 377 aa, Unknown
  Bacterial polypetide isolated from the Sargasso Sea
GNSKNEMLQRIYGTSWASKKDLDNYIKRLEEAEKRDHRKLGKEMDLFHFREESPGAVFWHQRGWTLFQKLIDYMRKKQNEAGYKEINTPEVLDRSLWEKSGHWEKFGAHMYTSETPDEKVFAIKPMNCPGCVQVFNQGLKSYRDLPYKMSEFGKVHRYEPSGALHGLLRVRAFTQDDAHIFCTEDQITEESLSVTNLILNIYKDLGFENVILKYSDRPDLRVGEDEVWDKAEKALLEAVKATKLEYSINKGEGAFYGPKIEFVLRDAIGRDWQCGTLQVDLNLPGRLGASFVDKDGSKKVPVMLHRALFGSLERFIGILIENYSGKLPFWISPSQIMVIPVSEDFNDYSVKVNKKLIASGLNSEVDLKNHNLNYKIR

SEQ ID NO: 189248 - protein, 317 aa, Unknown
  Bacterial polypetide isolated from the Sargasso Sea
MKKLDTNSNLYKIRHSLAHVLAQAVLEIRPDAKLGFGPPVDNGFYYDFDLEEPLTPEDLPKLEKRMKHIINSGQVFEHEELDQEKMVKLLSSENQHYKIEQVEDLVAQNEIISLYRNGPFWDLCEGPHVKKTSEIPKNCFSLDSLAGAYWKGSEKNNMMQRVYGLAFENREQLNEYKAKRSLAMQRDHRKLNKNLSYYTICEEVGKGLPLWMPNGTVIRDELEKLAREKEFLAGYKRVSTPHITKEDLYFTSGHLPYYQESMFPPMEMDGERLFLKPMNCPHHHMIYKAEPRSYRDLPLRLAEYGTCYRYEQSGELA

SEQ ID NO: 189249 - protein, 469 aa, Unknown
  Bacterial polypetide isolated from the Sargasso Sea
IDNGFYYDVEWSDTISVDDLEKIESEMHEILKSKSSITKKLFSKKDALKVFKSLDEPYKQEIINESNQENEFQLYYQDKNNFVDLCKGPHLPSLSLIGSFKLTKVSGAYWKGDSRNKMLTRIYGTAWNSEKDLNSYLNDLEEAEKRDHRKLGKEMDLFHFQDEAPGMVFWHPDGWTIYRNLRNFVRNRLQKNNYIEVNTPQVIDRKLWEASGHWDKYRENMFITEVDEEHANEKRVNALKPMNCPGHVQIYNQGIKSYKDLPLKYAEFGLCHRYEPSGTMHGLMRVRAFTQDDGHIFCTEDQIESETGLFIEFLSDLYADLGFKEFDIKLSTRPEMRVGSDEIWDKAEDALEAAIKNLGYPYRIDEGDGAFYGPKLDFVLTDAIGREWQCGTFQLDFNLAERLDAKYVGEDGKKHTPVMIHRAVLGSFERFIGILIENYAGKLPFWLAPQQVVVASIISEVNDYSIEIL

SEQ ID NO: 189250 - protein, 502 aa, Unknown
  Bacterial polypetide isolated from the Sargasso Sea
FKSRKEDYKLEILKDIDTSEKVALYHHEEYVDMCRGPHIPNMSFIKAFKLTHVAGAYWRGKSDNKMLQRVYGTAWNSKKELDDHLHIKEEASKRDHRLLGKKYDLFHLQEEAPGMVFWHPKGWSIYTAVEKYMREKQVYANYSEIKTPQVIDRKLWEKSGHWEKYRENMFITEIDEEHANEKRTNALKPMNCPGHVQIYNQSLKSYRDLPIRFAEFGSCHRYEPSGTMHGLMRVRGFTQDDGHIFCTEDQIQEETASFISLLYDVYEDFGFKKIDIKLSTRPEVRVGSDKIWDKAEKALKNAIEALDIDYEIAEGDGAFYGPKIDFVLTDALKREWQCGTFQADFNLPERLDASYVGEDGKKHRPVMMHRAILGSFERFIGILIEQYDGSFPLWLSPIHAVVMNVSEKHTDRVVEITEILKKNEIKVISDLRNEKITYKIRDHSIQKIPYQIVIGDKEVEAGSISVRDRQSQKQSFMSESDFSKMVLRKIRSKGGLIGKIFR

SEQ ID NO: 189251 - protein, 366 aa, Unknown
  Bacterial polypetide isolated from the Sargasso Sea
MPLITLNDGKQIKYEKPVTGDKIAKDISPSLFKKSLAIKVNEELKDLSSTISKDSKIQIITIDDKDAIELLRHDSAHTMAMAVQELFPGTQVTIGPVIENGFYYDFARDEPFTEDDLIKIENKMKEIVEKDPTTRREVWERQKAIKHFKDIGEHFKAEIIESIPQSEEISIYFHGDWHDLCRGPHLPSLGKIGKAFKLMKVAGAYWRGDSNNQMLQRIYGTCWKNKKDLDLYLERLEEAEKRDHRKIGKTMDLFHFQEESPGAVFWHKKGWNLFQSLISFIRNTQLKAGYQEVNTPEILDRSLWEKSGHWEKFKDYMYTTETPDERTFAIKPMNCPGHCQIYNQGLKRYKDLPIKISELEKFIDTN

SEQ ID NO: 189252 - protein, 191 aa, Unknown
  Bacterial polypetide isolated from the Sargasso Sea
ASKLKYTINKGEGAFYGPKIEFVLRDAIGRDWQCGTLQVDLNLPGRLGASYVAKDGSKQVPVMLHRALFGSLERFIGILIENYAGKLPFWITPLQTVVIPISNDFDDYAKNVYQQLKIVGISSEVDLKNHNLNYKIRDHSLSKVPLLLICGKKEVDTNSVTIRRLDSNKQENMELKEFLKKYSAFNKAPSI

SEQ ID NO: 189253 - protein, 425 aa, Unknown
  Bacterial polypetide isolated from the Sargasso Sea
MLQRIYGTSWSTQKQLDDYLKRIEEAEKRDHRKLGKEMDLFHFREESPGAVFWHEKGWNLFQKLISYMRAKQDEAGYKEINTPEVLDRSLWEKSGHWEKFGANMYTSTTPDEKIFAIKPMNCPGCVQVFNQGLKSYRDLPLKMSEFGKVHRYEPSGALHGLLRVRAFTQDDAHIFCTEEQITEECLSVTNLILEIYKDLGFENVILKYSDRPDLRVGDDNVWDKSEKALLEAIKASKLEYTVNKGEGAFYGPKIEFVLRDAIGRDWQCGTLQVDLNLPGRLGASFIDKDGSKKIPVMLHRALFGSLERFIGILIENYAGKLPFWISPLQTVVIPVSSDFDTYAKEVNKKIKKKGISSIVDLKNHNLNYKIREHSLSKIPILLICGKKEVDSNTVTIRRLDSNKQENMDLNLFLKKYSALNKVNSK

SEQ ID NO: 189254 - protein, 513 aa, Unknown
  Bacterial polypetide isolated from the Sargasso Sea
PVTIDDIAKDIGAGLAKAAVAGKIDGQLVDASEIISDDCNVEIITVKDDEGLEIVRHSCAHLLAHALKQLYPDAQMAIGPVIKDGFYYDIKLDKNLSDEDLEAIEKRMKKLAKTKYDVKREVVSQKKAIKTFKERNEPYKVNLAEEIPDDEVIALYHHEEYIDMCRGPHVTNMRHLQAFKLMKVSGAYWRGDSKNEMLQRIYGTAWPNSKDLENYILQQEEAEKRDHRKLGRQLDLFHFQEEAPGMVFWHPKGWAIYSALKTFIQSKQAEYDYQEINTPQIVDRKLWEASGHWDKYRENMFITEIDEEHANEKRTNALKPMNCPCHVQVFNQGLRSYKDLPIRYAEFGSCHRYEASGTLHGLMRVRGFTQDDGHIFCTEDQIQDETKKFIELLTDIYAQLGFDEFDIKLSTRPEVRAGSEQVWDRAEQALENAIKNLNLPYEVVDGDGAFYGPKLDFVLIDALGREWQCGTFQLDFILPERLDAKFVDSDSEKYNPVLIHRAVLGSFERFLGV

SEQ ID NO: 189255 - protein, 543 aa, Unknown
  Bacterial polypetide isolated from the Sargasso Sea
MPDIQLLDGKKISFTKSINGFDIVKKISKSLEKKALIMEVDGKLTDLSFDIIKDSKVRIITSADKDGLDVLRHDAAHIMAMSVQELFPGTQVTIGPVIENGFYYDFARKEPFTADDLKKIEKKMAEIIDRDVKTKREVWDRNKALKHFKKIGEKYKAEIIESIPIKEELSIYHHGETWHDLCRGPHLPSSGKIGKAFKLTKVSGAYWRGDSKNEMLQRIYGTCWSNKEQLELYLKRLEEAEKRDHRKLGKEMDLFHFREESPGSVFWHDKGWILFQRLVEYMRFRQRLAGYKEINTPELLDKTLWEKSGHWEKFSEHMFTSETPDEKTFAIKPMNCPGCVQIFNQGLKSYRDLPLKLSEFGKVHRYEPSGALHGLLRVRAFTQDDAHIFCTEEQITQECLSVTNLIIDIYKSLGFKKVILKYSDRPEKRVGDDKIWDKSEQALLTAIKESKLEYSINKGEGAFYGPKIEFVLQDAIGRDWQCGTLQVDFNLPGRLGASYVNKSGEKQVPVMLHRALFGSLERFIGILIENYAGKLPFWLSPNQ

SEQ ID NO: 189256 - protein, 253 aa, Unknown
  Bacterial polypetide isolated from the Sargasso Sea
HIFCTEDQITEECLSVTNLILEIYKDLGFENVILKYSDRPNIRVGNDDVWDKSEKALLEAIKASKLEYSVNKGEGAFYGPKIEFVLRDAIGRDWQCGTLQVDLNLPGRLGASYVDKDGSKKVPVMLHRALFGSLERFIGILIENYAGKLPFWISPLQTTVIPVSNDFDDYAKKVQKEIKKIGISSEVDLKNHNLNYKIREHSLSKIPILLICGKKEVDTNTVTIRRLDSNKQENMDLKLFLKKYSALNKAPSN

SEQ ID NO: 189257 - protein, 479 aa, Unknown
  Bacterial polypetide isolated from the Sargasso Sea
ESIPKNEELSIYHHGDTWHDLCRGPHLTSSSKIGKAFKLTKVSGAYWRGDSNNEMLQRIYGTCWSSKKELEDYLKRLEEAEKRDHRKLGKEMDLFHFREESPGSVFWHEKGWLLFQRLIEYMRMKQRLAGYKEINTPELLDKTLWEKSGHWEKFGEHMFTSETPDEKTFAIKPMNCPGCVQVFNQGLKSYRDLPLKLSEFGKVHRYEPSGALHGLLRVRAFTQDDAHIFCTEDQITQETLSVTNLILEIYKALGFENVILKYSDRPEKRVGDDSVWDKSEAALLSAIKKSKLEYSINKGEGAFYGPKIEFVLRDAIGRDWQCGTLQVDLNLPERLGATFVDKDGAKKVPVMLHRALFGSLERFIGILIENYAGKLPFWLSPAQAVVCPIAEENNDYVKKLFEDLFKEGIKCEVDLRNEKINYKIREHSLAKIPMIIVCGKKEVAENTVTIRRLGSDKQEKMKREELIKSMLKANQLPLN

SEQ ID NO: 189258 - protein, 246 aa, Unknown
  Bacterial polypetide isolated from the Sargasso Sea
KLHKKSKTVCDLILSIYKDFGFDNVRIKFSDRPEKRVGDDAIWDKAEAALMQAMEATGLEYTLNPGEGAFYGPKLEFVLRDAIGRDWQCGTLQVDLNLPGRLGATYIGEDGNKKIPVMLHRALFGSLERFTGILIEHYAGHLPFWLSPLQAVVATITSDTDEYAYEVQKALVSKGIRAEIDTRNEKIGYKIREHSNSKVPAIIAVGKKEAQDKTVSVRRIGSSETKTFKLEDIVTSLSKESKSPIE

SEQ ID NO: 189259 - protein, 505 aa, Unknown
  Bacterial polypetide isolated from the Sargasso Sea
MNKINITLPDNSVHEHNSGVYALDIAKSIGERLSMSTVAATVNDVLVDATKPINEDASVVIHTADSKIGHDVLLHSTAHLMAQAVKKLWPNSQMTIGPVIENRFYYDFDIDGTFSDEDLSKIEDEMRNIAKQNYEVFRHELDRDDAVKIFSDLNEFYKIEIINDIEDSDQISAYKQGEFIDLCRGPHVPFTGNIKYFKLLTTSGAYWRGDEKNKMLQRIYGTAFSSKSKLKDYLAFLEEAKKRDHRKIGKELAIFTFDDEVGPGLPLWLPNGGVILNELEQLAKETEDRHGYQQVRTPHLTKGDLYKKSGHLDLYKDAMYPAMDVDGTDYYVKPMNCPHHHKIYSASPKSYRDLPFRISEYGTCYRYEKSGQLFGLMRVRSMQMNDAHIYCSNNQFSTEFLDVCNMYLEYFEIFGIEKYEMRLSLHDPKDLGKKYINEPELWLETEAIVRQTLTEGKINFVEIPGEAAFYGPKVDVQVWSAIGKEFTLATNQVDFAIPKRFGLTF

SEQ ID NO: 189260 - protein, 479 aa, Unknown
  Bacterial polypetide isolated from the Sargasso Sea
AYRQGDFIDLCKGPHVSLTSQLRWFKLTSTSQAYWRADKDRESLVRIYGMCYPSKDGLKERERQIQEAARRDHKKIGKEMGLYMINELIGKGLPVWLPYGEVLKSEIENFAIETEEAYGYDRVTTPVLGKKELFETSGHLPHYAEGMYPPMKMDDGDYYLKAMNCPMHHLVFTNSKRSYRDLPIRIAEYGTVYRNELSGTLAGLLRVRMLSMNDAHVYCTLDQVASEVRSNVRMAQEYYETFGFDDYDFRLSLWDPDNKDKYIDQPENWEATQNHLREIMDGLGVEYTEAVGEAAFYGPKIDIQFRTALGREESMSTIQLDFAAKERFGLSYMDETGNENGEVFVIHRAPLSTHERFVAFLLEQWAGNLPTWLSPVQAQVITISEKHKEYAEHVRETLKIAGVRVKVDDSDNTIGKKIRMHRKSRPAYMLILGDDEMKGESVSIRSRDGNQKNGVPLEQFVSDIFAEISNRTKDLSLVE

SEQ ID NO: 189261 - protein, 257 aa, Unknown
  Bacterial polypetide isolated from the Sargasso Sea
MNVDITLPDGSVRNYESPVTGYQIAESIGPRLLKDAICVEIDNKFQDLSFEISENINLRVVTTKDLDALHILRHSSAHILAQAVLNLYPNAQFGVGPSIENGFYYDFLFETPIKENELENIEKEMKRIAKSAQSFIRSEITKKDAKKIFKNQKLKLELIESAESDEGVGEEIVSTYTNDEFIDLCMGPHVPSTSILKHFKLTKVSGAYWRGDESNVQLQRIYGTSWFSKEDLDQYLIQQDEAEKRDHRKLGNELDLL

SEQ ID NO: 189262 - protein, 331 aa, Unknown
  Bacterial polypetide isolated from the Sargasso Sea
MYSPMDVTGQSYFAKPMNCPFHSMIYKNKRRSYRELPFRWAEMGTVYRYEASGTLHGLMRVRGFTQDDAHIFCRPDQVESEIERVIDFTLFVLRSFGFEDYSMYISTRPEKAVGEPEDWDMATEALKRAVDKHSLPYLIDRGGGAFYGPKIDVKIKDSLNREWQCTTIQFDFNLPERFDLTFVGQDGKYHRPFMVHRALLGSMERFFGTLVEHYAGNFPVWLAPVQAVVLPISDQQMDFAQEIGQTLSEGGVRCEVDDQDAKLGYKIREAETQKVPYMLVVGKEEVLSGQVSVRRHGDGDLGKMNIEDFVSRIQEETTSKTDRTPTGGCSH

SEQ ID NO: 189263 - protein, 275 aa, Unknown
  Bacterial polypetide isolated from the Sargasso Sea
MPNITLPDGKKLSFKNNVTGYEVAEKISKSLSKQALIVSVDGVLKDLSFSIQKDSSVKIITSKDKDGLDVIRHDAAHIMAMAVQELFPGTQVTIGPVIENGFFYDFARKEPFTKDDLKKIEKKMSEIIDRDVKTKREVWDRDKAIAHFKKIGEKYKAEIIESIPKNEELSIYHHGDTWHDLCRGPHLVSSGKIGKAFKLTKVSGAYWRGDSNNEMLQRIYGTCWGSKKELDEYLHRLEEAEKRDHRKLGKEMDLFHFREESPGSVFWHEKGWNLF

SEQ ID NO: 189264 - protein, 402 aa, Unknown
  Bacterial polypetide isolated from the Sargasso Sea
MNKLDTNSNLYKIRHSLAHVLAQAVLEIRPSAKLGFGPPVDNGFYYDFDLEEPLTPEDLPKLEKRMRHIINSGQVFEREELGQEKMVELLSSENQHYKIEQVEDLVAQNEIISLYRNGPFWDLCEGPHVKKTSEIPKNCFSLDSLAGAYWKGSEKNNMMQRVYGLAFENREQLNEYKEKRSLAMQRDHRKLNSKLSYYTISEEVGKGLPLWMPNGTVIRDELEKLAREKEFLAGYKRVSTPHITREDLYFTSGHLPYYQESMFPPMEMDGERLFLKPMNCPHHHMIYKAEPRSYRDLPLRLAEYGTCYRYEQSGELAGLLRVRGMTMNDAHIYCTPEQAKSEFINVMNLHTEYYKMFGLSNFWLRLSLAEEDKGKFVDEPELWQKAETLVSKVMEEVGIPYE

SEQ ID NO: 189265 - protein, 161 aa, Unknown
  Bacterial polypetide isolated from the Sargasso Sea
EWQCGTLQVDLNMPERLGGTFIAEDGKKYHPVMLHRALFGSLERFTGILLEHYAGNLPLWLSPVQAVVAPITSEIDDYAVEIQETLKSSGFRVEMDLRNEKISYKIRENSLQKIPFLLIVGKKEMEEKSVTLRTFGSKDQEKIKLDNLTDFFEKKCMIPGH

SEQ ID NO: 189266 - protein, 465 aa, Unknown
  Bacterial polypetide isolated from the Sargasso Sea
GEQRDLIDELPDNSSVSIITIQSDEGLEIMRHTLTAQVLAKAIKNLYSDSRLAIGPTIENGFYYDVSTETPISIEDLPKIENEMKRILENKSNIVKSLHSEKDAKKMFKEKGETLKIEIIDDAEQTDNFQIYTNADEDFIDLCRGPHLPNLSFIGAFKLTKVSGAYWKGDSSNEMLTRIYGTAWRNEKELQEHLKSIEEAEKRDHRKIGKDMDLFHFQDEAPGMVFWHPKGWTIYSTLKSYMSDMQKKADYKEINTPSVIDRKLWEKSGHWDKYRENMFITEIDEEHANEKRVNALKPMNCPGHVQVYNQGIRSYKELPFRLCEFGTCHRYEASGTMHGLMRVRGFTQDDGHIFLTEDQIESETATFIDLLSKVYADLGFNEFEIKLSTRPEQRVGSDEIWDKAELSLKNAIEKLGLEYRIDEGDGAFYGPKLDFVLTDAIGRKWQCGTLQLDFNLADRLDAQYV

SEQ ID NO: 189267 - protein, 396 aa, Unknown
  Bacterial polypetide isolated from the Sargasso Sea
MPDITLPDGKKLSFKNEVTGLEVASKISKSLSKQALIISVNGELKDLSFSIQKDSSVKIITQKDKEGLDVIRHDAAHIMAMAVQELFPGTQVTIGPVIENGFYYDFARKEPFTSDDLNKIEKKMSEIIDRDVKTKREVWKRGEAITHFKKIGEKYKAEIIESIPENEELSVYHHGDTWHDLCRGPHLVSSGKIGKAFKLTKVSGAYWRGDSNNEMLQRIYGTCWSSKKDLDDYLHRLEEAEKRDHRKLGKEMDLFHFREESPGSVFWHEKGWNLFQRLIEYMRLKQRNAGYKEINTPELLDKSLWEKSGHWDKFGELMFTSETPDEKIFAVKPMNCPGCIQVFNQGLKSYRDLPLKLSEFGKVHRYEPSGALHGLLRVRAFTQDDAHIFCTEEQIT

SEQ ID NO: 189268 - protein, 539 aa, Unknown
  Bacterial polypetide isolated from the Sargasso Sea
MSEKIIITFPDGNKKEVNKGISGIELASQISKSLAKESVAIKINNEIKDISLPINDNASVEILKRDSEEALELIRHDCAHVMAEAVQELFPGTQVTIGPAIENGFYYDFARDEPFTLADLPKIEKKMHDIIQRNKNFVREVWSKEESIKHFKDKGEDYKVELINDLSDNEEISIYKQGGWLDLCRGPHMVSTKQIGKAFKLMKVAGAYWRGDSSNAMLTRIYGTAWATEKDLEQHLIQIEEAEKRDHRKLGKEMDLFHFREESPGSVFWHEKGWLLFQRLVEYMRMKQRLAGYKEINTPELLDKTLWEKSGHWDKFGEHMFTSETPDEKTFAVKPMNCPGCVQVFNQGLKSYRDLPLKLSEFGKVHRYEPSGALHGLLRVRAFTQDDAHIFCTEDQITEESLSVTNLILEIYKDLGFKDIILKYSDRPEKRVGDDSIWDKSEAALLTAIKKSKLKYTINKGEGAFYGPKIEFVLRDAIGRDWQCGTLQVDLNLPKRLGASYVAKDGTKKIPVMLHRALFGSLERFIGILIENYAGKLPF
